United States Patent Application Publication US 2024/0342206 A1 - sequence listing, part 3

SEQ ID NO: 3692 - RNA, 1400 nt, synthetic construct
  misc_feature 1..1400: note = mRNA a-1 (hSL-A100) (opt11) from Homo sapiens__NP_000448.3__HNF4A(1-375)(S87A_S95A_S99A_K106R_K10 8R_K126R_K127R_S138A_T139A_S142A_S143A_S148A_T166A_S167A_S3 13A_S378A_T429A_T432A_S436A_K458R_S461E)
  source 1..1400: mol_type = other RNA
aggagagtcccgcagtcggcgtccagcggctctgcttgttcgtgtgtgtgtcgttgcaggccttattcaagcttaccatgcgactaagcaaaaccctagtcgacatggacatggcagactatagcgccgcactcgacccagcctacacaacgctcgagttcgaaaacgttcaagtccttaccatgggcaacgacacctcccccagcgaaggcaccaacctaaacgcccctaactcactcggagtgtccgcactatgcgcaatctgcggggaccgcgccaccggcaaacactacggcgcctccagctgcgacggctgcaaaggcttcttccgccgagccgtccgcaagaaccacatgtacgcctgccgcttcgctcgccaatgcgtcgtagaccgagaccgcagaaaccaatgcagatactgcagactcaagaaatgcttccgcgccggcatgcgacgcgaagccgtacaaaacgaacgcgaccgcatcgccgctcgtcgagcagcctatgaagactcagcccttccctcaataaacgcactactccaagccgaagtcctcagccgacaaatcgccgccccagtctcaggcatcaacggcgacatccgcgccaagaaaatagcctccatcgcggacgtctgcgagtccatgaaagaacaactcctagttctggtcgaatgggctaaatacatccccgcattctgcgaactcccactcgacgaccaagtagccctactccgagcccacgcaggagaacacctactcctaggagccacaaaacgttccatggtatttaaagacgtcctcctactaggcaacgactacatcgtcccccgccactgccccgaactcgccgaaatgtcccgcgtctccatccgcatcctagacgagctcgtactcccattccaagaactccaaatagacgacaacgaatacgcctacctaaaagccatcatcttcttcgatccagacgcaaaaggcctctcagacccaggcaaaatcaaaagacttagagcccaagtccaagtatcactcgaagactacatcaacgaccgacaatacgactcccgcggaaggttcggcgaactcctcctcctcctccccacactacaatccatcacctggcaaatgatagaacaaattcaattcataaaactattcggcatggccaagatagacaacctcctccaagaaatgctcctctgaggactagtccctgttcccagagcccacttttttttctttttttgaaataaaatagcctgtctttcagatctcaaaggctcttttcagagccaccaaaaaaaaaaaaaaaaaaaaaaaaaaaaaaaaaaaaaaaaaaaaaaaaaaaaaaaaaaaaaaaaaaaaaaaaaaaaaaaaaaaaaaaaaaaaaaaaaaaaa

SEQ ID NO: 3693 - RNA, 1400 nt, synthetic construct
  misc_feature 1..1400: note = mRNA a-1 (hSL-A100) (opt28) from Homo sapiens__NP_000448.3__HNF4A(1-375)
  source 1..1400: mol_type = other RNA
aggagagtcccgcagtcggcgtccagcggctctgcttgttcgtgtgtgtgtcgttgcaggccttattcaagcttaccatgcggctgagcaagaccctggtggacatggatatggcagactactccgccgctctggatccagcatatacaactctggagttcgaaaacgtccaggtgctgaccatgggaaatgacacatctcccagtgagggcactaacctgaatgcccctaactcactgggggtgagcgctctgtgcgcaatctgcggagacagggccaccggcaaacactacggggcttcctcttgtgatggatgcaagggctttttcagacgcagcgtccggaaaaatcatatgtacagttgccgattttcaaggcagtgcgtggtggacaaggacaagagaaaccagtgccgctattgtcggctgaaaaagtgcttcagggcaggaatgaaaaaggaagccgtccagaatgagagagatcgaatttccacacggcgcagctcttacgaagacagctccctgccaagtatcaacgctctgctgcaggcagaggtgctgtcaaggcagatcactagccccgtgtctgggattaacggcgatatcagagccaagaaaattgcttccatcgcagacgtctgcgaaagcatgaaggagcagctgctggtgctggtggagtgggccaaatacatccctgcattttgcgaactgccactggacgatcaggtcgctctgctgcgggcccacgcaggagagcatctgctgctgggcgctaccaagcgaagtatggtgttcaaggacgtgctgctgctggggaatgactatattgtccccaggcactgccctgaactggccgagatgtcaagagtgtctatccgcatcctggatgaactggtgctgccattccaggagctgcagattgacgataacgaatacgcatacctgaaagctatcatctttttcgaccccgacgccaagggactgtccgatcctggcaaaattaagcggctgaggagccaggtccaggtgagtctggaggactatatcaatgacagacagtacgatagccgagggcggtttggagaactgctgctgctgctgccaacactgcagtccattacctggcagatgatcgagcagatccagttcattaaactgttcggcatggcaaagatcgacaacctgctgcaggagatgctgctgtgaggactagtccctgttcccagagcccacttttttttctttttttgaaataaaatagcctgtctttcagatctcaaaggctcttttcagagccaccaaaaaaaaaaaaaaaaaaaaaaaaaaaaaaaaaaaaaaaaaaaaaaaaaaaaaaaaaaaaaaaaaaaaaaaaaaaaaaaaaaaaaaaaaaaaaaaaaaaaa

SEQ ID NO: 3694 - RNA, 1400 nt, synthetic construct
  misc_feature 1..1400: note = mRNA a-1 (hSL-A100) (opt28) from Homo sapiens__NP_000448.3__HNF4A(1-375)(S313A)
  source 1..1400: mol_type = other RNA
aggagagtcccgcagtcggcgtccagcggctctgcttgttcgtgtgtgtgtcgttgcaggccttattcaagcttaccatgcggctgagcaagaccctggtggacatggatatggcagactactccgccgctctggatccagcatatacaactctggagttcgaaaacgtccaggtgctgaccatgggaaatgacacatctccctcagagggcactaacctgaatgcccctaacagtctgggggtgagcgctctgtgcgcaatctgcggagacagggccaccggcaaacactacggggcttcctcttgtgatggatgcaagggctttttcagacgcagcgtccggaaaaatcatatgtactcatgccgatttagtaggcagtgcgtggtggacaaggacaagagaaaccagtgccgctattgtcggctgaaaaagtgcttcagggcaggaatgaaaaaggaagccgtccagaatgagagagatcgaatttccacacggcgcagctcttacgaagacagctccctgccatcaatcaacgctctgctgcaggcagaggtgctgagtaggcagatcactagccccgtgtctgggattaacggcgatatcagagccaagaaaattgcatccatcgctgacgtctgcgaaagcatgaaggagcagctgctggtgctggtggagtgggccaaatacatccctgcattttgcgaactgccactggacgatcaggtcgctctgctgcgggcccacgcaggagagcatctgctgctgggcgctaccaagcgatcaatggtgttcaaggacgtgctgctgctggggaatgactatattgtccccaggcactgccctgaactggccgagatgagtagagtgtctatccgcatcctggatgaactggtgctgccattccaggagctgcagattgacgataacgaatacgcatacctgaaagctatcatctttttcgaccccgacgccaagggactgtccgatcctggcaaaattaagcggctgagggcacaggtccaggtgagcctggaggactatatcaatgacagacagtacgatagccgagggcggtttggagaactgctgctgctgctgccaacactgcagtccattacctggcagatgatcgagcagatccagttcattaaactgttcggcatggccaagatcgacaacctgctgcaggagatgctgctgtgaggactagtccctgttcccagagcccacttttttttctttttttgaaataaaatagcctgtctttcagatctcaaaggctcttttcagagccaccaaaaaaaaaaaaaaaaaaaaaaaaaaaaaaaaaaaaaaaaaaaaaaaaaaaaaaaaaaaaaaaaaaaaaaaaaaaaaaaaaaaaaaaaaaaaaaaaaaaaa

SEQ ID NO: 3695 - RNA, 1400 nt, synthetic construct
  misc_feature 1..1400: note = mRNA a-1 (hSL-A100) (opt28) from Homo sapiens__NP_000448.3__HNF4A(1-375)(S313E)
  source 1..1400: mol_type = other RNA
aggagagtcccgcagtcggcgtccagcggctctgcttgttcgtgtgtgtgtcgttgcaggccttattcaagcttaccatgcggctgagcaagaccctggtggacatggatatggcagactactccgccgctctggatccagcatatacaactctggagttcgaaaacgtccaggtgctgaccatgggaaatgacacatctccctcagagggcactaacctgaatgcccctaacagtctgggggtgagcgctctgtgcgcaatctgcggagacagggccaccggcaaacactacggggcttcctcttgtgatggatgcaagggctttttcagacgcagcgtccggaaaaatcatatgtactcatgccgatttagtaggcagtgcgtggtggacaaggacaagagaaaccagtgccgctattgtcggctgaaaaagtgcttcagggcaggaatgaaaaaggaagccgtccagaatgagagagatcgaatttccacacggcgcagctcttacgaagacagctccctgccatcaatcaacgctctgctgcaggcagaggtgctgagtaggcagatcactagccccgtgtctgggattaacggcgatatcagagccaagaaaattgcatccatcgctgacgtctgcgaaagcatgaaggagcagctgctggtgctggtggagtgggccaaatacatccctgcattttgcgaactgccactggacgatcaggtcgctctgctgcgggcccacgcaggagagcatctgctgctgggcgctaccaagcgatcaatggtgttcaaggacgtgctgctgctggggaatgactatattgtccccaggcactgccctgaactggccgagatgagtagagtgtctatccgcatcctggatgaactggtgctgccattccaggagctgcagattgacgataacgaatacgcatacctgaaagctatcatctttttcgaccccgacgccaagggactgtccgatcctggcaaaattaagcggctgagggagcaggtccaggtgagcctggaagactatatcaatgacagacagtacgatagccgagggcggtttggagagctgctgctgctgctgccaacactgcagtccattacctggcagatgatcgagcagatccagttcattaaactgttcggcatggcaaagatcgacaacctgctgcaggaaatgctgctgtgaggactagtccctgttcccagagcccacttttttttctttttttgaaataaaatagcctgtctttcagatctcaaaggctcttttcagagccaccaaaaaaaaaaaaaaaaaaaaaaaaaaaaaaaaaaaaaaaaaaaaaaaaaaaaaaaaaaaaaaaaaaaaaaaaaaaaaaaaaaaaaaaaaaaaaaaaaaaaa

SEQ ID NO: 3696 - RNA, 1400 nt, synthetic construct
  misc_feature 1..1400: note = mRNA a-1 (hSL-A100) (opt28) from Homo sapiens__NP_000448.3__HNF4A(1-375)(S142A_S143A)
  source 1..1400: mol_type = other RNA
aggagagtcccgcagtcggcgtccagcggctctgcttgttcgtgtgtgtgtcgttgcaggccttattcaagcttaccatgcggctgagcaagaccctggtggacatggatatggcagactactccgccgctctggatccagcatatacaactctggagttcgaaaacgtccaggtgctgaccatgggaaatgacacatctccctcagagggcactaacctgaatgcccctaacagtctgggggtgagcgctctgtgcgcaatctgcggagacagggccaccggcaaacactacggggcttcctcttgtgatggatgcaagggctttttcagacgcagcgtccggaaaaatcatatgtactcatgccgatttagtaggcagtgcgtggtggacaaggacaagagaaaccagtgccgctattgtcggctgaaaaagtgcttcagggcaggaatgaaaaaggaagccgtccagaatgagagagatcgaatttccacacggcgcgctgcatacgaagacagctctctgccaagcatcaacgccctgctgcaggcagaggtgctgtccaggcagatcacttcacccgtgagtgggattaacggcgatatcagagctaagaaaattgccagcatcgcagacgtctgcgaatctatgaaggagcagctgctggtgctggtggagtgggctaaatacatccctgccttttgcgaactgccactggacgatcaggtcgcactgctgcgggctcacgccggagagcatctgctgctgggcgcaaccaagcgatccatggtgttcaaggacgtgctgctgctggggaatgactatattgtccccaggcactgccctgaactggctgagatgagcagagtgtcaatccgcatcctggatgaactggtgctgccattccaggagctgcagattgacgataacgaatacgcctacctgaaagcaatcatctttttcgaccccgacgccaagggactgagtgatcctggcaaaattaagcggctgaggtctcaggtccaggtgtccctggaggactatatcaatgacagacagtacgatagccgagggcggtttggagaactgctgctgctgctgccaacactgcagagcattacctggcagatgatcgagcagatccagttcattaaactgttcggcatggctaagatcgacaacctgctgcaggagatgctgctgtgaggactagtccctgttcccagagcccacttttttttctttttttgaaataaaatagcctgtctttcagatctcaaaggctcttttcagagccaccaaaaaaaaaaaaaaaaaaaaaaaaaaaaaaaaaaaaaaaaaaaaaaaaaaaaaaaaaaaaaaaaaaaaaaaaaaaaaaaaaaaaaaaaaaaaaaaaaaaaa

SEQ ID NO: 3697 - RNA, 1400 nt, synthetic construct
  misc_feature 1..1400: note = mRNA a-1 (hSL-A100) (opt28) from Homo sapiens__NP_000448.3__HNF4A(1-375)(S142E_S143E)
  source 1..1400: mol_type = other RNA
aggagagtcccgcagtcggcgtccagcggctctgcttgttcgtgtgtgtgtcgttgcaggccttattcaagcttaccatgcggctgagcaagaccctggtggacatggatatggcagactactccgccgctctggatccagcatatacaactctggagttcgaaaacgtccaggtgctgaccatgggaaatgacacatctccctcagagggcactaacctgaatgcccctaacagtctgggggtgagcgctctgtgcgcaatctgcggagacagggccaccggcaaacactacggggcttcctcttgtgatggatgcaagggctttttcagacgcagcgtccggaaaaatcatatgtactcatgccgatttagtaggcagtgcgtggtggacaaggacaagagaaaccagtgccgctattgtcggctgaaaaagtgcttcagggcaggaatgaaaaaggaagccgtccagaatgagagagatcgaatttccacacggcgcgaagagtacgaagacagctctctgccaagcatcaacgctctgctgcaggcagaggtgctgtccaggcagatcacttcacccgtgagtgggattaacggcgatatcagagccaagaaaattgcaagcatcgctgacgtctgcgagtctatgaaggaacagctgctggtgctggtggagtgggccaaatacatccctgcattttgcgaactgccactggacgatcaggtcgctctgctgcgggcccacgcaggagagcatctgctgctgggcgctaccaagcgatccatggtgttcaaggacgtgctgctgctggggaatgactatattgtccccaggcactgccctgaactggccgagatgagcagagtgtcaatccgcatcctggatgaactggtgctgccattccaggagctgcagattgacgataacgaatacgcatacctgaaagctatcatctttttcgaccccgacgccaagggactgagtgatcctggcaaaattaagcggctgaggtctcaggtccaggtgtccctggaggactatatcaatgacagacagtacgatagccgagggcggtttggagagctgctgctgctgctgccaacactgcagagcattacctggcagatgatcgaacagatccagttcattaaactgttcggcatggcaaagatcgacaacctgctgcaggagatgctgctgtgaggactagtccctgttcccagagcccacttttttttctttttttgaaataaaatagcctgtctttcagatctcaaaggctcttttcagagccaccaaaaaaaaaaaaaaaaaaaaaaaaaaaaaaaaaaaaaaaaaaaaaaaaaaaaaaaaaaaaaaaaaaaaaaaaaaaaaaaaaaaaaaaaaaaaaaaaaaaaa

SEQ ID NO: 3698 - RNA, 1400 nt, synthetic construct
  misc_feature 1..1400: note = mRNA a-1 (hSL-A100) (opt28) from Homo sapiens__NP_000448.3__HNF4A(1-375)(S143A)
  source 1..1400: mol_type = other RNA
aggagagtcccgcagtcggcgtccagcggctctgcttgttcgtgtgtgtgtcgttgcaggccttattcaagcttaccatgcggctgagcaagaccctggtggacatggatatggcagactactccgccgctctggatccagcatatacaactctggagttcgaaaacgtccaggtgctgaccatgggaaatgacacatctccctcagagggcactaacctgaatgcccctaacagtctgggggtgagcgctctgtgcgcaatctgcggagacagggccaccggcaaacactacggggcttcctcttgtgatggatgcaagggctttttcagacgcagcgtccggaaaaatcatatgtactcatgccgatttagtaggcagtgcgtggtggacaaggacaagagaaaccagtgccgctattgtcggctgaaaaagtgcttcagggcaggaatgaaaaaggaagccgtccagaatgagagagatcgaatttccacacggcgcagcgcttacgaagactctagcctgccatccatcaacgcactgctgcaggccgaggtgctgtcaaggcagatcaccagtcccgtgagcgggattaacggcgatatcagagcaaagaaaattgcttctatcgccgacgtctgcgaatccatgaaggagcagctgctggtgctggtggagtgggcaaaatacatccctgctttttgcgaactgccactggacgatcaggtcgccctgctgcgggcacacgctggagagcatctgctgctgggcgccactaagcgaagcatggtgttcaaggacgtgctgctgctggggaatgactatattgtccccaggcactgccctgaactggcagagatgtcaagagtgagtatccgcatcctggatgaactggtgctgccattccaggagctgcagattgacgataacgaatacgcttacctgaaagccatcatctttttcgaccccgacgcaaagggactgtctgatcctggcaaaattaagcggctgaggtcccaggtccaggtgagcctggaggactatatcaatgacagacagtacgatagccgagggcggtttggagaactgctgctgctgctgccaacactgcagtccattacctggcagatgatcgagcagatccagttcattaaactgttcggcatggccaagatcgacaacctgctgcaggagatgctgctgtgaggactagtccctgttcccagagcccacttttttttctttttttgaaataaaatagcctgtctttcagatctcaaaggctcttttcagagccaccaaaaaaaaaaaaaaaaaaaaaaaaaaaaaaaaaaaaaaaaaaaaaaaaaaaaaaaaaaaaaaaaaaaaaaaaaaaaaaaaaaaaaaaaaaaaaaaaaaaaa

SEQ ID NO: 3699 - RNA, 1400 nt, synthetic construct
  misc_feature 1..1400: note = mRNA a-1 (hSL-A100) (opt28) from Homo sapiens__NP_000448.3__HNF4A(1-375)(T166A)
  source 1..1400: mol_type = other RNA
aggagagtcccgcagtcggcgtccagcggctctgcttgttcgtgtgtgtgtcgttgcaggccttattcaagcttaccatgcggctgagcaagaccctggtggacatggatatggcagactactccgccgctctggatccagcatatacaactctggagttcgaaaacgtccaggtgctgaccatgggaaatgacacatctccctcagagggcactaacctgaatgcccctaacagtctgggggtgagcgctctgtgcgcaatctgcggagacagggccaccggcaaacactacggggcttcctcttgtgatggatgcaagggctttttcagacgcagcgtccggaaaaatcatatgtactcatgccgatttagtaggcagtgcgtggtggacaaggacaagagaaaccagtgccgctattgtcggctgaaaaagtgcttcagggcaggaatgaaaaaggaagccgtccagaatgagagagatcgaatttccacacggcgcagctcttacgaagacagctccctgccatcaatcaacgctctgctgcaggcagaggtgctgagtaggcagatcgccagccccgtgtctgggattaacggcgatatcagagcaaagaaaattgcttccatcgccgacgtctgcgaaagcatgaaggagcagctgctggtgctggtggagtgggcaaaatacatccctgctttttgcgaactgccactggacgatcaggtcgccctgctgcgggcacacgctggagagcatctgctgctgggcgccactaagcgatcaatggtgttcaaggacgtgctgctgctggggaatgactatattgtccccaggcactgccctgaactggcagagatgagtagagtgtctatccgcatcctggatgaactggtgctgccattccaggagctgcagattgacgataacgaatacgcttacctgaaagccatcatctttttcgaccccgacgcaaagggactgtccgatcctggcaaaattaagcggctgaggagccaggtccaggtgagcctggaggactatatcaatgacagacagtacgattcccgagggcggtttggagaactgctgctgctgctgccaaccctgcagtcaattacatggcagatgatcgagcagatccagttcattaaactgttcggcatggccaagatcgacaacctgctgcaggagatgctgctgtgaggactagtccctgttcccagagcccacttttttttctttttttgaaataaaatagcctgtctttcagatctcaaaggctcttttcagagccaccaaaaaaaaaaaaaaaaaaaaaaaaaaaaaaaaaaaaaaaaaaaaaaaaaaaaaaaaaaaaaaaaaaaaaaaaaaaaaaaaaaaaaaaaaaaaaaaaaaaaa

SEQ ID NO: 3700 - RNA, 1400 nt, synthetic construct
  misc_feature 1..1400: note = mRNA a-1 (hSL-A100) (opt28) from Homo sapiens__NP_000448.3__HNF4A(1-375)(S167E)
  source 1..1400: mol_type = other RNA
aggagagtcccgcagtcggcgtccagcggctctgcttgttcgtgtgtgtgtcgttgcaggccttattcaagcttaccatgcggctgagcaagaccctggtggacatggatatggcagactactccgccgctctggatccagcatatacaactctggagttcgaaaacgtccaggtgctgaccatgggaaatgacacatctccctcagagggcactaacctgaatgcccctaacagtctgggggtgagcgctctgtgcgcaatctgcggagacagggccaccggcaaacactacggggcttcctcttgtgatggatgcaagggctttttcagacgcagcgtccggaaaaatcatatgtactcatgccgatttagtaggcagtgcgtggtggacaaggacaagagaaaccagtgccgctattgtcggctgaaaaagtgcttcagggcaggaatgaaaaaggaagccgtccagaatgagagagatcgaatttccacacggcgcagctcttacgaagacagctccctgccatcaatcaacgctctgctgcaggcagaggtgctgagtaggcagatcactgaacccgtgagcgggattaacggcgatatcagagccaagaaaattgcatctatcgctgacgtctgcgagtccatgaaggagcagctgctggtgctggtggaatgggccaaatacatccctgcattttgcgagctgccactggacgatcaggtcgctctgctgcgggcccacgcaggagaacatctgctgctgggcgctaccaagcgaagcatggtgttcaaggacgtgctgctgctggggaatgactatattgtccccaggcactgccctgagctggccgaaatgtcaagagtgagtatccgcatcctggatgagctggtgctgccattccaggaactgcagattgacgataacgagtacgcatacctgaaagctatcatctttttcgaccccgacgccaagggactgtctgatcctggcaaaattaagcggctgaggtcccaggtccaggtgagcctggaagactatatcaatgacagacagtacgatagccgagggcggtttggagagctgctgctgctgctgccaacactgcagtccattacctggcagatgatcgagcagatccagttcattaaactgttcggcatggcaaagatcgacaacctgctgcaggaaatgctgctgtgaggactagtccctgttcccagagcccacttttttttctttttttgaaataaaatagcctgtctttcagatctcaaaggctcttttcagagccaccaaaaaaaaaaaaaaaaaaaaaaaaaaaaaaaaaaaaaaaaaaaaaaaaaaaaaaaaaaaaaaaaaaaaaaaaaaaaaaaaaaaaaaaaaaaaaaaaaaaaa

SEQ ID NO: 3701 - RNA, 1400 nt, synthetic construct
  misc_feature 1..1400: note = mRNA a-1 (hSL-A100) (opt28) from Homo sapiens__NP_000448.3__HNF4A(1-375)(S167A)
  source 1..1400: mol_type = other RNA
aggagagtcccgcagtcggcgtccagcggctctgcttgttcgtgtgtgtgtcgttgcaggccttattcaagcttaccatgcggctgagcaagaccctggtggacatggatatggcagactactccgccgctctggatccagcatatacaactctggagttcgaaaacgtccaggtgctgaccatgggaaatgacacatctccctcagagggcactaacctgaatgcccctaacagtctgggggtgagcgctctgtgcgcaatctgcggagacagggccaccggcaaacactacggggcttcctcttgtgatggatgcaagggctttttcagacgcagcgtccggaaaaatcatatgtactcatgccgatttagtaggcagtgcgtggtggacaaggacaagagaaaccagtgccgctattgtcggctgaaaaagtgcttcagggcaggaatgaaaaaggaagccgtccagaatgagagagatcgaatttccacacggcgcagctcttacgaagacagctccctgccatcaatcaacgctctgctgcaggcagaggtgctgagtaggcagatcactgcccccgtgagcgggattaacggcgatatcagagcaaagaaaattgcttctatcgccgacgtctgcgaatccatgaaggagcagctgctggtgctggtggagtgggcaaaatacatccctgctttttgcgaactgccactggacgatcaggtcgccctgctgcgggcacacgctggagagcatctgctgctgggcgccaccaagcgaagcatggtgttcaaggacgtgctgctgctggggaatgactatattgtccccaggcactgccctgaactggcagagatgtcaagagtgagtatccgcatcctggatgaactggtgctgccattccaggagctgcagattgacgataacgaatacgcttacctgaaagccatcatctttttcgaccccgacgcaaagggactgtctgatcctggcaaaattaagcggctgaggtcccaggtccaggtgagcctggaggactatatcaatgacagacagtacgatagccgagggcggtttggagaactgctgctgctgctgccaacactgcagtccattacctggcagatgatcgagcagatccagttcattaaactgttcggcatggccaagatcgacaacctgctgcaggagatgctgctgtgaggactagtccctgttcccagagcccacttttttttctttttttgaaataaaatagcctgtctttcagatctcaaaggctcttttcagagccaccaaaaaaaaaaaaaaaaaaaaaaaaaaaaaaaaaaaaaaaaaaaaaaaaaaaaaaaaaaaaaaaaaaaaaaaaaaaaaaaaaaaaaaaaaaaaaaaaaaaaa

SEQ ID NO: 3702 - RNA, 1400 nt, synthetic construct; identical to SEQ ID NO: 3701
  misc_feature 1..1400: note = mRNA a-1 (hSL-A100) (opt28) from Homo sapiens__NP_000448.3__HNF4A(1-375)(S167A_S378A_T429A_T432A_ S436A)
  source 1..1400: mol_type = other RNA

SEQ ID NO: 3703 - RNA, 1400 nt, synthetic construct; identical to SEQ ID NO: 3700
  misc_feature 1..1400: note = mRNA a-1 (hSL-A100) (opt28) from Homo sapiens__NP_000448.3__HNF4A(1-375)(S167E_S378E_T429E_T432E_ S436E)
  source 1..1400: mol_type = other RNA

SEQ ID NO: 3704 - RNA, 1400 nt, synthetic construct
  misc_feature 1..1400: note = mRNA a-1 (hSL-A100) (opt28) from Homo sapiens__NP_000448.3__HNF4A(1-375)(S87A)
  source 1..1400: mol_type = other RNA
aggagagtcccgcagtcggcgtccagcggctctgcttgttcgtgtgtgtgtcgttgcaggccttattcaagcttaccatgcggctgagcaagaccctggtggacatggatatggcagactactccgccgctctggatccagcatatacaactctggagttcgaaaacgtccaggtgctgaccatgggaaatgacacatctccctcagagggcactaacctgaatgcccctaacagtctgggggtgagcgctctgtgcgcaatctgcggagacagggccaccggcaaacactacggggcttcctcttgtgatggatgcaagggctttttcagacgcgcagtccggaaaaatcatatgtacagctgccgattttcaaggcagtgcgtggtggacaaggacaagagaaaccagtgccgctattgtcggctgaaaaagtgcttcagggccggaatgaaaaaggaagctgtccagaatgagagagatcgaattagtacacggcgctccagctacgaagactctagcctgccatccatcaacgcactgctgcaggccgaggtgctgtcaaggcagatcaccagtcccgtgagcgggattaacggcgatatcagagcaaagaaaattgcttctatcgccgacgtctgcgaatccatgaaggagcagctgctggtgctggtggagtgggcaaaatacatccctgctttttgcgaactgccactggacgatcaggtcgccctgctgcgggcacacgctggagagcatctgctgctgggcgccactaagcgaagcatggtgttcaaggacgtgctgctgctggggaatgactatattgtccccaggcactgccctgaactggcagagatgtcaagagtgagtatccgcatcctggatgaactggtgctgccattccaggagctgcagattgacgataacgaatacgcttacctgaaagccatcatctttttcgaccccgacgcaaagggactgtctgatcctggcaaaattaagcggctgaggtcccaggtccaggtgagcctggaggactatatcaatgacagacagtacgatagccgagggcggtttggagaactgctgctgctgctgccaacactgcagtccattacctggcagatgatcgagcagatccagttcattaaactgttcggcatggccaagatcgacaacctgctgcaggagatgctgctgtgaggactagtccctgttcccagagcccacttttttttctttttttgaaataaaatagcctgtctttcagatctcaaaggctcttttcagagccaccaaaaaaaaaaaaaaaaaaaaaaaaaaaaaaaaaaaaaaaaaaaaaaaaaaaaaaaaaaaaaaaaaaaaaaaaaaaaaaaaaaaaaaaaaaaaaaaaaaaaa

SEQ ID NO: 3705 - RNA, 1400 nt, synthetic construct
  misc_feature 1..1400: note = mRNA a-1 (hSL-A100) (opt28) from Homo sapiens__NP_000448.3__HNF4A(1-375)(S87E)
  source 1..1400: mol_type = other RNA
aggagagtcccgcagtcggcgtccagcggctctgcttgttcgtgtgtgtgtcgttgcaggccttattcaagcttaccatgcggctgagcaagaccctggtggacatggatatggcagactactccgccgctctggatccagcatatacaactctggagttcgaaaacgtccaggtgctgaccatgggaaatgacacatctccctcagagggcactaacctgaatgcccctaacagtctgggggtgagcgctctgtgcgcaatctgcggagacagggccaccggcaaacactacggggcttcctcttgtgatggatgcaagggctttttcagacgcgaagtccggaaaaatcatatgtacagctgccgattttcaaggcagtgcgtggtggacaaggacaagagaaaccagtgccgctattgtcggctgaaaaagtgcttcagggcaggaatgaaaaaggaggccgtccagaatgaaagagatcgaattagtacacggcgctccagctacgaggactctagcctgccatccatcaacgctctgctgcaggcagaagtgctgtcaaggcagatcaccagtcccgtgagcgggattaacggcgatatcagagccaagaaaattgcatctatcgctgacgtctgcgagtccatgaaggagcagctgctggtgctggtggaatgggccaaatacatccctgcattttgcgagctgccactggacgatcaggtcgctctgctgcgggcccacgcaggagaacatctgctgctgggcgctactaagcgaagcatggtgttcaaggacgtgctgctgctggggaatgactatattgtccccaggcactgccctgagctggccgaaatgtcaagagtgagtatccgcatcctggatgagctggtgctgccattccaggaactgcagattgacgataacgagtacgcatacctgaaagctatcatctttttcgaccccgacgccaagggactgtctgatcctggcaaaattaagcggctgaggtcccaggtccaggtgagcctggaagactatatcaatgacagacagtacgatagccgagggcggtttggagagctgctgctgctgctgccaacactgcagtccattacctggcagatgatcgagcagatccagttcattaaactgttcggcatggcaaagatcgacaacctgctgcaggaaatgctgctgtgaggactagtccctgttcccagagcccacttttttttctttttttgaaataaaatagcctgtctttcagatctcaaaggctcttttcagagccaccaaaaaaaaaaaaaaaaaaaaaaaaaaaaaaaaaaaaaaaaaaaaaaaaaaaaaaaaaaaaaaaaaaaaaaaaaaaaaaaaaaaaaaaaaaaaaaaaaaaaa

SEQ ID NO: 3706 - RNA, 1400 nt, synthetic construct
  misc_feature 1..1400: note = mRNA a-1 (hSL-A100) (opt28) from Homo sapiens__NP_000448.3__HNF4A(1-375)(R2V)
  source 1..1400: mol_type = other RNA
aggagagtcccgcagtcggcgtccagcggctctgcttgttcgtgtgtgtgtcgttgcaggccttattcaagcttaccatggtgctgagcaagaccctggtcgacatggatatggcagactactccgccgctctggatccagcatatacaactctggagttcgaaaacgtccaggtgctgaccatgggaaatgacacatctccctcagagggcactaacctgaatgcccctaacagtctgggggtgagcgctctgtgcgcaatctgcggagaccgggccaccggcaaacactacggggcttcctcttgtgatggatgcaagggctttttcaggagaagcgtgcgcaaaaatcatatgtactcatgccgatttagtcggcagtgcgtggtcgacaaggacaagaggaaccagtgcagatattgtcgcctgaaaaagtgcttccgggcaggaatgaaaaaggaagccgtgcagaatgagagggatagaatttccacacgacggagctcttacgaagacagctccctgccatcaatcaacgctctgctgcaggcagaggtgctgagtcgccagatcactagccccgtctctgggattaacggcgatatcagggccaagaaaattgcatccatcgctgacgtgtgcgaaagcatgaaggagcagctgctggtgctggtcgagtgggccaaatacatccctgcattttgcgaactgccactggacgatcaggtggctctgctgagagcccacgcaggagagcatctgctgctgggcgctaccaagcggtcaatggtgttcaaggacgtcctgctgctggggaatgactatattgtgccccgacactgccctgaactggccgagatgagtagggtgtctatcagaatcctggatgaactggtcctgccattccaggagctgcagattgacgataacgaatacgcatacctgaaagctatcatctttttcgaccccgacgccaagggactgtccgatcctggcaaaattaagcgcctgcggagccaggtccaggtgagcctggaggactatatcaatgacaggcagtacgattccagagggcgatttggagaactgctgctgctgctgccaacactgcagtcaattacctggcagatgatcgagcagatccagttcattaaactgttcggcatggcaaagatcgacaacctgctgcaggagatgctgctgtgaggactagtccctgttcccagagcccacttttttttctttttttgaaataaaatagcctgtctttcagatctcaaaggctcttttcagagccaccaaaaaaaaaaaaaaaaaaaaaaaaaaaaaaaaaaaaaaaaaaaaaaaaaaaaaaaaaaaaaaaaaaaaaaaaaaaaaaaaaaaaaaaaaaaaaaaaaaaaa

SEQ ID NO: 3707 - RNA, 1400 nt, synthetic construct
  misc_feature 1..1400: note = mRNA a-1 (hSL-A100) (opt28) from Homo sapiens__NP_000448.3__HNF4A(1-375)(R2V_K5V)
  source 1..1400: mol_type = other RNA
aggagagtcccgcagtcggcgtccagcggctctgcttgttcgtgtgtgtgtcgttgcaggccttattcaagcttaccatggtgctgagcgtcaccctggtggacatggatatggcagactactccgccgctctggatccagcatatacaactctggagttcgaaaacgtgcaggtcctgaccatgggaaatgacacatctccctcagagggcactaacctgaatgcccctaacagtctgggggtgagcgctctgtgcgcaatctgcggagaccgggccaccggcaagcactacggggcttcctcttgtgatggatgcaaaggctttttcaggagaagcgtgcgcaagaatcatatgtactcatgccgatttagtcggcagtgcgtcgtggacaaagacaagaggaaccagtgcagatattgtcgcctgaagaaatgcttccgggcaggaatgaagaaagaagccgtgcagaatgagagggatagaatttccacacgacggagctcttacgaagacagctccctgccatcaatcaacgctctgctgcaggcagaggtcctgagtcgccagatcactagccccgtgtctgggattaacggcgatatcagggccaagaagattgcatccatcgctgacgtgtgcgaaagcatgaaagagcagctgctggtcctggtggagtgggccaagtacatccctgcattttgcgaactgccactggacgatcaggtggctctgctgagagcccacgcaggagagcatctgctgctgggcgctaccaaacggtcaatggtcttcaaggacgtgctgctgctggggaatgactatattgtgccccgacactgccctgaactggccgagatgagtagggtctctatcagaatcctggatgaactggtgctgccattccaggagctgcagattgacgataacgaatacgcatacctgaaggctatcatctttttcgaccccgacgccaaaggactgtccgatcctggcaagattaaacgcctgcggagccaggtgcaggtcagcctggaggactatatcaatgacaggcagtacgattccagagggcgatttggagaactgctgctgctgctgccaacactgcagtcaattacctggcagatgatcgagcagatccagttcattaagctgttcggcatggcaaaaatcgacaacctgctgcaggagatgctgctgtgaggactagtccctgttcccagagcccacttttttttctttttttgaaataaaatagcctgtctttcagatctcaaaggctcttttcagagccaccaaaaaaaaaaaaaaaaaaaaaaaaaaaaaaaaaaaaaaaaaaaaaaaaaaaaaaaaaaaaaaaaaaaaaaaaaaaaaaaaaaaaaaaaaaaaaaaaaaaaa

SEQ ID NO: 3708 - RNA, 1400 nt, synthetic construct
  misc_feature 1..1400: note = mRNA a-1 (hSL-A100) (opt28) from Homo sapiens__NP_000448.3__HNF4A(1-375)(K179R_K180R)
  source 1..1400: mol_type = other RNA
aggagagtcccgcagtcggcgtccagcggctctgcttgttcgtgtgtgtgtcgttgcaggccttattcaagcttaccatgcggctgagcaagaccctggtggacatggatatggcagactactccgccgctctggatccagcatatacaactctggagttcgaaaacgtccaggtgctgaccatgggaaatgacacatctccctcagagggcactaacctgaatgcccctaacagtctgggggtgagcgctctgtgcgcaatctgcggagacagggccaccggcaaacactacggggcttcctcttgtgatggatgcaagggctttttcagacgcagcgtccggaaaaatcatatgtactcatgccgatttagtaggcagtgcgtggtggacaaggacaagagaaaccagtgccgctattgtcggctgaaaaagtgcttcagggcaggaatgaaaaaggaagccgtccagaatgagagagatcgaatttccacacggcgcagctcttacgaagacagctccctgccatcaatcaacgctctgctgcaggcagaggtgctgagtaggcagatcactagccccgtgtctgggattaacggcgatatcagagcccggcgaattgcatccatcgctgacgtctgcgaaagcatgaaggagcagctgctggtgctggtggagtgggccaaatacatccctgcattttgcgaactgccactggacgatcaggtcgctctgctgagggcccacgcaggagagcatctgctgctgggcgctaccaagagatcaatggtgttcaaagacgtgctgctgctggggaatgactatattgtcccccgccactgccctgaactggccgagatgagtcgggtgtctatcaggatcctggatgaactggtgctgccattccaggagctgcagattgacgataacgaatacgcatacctgaaggctatcatctttttcgaccccgacgccaagggactgtccgatcctggcaaaattaagagactgcgaagccaggtccaggtgagcctggaggactatatcaatgaccggcagtacgattcccgcgggaggtttggagaactgctgctgctgctgccaacactgcagtcaattacctggcagatgatcgagcagatccagttcattaaactgttcggcatggcaaagatcgacaacctgctgcaggagatgctgctgtgaggactagtccctgttcccagagcccacttttttttctttttttgaaataaaatagcctgtctttcagatctcaaaggctcttttcagagccaccaaaaaaaaaaaaaaaaaaaaaaaaaaaaaaaaaaaaaaaaaaaaaaaaaaaaaaaaaaaaaaaaaaaaaaaaaaaaaaaaaaaaaaaaaaaaaaaaaaaaa

SEQ ID NO: 3709 - RNA, 1400 nt, synthetic construct
  misc_feature 1..1400: note = mRNA a-1 (hSL-A100) (opt28) from Homo sapiens__NP_000448.3__HNF4A(1-375)(K234R)
  source 1..1400: mol_type = other RNA
aggagagtcccgcagtcggcgtccagcggctctgcttgttcgtgtgtgtgtcgttgcaggccttattcaagcttaccatgcggctgagcaagaccctggtggacatggatatggcagactactccgccgctctggatccagcatatacaactctggagttcgaaaacgtccaggtgctgaccatgggaaatgacacatctccctcagagggcactaacctgaatgcccctaacagtctgggggtgagcgctctgtgcgcaatctgcggagacagggccaccggcaaacactacggggcttcctcttgtgatggatgcaagggctttttcagacgcagcgtccggaaaaatcatatgtactcatgccgatttagtaggcagtgcgtggtggacaaggacaagagaaaccagtgccgctattgtcggctgaaaaagtgcttcagggcaggaatgaaaaaggaagccgtccagaatgagagagatcgaatttccacacggcgcagctcttacgaagacagctccctgccatcaatcaacgctctgctgcaggcagaggtgctgagtaggcagatcactagccccgtgtctgggattaacggcgatatcagagccaagaaaattgcatccatcgctgacgtctgcgaaagcatgaaggagcagctgctggtgctggtggagtgggccaaatacatccctgcattttgcgaactgccactggacgatcaggtcgctctgctgcgggcccacgcaggagagcatctgctgctgggcgctacccgaaggtcaatggtgttcaaggacgtgctgctgctggggaatgactatattgtccccagacactgccctgaactggccgagatgagtcgcgtgtctatccggatcctggatgaactggtgctgccattccaggagctgcagattgacgataacgaatacgcatacctgaaggctatcatctttttcgaccccgacgccaaaggactgtccgatcctggcaagattaaaaggctgagaagccaggtccaggtgagcctggaggactatatcaatgaccgacagtacgattcccgggggcgctttggagaactgctgctgctgctgccaacactgcagtcaattacctggcagatgatcgagcagatccagttcattaagctgttcggcatggcaaaaatcgacaacctgctgcaggagatgctgctgtgaggactagtccctgttcccagagcccacttttttttctttttttgaaataaaatagcctgtctttcagatctcaaaggctcttttcagagccaccaaaaaaaaaaaaaaaaaaaaaaaaaaaaaaaaaaaaaaaaaaaaaaaaaaaaaaaaaaaaaaaaaaaaaaaaaaaaaaaaaaaaaaaaaaaaaaaaaaaaa

SEQ ID NO: 3710 - RNA, 1400 nt, synthetic construct
  misc_feature 1..1400: note = mRNA a-1 (hSL-A100) (opt28) from Homo sapiens__NP_000448.3__HNF4A(1-375)(K300R)
  source 1..1400: mol_type = other RNA
aggagagtcccgcagtcggcgtccagcggctctgcttgttcgtgtgtgtgtcgttgcaggccttattcaagcttaccatgcggctgagcaagaccctggtggacatggatatggcagactactccgccgctctggatccagcatatacaactctggagttcgaaaacgtccaggtgctgaccatgggaaatgacacatctccctcagagggcactaacctgaatgcccctaacagtctgggggtgagcgctctgtgcgcaatctgcggagacagggccaccggcaaacactacggggcttcctcttgtgatggatgcaagggctttttcagacgcagcgtccggaaaaatcatatgtactcatgccgatttagtaggcagtgcgtggtggacaaggacaagagaaaccagtgccgctattgtcggctgaaaaagtgcttcagggcaggaatgaaaaaggaagccgtccagaatgagagagatcgaatttccacacggcgcagctcttacgaagacagctccctgccatcaatcaacgctctgctgcaggcagaggtgctgagtaggcagatcactagccccgtgtctgggattaacggcgatatcagagccaagaaaattgcatccatcgctgacgtctgcgaaagcatgaaggagcagctgctggtgctggtggagtgggccaaatacatccctgcattttgcgaactgccactggacgatcaggtcgctctgctgcgggcccacgcaggagagcatctgctgctgggcgctaccaagcgatcaatggtgttcaaggacgtgctgctgctggggaatgactatattgtccccaggcactgccctgaactggccgagatgagtagagtgtctatccgcatcctggatgaactggtgctgccattccaggagctgcagattgacgataacgaatacgcatacctgaaagctatcatctttttcgaccccgacgcccggggactgtccgatcctggcaagattaaaaggctgagaagccaggtccaggtgagcctggaggactatatcaatgaccgacagtacgattcccgggggcgctttggagaactgctgctgctgctgccaacactgcagtcaattacctggcagatgatcgagcagatccagttcattaagctgttcggcatggcaaaaatcgacaacctgctgcaggagatgctgctgtgaggactagtccctgttcccagagcccacttttttttctttttttgaaataaaatagcctgtctttcagatctcaaaggctcttttcagagccaccaaaaaaaaaaaaaaaaaaaaaaaaaaaaaaaaaaaaaaaaaaaaaaaaaaaaaaaaaaaaaaaaaaaaaaaaaaaaaaaaaaaaaaaaaaaaaaaaaaaaa

SEQ ID NO: 3711 - RNA, 1400 nt, synthetic construct
  misc_feature 1..1400: note = mRNA a-1 (hSL-A100) (opt28) from Homo sapiens__NP_000448.3__HNF4A(1-375)(K300R_K307R_K309R)
  source 1..1400: mol_type = other RNA
aggagagtcccgcagtcggcgtccagcggctctgcttgttcgtgtgtgtgtcgttgcaggccttattcaagcttaccatgcggctgagcaagaccctggtggacatggatatggcagactactccgccgctctggatccagcatatacaactctggagttcgaaaacgtccaggtgctgaccatgggaaatgacacatctccctcagagggcactaacctgaatgcccctaacagtctgggggtgagcgctctgtgcgcaatctgcggagacagggccaccggcaaacactacggggcttcctcttgtgatggatgcaagggctttttcagacgcagcgtccggaaaaatcatatgtactcatgccgatttagtaggcagtgcgtggtggacaaggacaagagaaaccagtgccgctattgtcggctgaaaaagtgcttcagggcaggaatgaaaaaggaagccgtccagaatgagagagatcgaatttccacacggcgcagctcttacgaagacagctccctgccatcaatcaacgctctgctgcaggcagaggtgctgagtaggcagatcactagccccgtgtctgggattaacggcgatatcagagccaagaaaattgcatccatcgctgacgtctgcgaaagcatgaaggagcagctgctggtgctggtggagtgggccaaatacatccctgcattttgcgaactgccactggacgatcaggtcgctctgctgcgggcccacgcaggagagcatctgctgctgggcgctaccaagcgatcaatggtgttcaaggacgtgctgctgctggggaatgactatattgtccccaggcactgccctgaactggccgagatgagtagagtgtctatccgcatcctggatgaactggtgctgccattccaggagctgcagattgacgataacgaatacgcatacctgaaagctatcatctttttcgaccccgacgcccggggactgtccgatcctggcaggattagacgactgcggagccaggtccaggtgagcctggaggactatatcaatgaccgccagtacgattccagggggagatttggagaactgctgctgctgctgccaacactgcagtcaattacctggcagatgatcgagcagatccagttcattaagctgttcggcatggcaaaaatcgacaacctgctgcaggagatgctgctgtgaggactagtccctgttcccagagcccacttttttttctttttttgaaataaaatagcctgtctttcagatctcaaaggctcttttcagagccaccaaaaaaaaaaaaaaaaaaaaaaaaaaaaaaaaaaaaaaaaaaaaaaaaaaaaaaaaaaaaaaaaaaaaaaaaaaaaaaaaaaaaaaaaaaaaaaaaaaaaa

SEQ ID NO: 3712 - RNA, 1400 nt, synthetic construct
  misc_feature 1..1400: note = mRNA a-1 (hSL-A100) (opt28) from Homo sapiens__NP_000448.3__HNF4A(1-375)(K447R_K470R)
  source 1..1400: mol_type = other RNA
aggagagtcccgcagtcggcgtccagcggctctgcttgttcgtgtgtgtgtcgttgcaggccttattcaagcttaccatgcggctgagcaagaccctggtggacatggatatggcagactactccgccgctctggatccagcatatacaactctggagttcgaaaacgtccaggtgctgaccatgggaaatgacacatctccctcagagggcactaacctgaatgcccctaacagtctgggggtgagcgctctgtgcgcaatctgcggagacagggccaccggcaaacactacggggcttcctcttgtgatggatgcaagggctttttcagacgcagcgtccggaaaaatcatatgtactcatgccgatttagtaggcagtgcgtggtggacaaggacaagagaaaccagtgccgctattgtcggctgaaaaagtgcttcagggcaggaatgaaaaaggaagccgtccagaatgagagagatcgaatttccacacggcgcagctcttacgaagacagctccctgccatcaatcaacgctctgctgcaggcagaggtgctgagtaggcagatcactagccccgtgtctgggattaacggcgatatcagagccaagaaaattgcatccatcgctgacgtctgcgaaagcatgaaggagcagctgctggtgctggtggagtgggccaaatacatccctgcattttgcgaactgccactggacgatcaggtcgctctgctgcgggcccacgcaggagagcatctgctgctgggcgctaccaagcgatcaatggtgttcaaggacgtgctgctgctggggaatgactatattgtccccaggcactgccctgaactggccgagatgagtagagtgtctatccgcatcctggatgaactggtgctgccattccaggagctgcagattgacgataacgaatacgcatacctgaaagctatcatctttttcgaccccgacgccaagggactgtccgatcctggcaaaattaagcggctgaggagccaggtccaggtgagcctggaggactatatcaatgacagacagtacgattcccgagggcggtttggagaactgctgctgctgctgccaacactgcagtcaattacctggcagatgatcgagcagatccagttcattaaactgttcggcatggcaaagatcgacaacctgctgcaggagatgctgctgtgaggactagtccctgttcccagagcccacttttttttctttttttgaaataaaatagcctgtctttcagatctcaaaggctcttttcagagccaccaaaaaaaaaaaaaaaaaaaaaaaaaaaaaaaaaaaaaaaaaaaaaaaaaaaaaaaaaaaaaaaaaaaaaaaaaaaaaaaaaaaaaaaaaaaaaaaaaaaaa

SEQ ID NO: 3713 - RNA, 1400 nt, synthetic construct; identical to SEQ ID NO: 3712
  misc_feature 1..1400: note = mRNA a-1 (hSL-A100) (opt28) from Homo sapiens__NP_000448.3__HNF4A(1-375)(K458R)
  source 1..1400: mol_type = other RNA

SEQ ID NO: 3714 - RNA, 1400 nt, synthetic construct
  misc_feature 1..1400: note = mRNA a-1 (hSL-A100) (opt28) from Homo sapiens__NP_000448.3__HNF4A(1-375)(K106R_K108R_K126R_K127R)
  source 1..1400: mol_type = other RNA
aggagagtcccgcagtcggcgtccagcggctctgcttgttcgtgtgtgtgtcgttgcaggccttattcaagcttaccatgcggctgagcaagaccctggtggacatggatatggcagactactccgccgctctggatccagcatatacaactctggagttcgaaaacgtccaggtgctgaccatgggaaatgacacatctccctcagagggcactaacctgaatgcccctaacagtctgggggtgagcgctctgtgcgcaatctgcggagacagggccaccggcaaacactacggggcttcctcttgtgatggatgcaagggctttttcagacgcagcgtccggaaaaatcatatgtactcatgccgatttagtaggcagtgcgtggtggacagagaccgccggaaccagtgcaggtattgtagactgaagaagtgcttccgagcaggaatgcggcgcgaagccgtccagaatgagagggatagaatttccacacggcgaagctcttacgaagacagctccctgccatcaatcaacgctctgctgcaggcagaggtgctgagtaggcagatcactagccccgtgtctgggattaacggcgatatcagagccaaaaagattgcatccatcgctgacgtctgcgaaagcatgaaagagcagctgctggtgctggtggagtgggccaagtacatccctgcattttgcgaactgccactggacgatcaggtcgctctgctgcgcgcccacgcaggagagcatctgctgctgggcgctaccaagcggtcaatggtgttcaaagacgtgctgctgctggggaatgactatattgtccccaggcactgccctgaactggccgagatgagtagagtgtctatccgaatcctggatgaactggtgctgccattccaggagctgcagattgacgataacgaatacgcatacctgaaggctatcatctttttcgaccccgacgccaaaggactgtccgatcctggcaagattaagcggctgcgcagccaggtccaggtgagcctggaggactatatcaatgacaggcagtacgattccagagggcggtttggagaactgctgctgctgctgccaacactgcagtcaattacctggcagatgatcgagcagatccagttcattaaactgttcggcatggcaaagatcgacaacctgctgcaggagatgctgctgtgaggactagtccctgttcccagagcccacttttttttctttttttgaaataaaatagcctgtctttcagatctcaaaggctcttttcagagccaccaaaaaaaaaaaaaaaaaaaaaaaaaaaaaaaaaaaaaaaaaaaaaaaaaaaaaaaaaaaaaaaaaaaaaaaaaaaaaaaaaaaaaaaaaaaaaaaaaaaaa

SEQ ID NO: 3715 - RNA, 1400 nt, synthetic construct
  misc_feature 1..1400: note = mRNA a-1 (hSL-A100) (opt28) from Homo sapiens__NP_000448.3__HNF4A(1-375)(E285Q)
  source 1..1400: mol_type = other RNA
aggagagtcccgcagtcggcgtccagcggctctgcttgttcgtgtgtgtgtcgttgcaggccttattcaagcttaccatgcggctgagcaagaccctggtggacatggatatggcagactactccgccgctctggatccagcatatacaactctggagttcgaaaacgtccaggtgctgaccatgggaaatgacacatctccctcagagggcactaacctgaatgcccctaacagtctgggggtgagcgctctgtgcgcaatctgcggagacagggccaccggcaaacactacggggcttcctcttgtgatggatgcaagggctttttcagacgcagcgtccggaaaaatcatatgtactcatgccgatttagtaggcagtgcgtggtggacaaggacaagagaaaccagtgccgctattgtcggctgaaaaagtgcttcagggcaggaatgaaaaaggaagccgtccagaatgagagagatcgaatttccacacggcgcagctcttacgaagacagctccctgccatcaatcaacgctctgctgcaggcagaggtgctgagtaggcagatcactagccccgtgtctgggattaacggcgatatcagagccaagaaaattgcatccatcgctgacgtctgcgaaagcatgaaggagcagctgctggtgctggtggagtgggccaaatacatccctgcattttgcgaactgccactggacgatcaggtcgctctgctgcgggcccacgcaggagagcatctgctgctgggcgctaccaagcgatcaatggtgttcaaggacgtgctgctgctggggaatgactatattgtccccaggcactgccctgaactggccgagatgagtagagtgtctatccgcatcctggatgaactggtgctgccattccaggagctgcagattgacgataaccagtacgcatacctgaaagctatcatctttttcgaccccgacgccaagggactgtccgatcctggcaaaattaagcggctgaggagccaggtccaggtgagcctggaagactatatcaatgacagacagtacgattcccgagggcggtttggagagctgctgctgctgctgccaacactgcagtcaattacctggcagatgatcgaacagatccagttcattaaactgttcggcatggcaaagatcgacaacctgctgcaggagatgctgctgtgaggactagtccctgttcccagagcccacttttttttctttttttgaaataaaatagcctgtctttcagatctcaaaggctcttttcagagccaccaaaaaaaaaaaaaaaaaaaaaaaaaaaaaaaaaaaaaaaaaaaaaaaaaaaaaaaaaaaaaaaaaaaaaaaaaaaaaaaaaaaaaaaaaaaaaaaaaaaaa

SEQ ID NO: 3716 - RNA, 1400 nt, synthetic construct
  misc_feature 1..1400: note = mRNA a-1 (hSL-A100) (opt28) from Homo sapiens__NP_000448.3__HNF4A(1-375)(T166E)
  source 1..1400: mol_type = other RNA
aggagagtcccgcagtcggcgtccagcggctctgcttgttcgtgtgtgtgtcgttgcaggccttattcaagcttaccatgcggctgagcaagaccctggtggacatggatatggcagactactccgccgctctggatccagcatatacaactctggagttcgaaaacgtccaggtgctgaccatgggaaatgacacatctccctcagagggcactaacctgaatgcccctaacagtctgggggtgagcgctctgtgcgcaatctgcggagacagggccaccggcaaacactacggggcttcctcttgtgatggatgcaagggctttttcagacgcagcgtccggaaaaatcatatgtactcatgccgatttagtaggcagtgcgtggtggacaaggacaagagaaaccagtgccgctattgtcggctgaaaaagtgcttcagggcaggaatgaaaaaggaagccgtccagaatgagagagatcgaatttccacacggcgcagctcttacgaagacagctccctgccatcaatcaacgctctgctgcaggcagaggtgctgagtaggcagatcgaaagccccgtgtctgggattaacggcgatatcagagccaagaaaattgcatccatcgctgacgtctgcgagagcatgaaggagcagctgctggtgctggtggaatgggccaaatacatccctgcattttgcgagctgccactggacgatcaggtcgctctgctgcgggcccacgcaggagaacatctgctgctgggcgctactaagcgatcaatggtgttcaaggacgtgctgctgctggggaatgactatattgtccccaggcactgccctgagctggccgaaatgagtagagtgtctatccgcatcctggatgagctggtgctgccattccaggaactgcagattgacgataacgagtacgcatacctgaaagctatcatctttttcgaccccgacgccaagggactgtccgatcctggcaaaattaagcggctgaggagccaggtccaggtgagcctggaagactatatcaatgacagacagtacgattcccgagggcggtttggagagctgctgctgctgctgccaaccctgcagtcaattacatggcagatgatcgagcagatccagttcattaaactgttcggcatggcaaagatcgacaacctgctgcaggaaatgctgctgtgaggactagtccctgttcccagagcccacttttttttctttttttgaaataaaatagcctgtctttcagatctcaaaggctcttttcagagccaccaaaaaaaaaaaaaaaaaaaaaaaaaaaaaaaaaaaaaaaaaaaaaaaaaaaaaaaaaaaaaaaaaaaaaaaaaaaaaaaaaaaaaaaaaaaaaaaaaaaaa

SEQ ID NO: 3717 - RNA, 1400 nt, synthetic construct
  misc_feature 1..1400: note = mRNA a-1 (hSL-A100) (opt28) from Homo sapiens__NP_000448.3__HNF4A(1-375)(S148A)
  source 1..1400: mol_type = other RNA
aggagagtcccgcagtcggcgtccagcggctctgcttgttcgtgtgtgtgtcgttgcaggccttattcaagcttaccatgcggctgagcaagaccctggtggacatggatatggcagactactccgccgctctggatccagcatatacaactctggagttcgaaaacgtccaggtgctgaccatgggaaatgacacatctccctcagagggcactaacctgaatgcccctaacagtctgggggtgagcgctctgtgcgcaatctgcggagacagggccaccggcaaacactacggggcttcctcttgtgatggatgcaagggctttttcagacgcagcgtccggaaaaatcatatgtactcatgccgatttagtaggcagtgcgtggtggacaaggacaagagaaaccagtgccgctattgtcggctgaaaaagtgcttcagggcaggaatgaaaaaggaagccgtccagaatgagagagatcgaatttccacacggcgcagctcttacgaagacagcgctctgccatccatcaacgcactgctgcaggccgaggtgctgtcaaggcagatcaccagtcccgtgagcgggattaacggcgatatcagagcaaagaaaattgcttctatcgccgacgtctgcgaatccatgaaggagcagctgctggtgctggtggagtgggcaaaatacatccctgctttttgcgaactgccactggacgatcaggtcgccctgctgcgggcacacgctggagagcatctgctgctgggcgccactaagcgaagcatggtgttcaaggacgtgctgctgctggggaatgactatattgtccccaggcactgccctgaactggcagagatgtcaagagtgagtatccgcatcctggatgaactggtgctgccattccaggagctgcagattgacgataacgaatacgcttacctgaaagccatcatctttttcgaccccgacgcaaagggactgtctgatcctggcaaaattaagcggctgaggtcccaggtccaggtgagcctggaggactatatcaatgacagacagtacgatagccgagggcggtttggagaactgctgctgctgctgccaacactgcagtccattacctggcagatgatcgagcagatccagttcattaaactgttcggcatggccaagatcgacaacctgctgcaggagatgctgctgtgaggactagtccctgttcccagagcccacttttttttctttttttgaaataaaatagcctgtctttcagatctcaaaggctcttttcagagccaccaaaaaaaaaaaaaaaaaaaaaaaaaaaaaaaaaaaaaaaaaaaaaaaaaaaaaaaaaaaaaaaaaaaaaaaaaaaaaaaaaaaaaaaaaaaaaaaaaaaaa

SEQ ID NO: 3718 - RNA, 1400 nt, synthetic construct
  misc_feature 1..1400: note = mRNA a-1 (hSL-A100) (opt28) from Homo sapiens__NP_000448.3__HNF4A(1-375)(S148E)
  source 1..1400: mol_type = other RNA
aggagagtcccgcagtcggcgtccagcggctctgcttgttcgtgtgtgtgtcgttgcaggccttattcaagcttaccatgcggctgagcaagaccctggtggacatggatatggcagactactccgccgctctggatccagcatatacaactctggagttcgaaaacgtccaggtgctgaccatgggaaatgacacatctccctcagagggcactaacctgaatgcccctaacagtctgggggtgagcgctctgtgcgcaatctgcggagacagggccaccggcaaacactacggggcttcctcttgtgatggatgcaagggctttttcagacgcagcgtccggaaaaatcatatgtactcatgccgatttagtaggcagtgcgtggtggacaaggacaagagaaaccagtgccgctattgtcggctgaaaaagtgcttcagggcaggaatgaaaaaggaagccgtccagaatgagagagatcgaatttccacacggcgcagctcttacgaagacagcgagctgccatccatcaacgctctgctgcaggcagaagtgctgtcaaggcagatcaccagtcccgtgagcgggattaacggcgatatcagagccaagaaaattgcatctatcgctgacgtctgcgagtccatgaaggagcagctgctggtgctggtggaatgggccaaatacatccctgcattttgcgagctgccactggacgatcaggtcgctctgctgcgggcccacgcaggagaacatctgctgctgggcgctactaagcgaagcatggtgttcaaggacgtgctgctgctggggaatgactatattgtccccaggcactgccctgagctggccgaaatgtcaagagtgagtatccgcatcctggatgagctggtgctgccattccaggaactgcagattgacgataacgagtacgcatacctgaaagctatcatctttttcgaccccgacgccaagggactgtctgatcctggcaaaattaagcggctgaggtcccaggtccaggtgagcctggaagactatatcaatgacagacagtacgatagccgagggcggtttggagagctgctgctgctgctgccaacactgcagtccattacctggcagatgatcgagcagatccagttcattaaactgttcggcatggcaaagatcgacaacctgctgcaggaaatgctgctgtgaggactagtccctgttcccagagcccacttttttttctttttttgaaataaaatagcctgtctttcagatctcaaaggctcttttcagagccaccaaaaaaaaaaaaaaaaaaaaaaaaaaaaaaaaaaaaaaaaaaaaaaaaaaaaaaaaaaaaaaaaaaaaaaaaaaaaaaaaaaaaaaaaaaaaaaaaaaaaa

SEQ ID NO: 3719 - RNA, 1400 nt, synthetic construct
  misc_feature 1..1400: note = mRNA a-1 (hSL-A100) (opt28) from Homo sapiens__NP_000448.3__HNF4A(1-375)(S183A)
  source 1..1400: mol_type = other RNA
aggagagtcccgcagtcggcgtccagcggctctgcttgttcgtgtgtgtgtcgttgcaggccttattcaagcttaccatgcggctgagcaagaccctggtggacatggatatggcagactactccgccgctctggatccagcatatacaactctggagttcgaaaacgtccaggtgctgaccatgggaaatgacacatctccctcagagggcactaacctgaatgcccctaacagtctgggggtgagcgctctgtgcgcaatctgcggagacagggccaccggcaaacactacggggcttcctcttgtgatggatgcaagggctttttcagacgcagcgtccggaaaaatcatatgtactcatgccgatttagtaggcagtgcgtggtggacaaggacaagagaaaccagtgccgctattgtcggctgaaaaagtgcttcagggcaggaatgaaaaaggaagccgtccagaatgagagagatcgaatttccacacggcgcagctcttacgaagacagctccctgccatcaatcaacgctctgctgcaggcagaggtgctgagtaggcagatcactagccccgtgtctgggattaacggcgatatcagagccaagaaaattgcagctatcgccgacgtctgcgaatccatgaaggagcagctgctggtgctggtggagtgggcaaaatacatccctgctttttgcgaactgccactggacgatcaggtcgccctgctgcgggcacacgctggagagcatctgctgctgggcgccaccaagcgaagcatggtgttcaaggacgtgctgctgctggggaatgactatattgtccccaggcactgccctgaactggcagagatgtcaagagtgagtatccgcatcctggatgaactggtgctgccattccaggagctgcagattgacgataacgaatacgcttacctgaaagccatcatctttttcgaccccgacgcaaagggactgtctgatcctggcaaaattaagcggctgaggtcccaggtccaggtgagcctggaggactatatcaatgacagacagtacgatagccgagggcggtttggagaactgctgctgctgctgccaacactgcagtccattacctggcagatgatcgagcagatccagttcattaaactgttcggcatggccaagatcgacaacctgctgcaggagatgctgctgtgaggactagtccctgttcccagagcccacttttttttctttttttgaaataaaatagcctgtctttcagatctcaaaggctcttttcagagccaccaaaaaaaaaaaaaaaaaaaaaaaaaaaaaaaaaaaaaaaaaaaaaaaaaaaaaaaaaaaaaaaaaaaaaaaaaaaaaaaaaaaaaaaaaaaaaaaaaaaaa

SEQ ID NO: 3720 - RNA, 1400 nt, synthetic construct
  misc_feature 1..1400: note = mRNA a-1 (hSL-A100) (opt28) from Homo sapiens__NP_000448.3__HNF4A(1-375)(S183E)
  source 1..1400: mol_type = other RNA
aggagagtcccgcagtcggcgtccagcggctctgcttgttcgtgtgtgtgtcgttgcaggccttattcaagcttaccatgcggctgagcaagaccctggtggacatggatatggcagactactccgccgctctggatccagcatatacaactctggagttcgaaaacgtccaggtgctgaccatgggaaatgacacatctccctcagagggcactaacctgaatgcccctaacagtctgggggtgagcgctctgtgcgcaatctgcggagacagggccaccggcaaacactacggggcttcctcttgtgatggatgcaagggctttttcagacgcagcgtccggaaaaatcatatgtactcatgccgatttagtaggcagtgcgtggtggacaaggacaagagaaaccagtgccgctattgtcggctgaaaaagtgcttcagggcaggaatgaaaaaggaagccgtccagaatgagagagatcgaatttccacacggcgcagctcttacgaagacagctccctgccatcaatcaacgctctgctgcaggcagaggtgctgagtaggcagatcactagccccgtgtctgggattaacggcgatatcagagccaagaaaattgcagaaatcgctgacgtctgcgagtccatgaaggagcagctgctggtgctggtggaatgggccaaatacatccctgcattttgcgagctgccactggacgatcaggtcgctctgctgcgggcccacgcaggagaacatctgctgctgggcgctaccaagcgaagcatggtgttcaaggacgtgctgctgctggggaatgactatattgtccccaggcactgccctgagctggccgaaatgtcaagagtgagtatccgcatcctggatgagctggtgctgccattccaggaactgcagattgacgataacgagtacgcatacctgaaagctatcatctttttcgaccccgacgccaagggactgtctgatcctggcaaaattaagcggctgaggtcccaggtccaggtgagcctggaagactatatcaatgacagacagtacgatagccgagggcggtttggagagctgctgctgctgctgccaacactgcagtccattacctggcagatgatcgagcagatccagttcattaaactgttcggcatggcaaagatcgacaacctgctgcaggaaatgctgctgtgaggactagtccctgttcccagagcccacttttttttctttttttgaaataaaatagcctgtctttcagatctcaaaggctcttttcagagccaccaaaaaaaaaaaaaaaaaaaaaaaaaaaaaaaaaaaaaaaaaaaaaaaaaaaaaaaaaaaaaaaaaaaaaaaaaaaaaaaaaaaaaaaaaaaaaaaaaaaaa

SEQ ID NO: 3721 - RNA, 1400 nt, synthetic construct; identical to SEQ ID NO: 3712
  misc_feature 1..1400: note = mRNA a-1 (hSL-A100) (opt28) from Homo sapiens__NP_000448.3__HNF4A(1-375)(S461A)
  source 1..1400: mol_type = other RNA

SEQ ID NO: 3722 - RNA, 1400 nt, synthetic construct; identical to SEQ ID NO: 3712
  misc_feature 1..1400: note = mRNA a-1 (hSL-A100) (opt28) from Homo sapiens__NP_000448.3__HNF4A(1-375)(S461E)
  source 1..1400: mol_type = other RNA

SEQ ID NO: 3723 - RNA, 1400 nt, synthetic construct
  misc_feature 1..1400: note = mRNA a-1 (hSL-A100) (opt28) from Homo sapiens__NP_000448.3__HNF4A(1-375)(S142A_S143A_S313A)
  source 1..1400: mol_type = other RNA
aggagagtcccgcagtcggcgtccagcggctctgcttgttcgtgtgtgtgtcgttgcaggccttattcaagcttaccatgcggctgagcaagaccctggtggacatggatatggcagactactccgccgctctggatccagcatatacaactctggagttcgaaaacgtccaggtgctgaccatgggaaatgacacatctccctcagagggcactaacctgaatgcccctaacagtctgggggtgagcgctctgtgcgcaatctgcggagacagggccaccggcaaacactacggggcttcctcttgtgatggatgcaagggctttttcagacgcagcgtccggaaaaatcatatgtactcatgccgatttagtaggcagtgcgtggtggacaaggacaagagaaaccagtgccgctattgtcggctgaaaaagtgcttcagggcaggaatgaaaaaggaagccgtccagaatgagagagatcgaatttccacacggcgcgctgcatacgaagacagctctctgccaagcatcaacgccctgctgcaggcagaggtgctgtccaggcagatcacttcacccgtgagtgggattaacggcgatatcagagctaagaaaattgccagcatcgcagacgtctgcgaatctatgaaggagcagctgctggtgctggtggagtgggctaaatacatccctgccttttgcgaactgccactggacgatcaggtcgcactgctgcgggctcacgccggagagcatctgctgctgggcgcaaccaagcgatccatggtgttcaaggacgtgctgctgctggggaatgactatattgtccccaggcactgccctgaactggctgagatgagcagagtgtcaatccgcatcctggatgaactggtgctgccattccaggagctgcagattgacgataacgaatacgcctacctgaaagcaatcatctttttcgaccccgacgccaagggactgagtgatcctggcaaaattaagcggctgagggctcaggtccaggtgtctctggaggactatatcaatgacagacagtacgattcccgagggcggtttggagaactgctgctgctgctgccaacactgcagagcattacctggcagatgatcgagcagatccagttcattaaactgttcggcatggcaaagatcgacaacctgctgcaggagatgctgctgtgaggactagtccctgttcccagagcccacttttttttctttttttgaaataaaatagcctgtctttcagatctcaaaggctcttttcagagccaccaaaaaaaaaaaaaaaaaaaaaaaaaaaaaaaaaaaaaaaaaaaaaaaaaaaaaaaaaaaaaaaaaaaaaaaaaaaaaaaaaaaaaaaaaaaaaaaaaaaaa

SEQ ID NO: 3724 - RNA, 1400 nt, synthetic construct; identical to SEQ ID NO: 3723
  misc_feature 1..1400: note = mRNA a-1 (hSL-A100) (opt28) from Homo sapiens__NP_000448.3__HNF4A(1-375)(S142A_S143A_S313A_K458R)
  source 1..1400: mol_type = other RNA

SEQ ID NO: 3725 - RNA, 1400 nt, synthetic construct
  misc_feature 1..1400: note = mRNA a-1 (hSL-A100) (opt28) from Homo sapiens__NP_000448.3__HNF4A(1-375)(S142A_S143A_S167A_S313A_ S378A_T429A_T432A_S436A_K458R)
  source 1..1400: mol_type = other RNA
aggagagtcccgcagtcggcgtccagcggctctgcttgttcgtgtgtgtgtcgttgcaggccttattcaagcttaccatgcggctgagcaagaccctggtggacatggatatggcagactactccgccgctctggatccagcatatacaactctggagttcgaaaacgtccaggtgctgaccatgggaaatgacacatctccctcagagggcactaacctgaatgcccctaacagtctgggggtgagcgctctgtgcgcaatctgcggagacagggccaccggcaaacactacggggcttcctcttgtgatggatgcaagggctttttcagacgcagcgtccggaaaaatcatatgtactcatgccgatttagtaggcagtgcgtggtggacaaggacaagagaaaccagtgccgctattgtcggctgaaaaagtgcttcagggcaggaatgaaaaaggaagccgtccagaatgagagagatcgaatttccacacggcgcgctgcatacgaagacagctctctgccaagcatcaacgccctgctgcaggcagaggtgctgtccaggcagatcactgctcccgtgtcagggattaacggcgatatcagagccaagaaaattgcaagtatcgctgacgtctgcgaaagcatgaaggagcagctgctggtgctggtggagtgggccaaatacatccctgcattttgcgaactgccactggacgatcaggtcgctctgctgcgggcccacgcaggagagcatctgctgctgggcgctaccaagcgatctatggtgttcaaggacgtgctgctgctggggaatgactatattgtccccaggcactgccctgaactggccgagatgtccagagtgagcatccgcatcctggatgaactggtgctgccattccaggagctgcagattgacgataacgaatacgcatacctgaaagccatcatctttttcgaccccgacgctaagggactgtcagatcctggcaaaattaagcggctgagggcacaggtccaggtgagtctggaggactatatcaatgacagacagtacgattctcgagggcggtttggagaactgctgctgctgctgccaacactgcagtccattacctggcagatgatcgagcagatccagttcattaaactgttcggcatggccaagatcgacaacctgctgcaggagatgctgctgtgaggactagtccctgttcccagagcccacttttttttctttttttgaaataaaatagcctgtctttcagatctcaaaggctcttttcagagccaccaaaaaaaaaaaaaaaaaaaaaaaaaaaaaaaaaaaaaaaaaaaaaaaaaaaaaaaaaaaaaaaaaaaaaaaaaaaaaaaaaaaaaaaaaaaaaaaaaaaaa

SEQ ID NO: 3726 - RNA, 1400 nt, synthetic construct
  misc_feature 1..1400: note = mRNA a-1 (hSL-A100) (opt28) from Homo sapiens__NP_000448.3__HNF4A(1-375)(S142A_S143A_S148A_S167A_ S313A_S378A_T429A_T432A_S436A_K458R)
  source 1..1400: mol_type = other RNA
aggagagtcccgcagtcggcgtccagcggctctgcttgttcgtgtgtgtgtcgttgcaggccttattcaagcttaccatgcggctgagcaagaccctggtggacatggatatggcagactactccgccgctctggatccagcatatacaactctggagttcgaaaacgtccaggtgctgaccatgggaaatgacacatctccctcagagggcactaacctgaatgcccctaacagtctgggggtgagcgctctgtgcgcaatctgcggagacagggccaccggcaaacactacggggcttcctcttgtgatggatgcaagggctttttcagacgcagcgtccggaaaaatcatatgtactcatgccgatttagtaggcagtgcgtggtggacaaggacaagagaaaccagtgccgctattgtcggctgaaaaagtgcttcagggcaggaatgaaaaaggaagccgtccagaatgagagagatcgaatttccacacggcgcgctgcatacgaagacagcgccctgccatctatcaacgcactgctgcaggctgaggtgctgagcaggcagatcactgcccccgtgtccgggattaacggcgatatcagagcaaagaaaattgcttcaatcgccgacgtctgcgaaagtatgaaggagcagctgctggtgctggtggagtgggcaaaatacatccctgctttttgcgaactgccactggacgatcaggtcgccctgctgcgggcacacgctggagagcatctgctgctgggcgccaccaagcgaagcatggtgttcaaggacgtgctgctgctggggaatgactatattgtccccaggcactgccctgaactggcagagatgtctagagtgtccatccgcatcctggatgaactggtgctgccattccaggagctgcagattgacgataacgaatacgcctacctgaaagctatcatctttttcgaccccgacgcaaagggactgagcgatcctggcaaaattaagcggctgagggcccaggtccaggtgtcactggaggactatatcaatgacagacagtacgatagtcgagggcggtttggagaactgctgctgctgctgccaacactgcagtctattacctggcagatgatcgagcagatccagttcattaaactgttcggcatggcaaagatcgacaacctgctgcaggagatgctgctgtgaggactagtccctgttcccagagcccacttttttttctttttttgaaataaaatagcctgtctttcagatctcaaaggctcttttcagagccaccaaaaaaaaaaaaaaaaaaaaaaaaaaaaaaaaaaaaaaaaaaaaaaaaaaaaaaaaaaaaaaaaaaaaaaaaaaaaaaaaaaaaaaaaaaaaaaaaaaaaa

SEQ ID NO: 3727 - RNA, 1400 nt, synthetic construct
  misc_feature 1..1400: note = mRNA a-1 (hSL-A100) (opt28) from Homo sapiens__NP_000448.3__HNF4A(1-375)(K106R_K108R_K126R_K127R_ S142A_S143A_S148A_S167A_S313A_S378A_T429A_T432A_S436A_K458R )
  source 1..1400: mol_type = other RNA
aggagagtcccgcagtcggcgtccagcggctctgcttgttcgtgtgtgtgtcgttgcaggccttattcaagcttaccatgcggctgagcaagaccctggtggacatggatatggcagactactccgccgctctggatccagcatatacaactctggagttcgaaaacgtccaggtgctgaccatgggaaatgacacatctccctcagagggcactaacctgaatgcccctaacagtctgggggtgagcgctctgtgcgcaatctgcggagacagggccaccggcaaacactacggggcttcctcttgtgatggatgcaagggctttttcagacgcagcgtccggaaaaatcatatgtactcatgccgatttagtaggcagtgcgtggtggacagagaccgccggaaccagtgcaggtattgtagactgaagaagtgcttccgagcaggaatgcggcgcgaagccgtccagaatgagagggatagaatttccacacggcgagctgcatacgaagacagcgccctgccatctatcaacgcactgctgcaggctgaggtgctgagcaggcagatcactgcccccgtgtccgggattaacggcgatatcagagctaaaaagattgcatcaatcgccgacgtctgcgaaagtatgaaagagcagctgctggtgctggtggagtgggcaaagtacatccctgctttttgcgaactgccactggacgatcaggtcgccctgctgcgcgcacacgctggagagcatctgctgctgggcgccaccaagcggagcatggtgttcaaagacgtgctgctgctggggaatgactatattgtccccaggcactgccctgaactggcagagatgtctagagtgtccatccgaatcctggatgaactggtgctgccattccaggagctgcagattgacgataacgaatacgcctacctgaaggctatcatctttttcgaccccgacgcaaaaggactgagcgatcctggcaagattaagcggctgcgcgcccaggtccaggtgtcactggaggactatatcaatgacaggcagtacgatagtagagggcggtttggagaactgctgctgctgctgccaacactgcagtctattacctggcagatgatcgagcagatccagttcattaaactgttcggcatggcaaagatcgacaacctgctgcaggagatgctgctgtgaggactagtccctgttcccagagcccacttttttttctttttttgaaataaaatagcctgtctttcagatctcaaaggctcttttcagagccaccaaaaaaaaaaaaaaaaaaaaaaaaaaaaaaaaaaaaaaaaaaaaaaaaaaaaaaaaaaaaaaaaaaaaaaaaaaaaaaaaaaaaaaaaaaaaaaaaaaaaa

SEQ ID NO: 3728 - RNA, 1400 nt, synthetic construct
  misc_feature 1..1400: note = mRNA a-1 (hSL-A100) (opt28) from Homo sapiens__NP_000448.3__HNF4A(1-375)(S142A_S143A_S148A_T166A_ S167A_S313A_S378A_T429A_T432A_S436A_K458R)
  source 1..1400: mol_type = other RNA
aggagagtcccgcagtcggcgtccagcggctctgcttgttcgtgtgtgtgtcgttgcaggccttattcaagcttaccatgcggctgagcaagaccctggtggacatggatatggcagactactccgccgctctggatccagcatatacaactctggagttcgaaaacgtccaggtgctgaccatgggaaatgacacatctccctcagagggcactaacctgaatgcccctaacagtctgggggtgagcgctctgtgcgcaatctgcggagacagggccaccggcaaacactacggggcttcctcttgtgatggatgcaagggctttttcagacgcagcgtccggaaaaatcatatgtactcatgccgatttagtaggcagtgcgtggtggacaaggacaagagaaaccagtgccgctattgtcggctgaaaaagtgcttcagggcaggaatgaaaaaggaagccgtccagaatgagagagatcgaatttccacacggcgcgctgcatacgaagacagcgccctgccatctatcaacgcactgctgcaggctgaggtgctgagcaggcagatcgccgcacccgtgtccgggattaacggcgatatcagagctaagaaaattgcctcaatcgcagacgtctgcgaaagtatgaaggagcagctgctggtgctggtggagtgggctaaatacatccctgccttttgcgaactgccactggacgatcaggtcgcactgctgcgggctcacgccggagagcatctgctgctgggcgcaactaagcgaagcatggtgttcaaggacgtgctgctgctggggaatgactatattgtccccaggcactgccctgaactggccgagatgtctagagtgtccatccgcatcctggatgaactggtgctgccattccaggagctgcagattgacgataacgaatacgcttacctgaaagcaatcatctttttcgaccccgacgccaagggactgagcgatcctggcaaaattaagcggctgagggcacaggtccaggtgtcactggaggactatatcaatgacagacagtacgatagtcgagggcggtttggagaactgctgctgctgctgccaaccctgcagtctattacatggcagatgatcgagcagatccagttcattaaactgttcggcatggctaagatcgacaacctgctgcaggagatgctgctgtgaggactagtccctgttcccagagcccacttttttttctttttttgaaataaaatagcctgtctttcagatctcaaaggctcttttcagagccaccaaaaaaaaaaaaaaaaaaaaaaaaaaaaaaaaaaaaaaaaaaaaaaaaaaaaaaaaaaaaaaaaaaaaaaaaaaaaaaaaaaaaaaaaaaaaaaaaaaaaa

SEQ ID NO: 3729 - RNA, 1400 nt, synthetic construct
  misc_feature 1..1400: note = mRNA a-1 (hSL-A100) (opt28) from Homo sapiens__NP_000448.3__HNF4A(1-375)(S87A_S142A_S143A_S148A_T 166A_S167A_S313A_S378A_T429A_T432A_S436A_K458R)
  source 1..1400: mol_type = other RNA
aggagagtcccgcagtcggcgtccagcggctctgcttgttcgtgtgtgtgtcgttgcaggccttattcaagcttaccatgcggctgagcaagaccctggtggacatggatatggcagactactccgccgctctggatccagcatatacaactctggagttcgaaaacgtccaggtgctgaccatgggaaatgacacatctccctcagagggcactaacctgaatgcccctaacagtctgggggtgagcgctctgtgcgcaatctgcggagacagggccaccggcaaacactacggggcttcctcttgtgatggatgcaagggctttttcagacgcgcagtccggaaaaatcatatgtacagctgccgattttcaaggcagtgcgtggtggacaaggacaagagaaaccagtgccgctattgtcggctgaaaaagtgcttcagggccggaatgaaaaaggaagctgtccagaatgagagagatcgaattagtacacggcgcgcagcctacgaagactccgcactgccaagcatcaacgctctgctgcaggccgaggtgctgtctaggcagatcgcagctcccgtgagcgggattaacggcgatatcagagccaagaaaattgcatccatcgctgacgtctgcgaatcaatgaaggagcagctgctggtgctggtggagtgggccaaatacatccctgcattttgcgaactgccactggacgatcaggtcgctctgctgcgggcccacgcaggagagcatctgctgctgggcgccactaagcgaagtatggtgttcaaggacgtgctgctgctggggaatgactatattgtccccaggcactgccctgaactggctgagatgagcagagtgtctatccgcatcctggatgaactggtgctgccattccaggagctgcagattgacgataacgaatacgcatacctgaaagccatcatctttttcgaccccgacgcaaagggactgtccgatcctggcaaaattaagcggctgagggctcaggtccaggtgagcctggaggactatatcaatgacagacagtacgattcacgagggcggtttggagaactgctgctgctgctgccaaccctgcagagtattacatggcagatgatcgagcagatccagttcattaaactgttcggcatggcaaagatcgacaacctgctgcaggagatgctgctgtgaggactagtccctgttcccagagcccacttttttttctttttttgaaataaaatagcctgtctttcagatctcaaaggctcttttcagagccaccaaaaaaaaaaaaaaaaaaaaaaaaaaaaaaaaaaaaaaaaaaaaaaaaaaaaaaaaaaaaaaaaaaaaaaaaaaaaaaaaaaaaaaaaaaaaaaaaaaaaa

SEQ ID NO: 3730 - RNA, 1400 nt, synthetic construct
  misc_feature 1..1400: note = mRNA a-1 (hSL-A100) (opt28) from Homo sapiens__NP_000448.3__HNF4A(1-375)(S87A_K106R_K108R_K126R_K 127R_S142A_S143A_S148A_T166A_S167A_S313A_S378A_T429A_T432A_ S436A_K458R)
  source 1..1400: mol_type = other RNA
aggagagtcccgcagtcggcgtccagcggctctgcttgttcgtgtgtgtgtcgttgcaggccttattcaagcttaccatgcggctgagcaagaccctggtggacatggatatggcagactactccgccgctctggatccagcatatacaactctggagttcgaaaacgtccaggtgctgaccatgggaaatgacacatctccctcagagggcactaacctgaatgcccctaacagtctgggggtgagcgctctgtgcgcaatctgcggagacagggccaccggcaaacactacggggcttcctcttgtgatggatgcaagggctttttcagacgcgcagtccggaaaaatcatatgtacagctgccgattttcaaggcagtgcgtggtggacagagaccgccggaaccagtgcaggtattgtagactgaagaagtgcttccgagccggaatgcggcgcgaagctgtccagaatgagagggatagaattagtacacggcgagcagcctacgaagactccgcactgccaagcatcaacgctctgctgcaggccgaggtgctgtctaggcagatcgcagctcccgtgagcgggattaacggcgatatcagagccaaaaagattgcatccatcgctgacgtctgcgaatcaatgaaagagcagctgctggtgctggtggagtgggccaagtacatccctgcattttgcgaactgccactggacgatcaggtcgctctgctgcgcgcccacgcaggagagcatctgctgctgggcgccactaagcggagtatggtgttcaaagacgtgctgctgctggggaatgactatattgtccccaggcactgccctgaactggctgagatgagcagagtgtctatccgaatcctggatgaactggtgctgccattccaggagctgcagattgacgataacgaatacgcatacctgaaggccatcatctttttcgaccccgacgcaaaaggactgtccgatcctggcaagattaagcggctgcgcgctcaggtccaggtgagcctggaggactatatcaatgacaggcagtacgattcaagagggcggtttggagaactgctgctgctgctgccaaccctgcagagtattacatggcagatgatcgagcagatccagttcattaaactgttcggcatggcaaagatcgacaacctgctgcaggagatgctgctgtgaggactagtccctgttcccagagcccacttttttttctttttttgaaataaaatagcctgtctttcagatctcaaaggctcttttcagagccaccaaaaaaaaaaaaaaaaaaaaaaaaaaaaaaaaaaaaaaaaaaaaaaaaaaaaaaaaaaaaaaaaaaaaaaaaaaaaaaaaaaaaaaaaaaaaaaaaaaaaa

SEQ ID NO: 3731 - RNA, 1400 nt, synthetic construct
  misc_feature 1..1400: note = mRNA a-1 (hSL-A100) (opt28) from Homo sapiens__NP_000448.3__HNF4A(1-375)(S87A_K106R_K108R_K126R_K 127R)
  source 1..1400: mol_type = other RNA
aggagagtcccgcagtcggcgtccagcggctctgcttgttcgtgtgtgtgtcgttgcaggccttattcaagcttaccatgcggctgagcaagaccctggtggacatggatatggcagactactccgccgctctggatccagcatatacaactctggagttcgaaaacgtccaggtgctgaccatgggaaatgacacatctccctcagagggcactaacctgaatgcccctaacagtctgggggtgagcgctctgtgcgcaatctgcggagacagggccaccggcaaacactacggggcttcctcttgtgatggatgcaagggctttttcagacgcgcagtccggaaaaatcatatgtacagctgccgattttcaaggcagtgcgtggtggacagagaccgccggaaccagtgcaggtattgtagactgaagaagtgcttccgagccggaatgcggcgcgaagctgtccagaatgagagggatagaattagtacacggcgatccagctacgaagactctagcctgccatccatcaacgcactgctgcaggccgaggtgctgtcaaggcagatcaccagtcccgtgagcgggattaacggcgatatcagagctaaaaagattgcatctatcgccgacgtctgcgaatccatgaaagagcagctgctggtgctggtggagtgggcaaagtacatccctgctttttgcgaactgccactggacgatcaggtcgccctgctgcgcgcacacgctggagagcatctgctgctgggcgccactaagcggagcatggtgttcaaagacgtgctgctgctggggaatgactatattgtccccaggcactgccctgaactggcagagatgtcaagagtgagtatccgaatcctggatgaactggtgctgccattccaggagctgcagattgacgataacgaatacgcttacctgaaggccatcatctttttcgaccccgacgcaaaaggactgtctgatcctggcaagattaagcggctgcgctcccaggtccaggtgagcctggaggactatatcaatgacaggcagtacgatagcagagggcggtttggagaactgctgctgctgctgccaacactgcagtccattacctggcagatgatcgagcagatccagttcattaaactgttcggcatggccaagatcgacaacctgctgcaggagatgctgctgtgaggactagtccctgttcccagagcccacttttttttctttttttgaaataaaatagcctgtctttcagatctcaaaggctcttttcagagccaccaaaaaaaaaaaaaaaaaaaaaaaaaaaaaaaaaaaaaaaaaaaaaaaaaaaaaaaaaaaaaaaaaaaaaaaaaaaaaaaaaaaaaaaaaaaaaaaaaaaaa

SEQ ID NO: 3732 - RNA, 1400 nt, synthetic construct; identical to SEQ ID NO: 3730
  misc_feature 1..1400: note = mRNA a-1 (hSL-A100) (opt28) from Homo sapiens__NP_000448.3__HNF4A(1-375)(S87A_K106R_K108R_K126R_K 127R_S142A_S143A_S148A_T166A_S167A_S313A_S378A_T429A_T432A_ S436A_K458R_S461A)
  source 1..1400: mol_type = other RNA

SEQ ID NO: 3733 - RNA, 1400 nt, synthetic construct; identical to SEQ ID NO: 3730
  misc_feature 1..1400: note = mRNA a-1 (hSL-A100) (opt28) from Homo sapiens__NP_000448.3__HNF4A(1-375)(S87A_K106R_K108R_K126R_K 127R_S142A_S143A_S148A_T166A_S167A_S313A_S378A_T429A_T432A_ S436A_K458R_S461E)
  source 1..1400: mol_type = other RNA

SEQ ID NO: 3734 - RNA, 1400 nt, synthetic construct
  misc_feature 1..1400: note = mRNA a-1 (hSL-A100) (opt28) from Homo sapiens__NP_000448.3__HNF4A(1-375)(S87A_K106R_K108R_K126R_K 127R_S142A_S143A_S148E_T166A_S167E_S313A_S378E_T429E_T432E_ S436E_K458R_S461E)
  source 1..1400: mol_type = other RNA
aggagagtcccgcagtcggcgtccagcggctctgcttgttcgtgtgtgtgtcgttgcaggccttattcaagcttaccatgcggctgagcaagaccctggtggacatggatatggcagactactccgccgctctggatccagcatatacaactctggagttcgaaaacgtccaggtgctgaccatgggaaatgacacatctccctcagagggcactaacctgaatgcccctaacagtctgggggtgagcgctctgtgcgcaatctgcggagacagggccaccggcaaacactacggggcttcctcttgtgatggatgcaagggctttttcagacgcgcagtccggaaaaatcatatgtacagctgccgattttcaaggcagtgcgtggtggacagagaccgccggaaccagtgcaggtattgtagactgaagaagtgcttccgagccggaatgcggcgcgaagctgtccagaatgagagggatagaattagtacacggcgagcagcctacgaagactccgagctgccaagcatcaacgcactgctgcaggctgaagtgctgtctaggcagatcgccgagcccgtgagcgggattaacggcgatatcagagctaaaaagattgcatccatcgccgacgtctgcgagtcaatgaaagaacagctgctggtgctggtggagtgggcaaagtacatccctgctttttgcgaactgccactggacgatcaggtcgccctgctgcgcgcacacgctggagagcatctgctgctgggcgccactaagcggagtatggtgttcaaagacgtgctgctgctggggaatgactatattgtccccaggcactgccctgaactggcagagatgagcagagtgtctatccgaatcctggatgaactggtgctgccattccaggagctgcagattgacgataacgaatacgcctacctgaaggctatcatctttttcgaccccgacgcaaaaggactgtccgatcctggcaagattaagcggctgcgcgcccaggtccaggtgagcctggaggactatatcaatgacaggcagtacgattcaagagggcggtttggagagctgctgctgctgctgccaaccctgcagagtattacatggcagatgatcgaacagatccagttcattaaactgttcggcatggcaaagatcgacaacctgctgcaggagatgctgctgtgaggactagtccctgttcccagagcccacttttttttctttttttgaaataaaatagcctgtctttcagatctcaaaggctcttttcagagccaccaaaaaaaaaaaaaaaaaaaaaaaaaaaaaaaaaaaaaaaaaaaaaaaaaaaaaaaaaaaaaaaaaaaaaaaaaaaaaaaaaaaaaaaaaaaaaaaaaaaaa

SEQ ID NO: 3735 - RNA, 1400 nt, synthetic construct
  misc_feature 1..1400: note = mRNA a-1 (hSL-A100) (opt28) from Homo sapiens__NP_000448.3__HNF4A(1-375)(S87A_K106R_K108R_K126R_K 127R_S142A_S143A_S148A_T166A_S167A_K179R_K180R_S313A_S378A_ T429A_T432A_S436A_K458R_S461E)
  source 1..1400: mol_type = other RNA
aggagagtcccgcagtcggcgtccagcggctctgcttgttcgtgtgtgtgtcgttgcaggccttattcaagcttaccatgcggctgagcaagaccctggtggacatggatatggcagactactccgccgctctggatccagcatatacaactctggagttcgaaaacgtccaggtgctgaccatgggaaatgacacatctccctcagagggcactaacctgaatgcccctaacagtctgggggtgagcgctctgtgcgcaatctgcggagacagggccaccggcaaacactacggggcttcctcttgtgatggatgcaagggctttttcagacgcgcagtccggaaaaatcatatgtacagctgccgattttcaaggcagtgcgtggtggacagagaccgccggaaccagtgcaggtattgtagactgaagaagtgcttccgagccggaatgcggcgcgaagctgtccagaatgagagggatagaattagtacacggcgagcagcctacgaagactccgcactgccaagcatcaacgctctgctgcaggccgaggtgctgtctaggcagatcgcagctcccgtgagcgggattaacggcgatatcagagcccgccggattgcatccatcgctgacgtctgcgaatcaatgaaagagcagctgctggtgctggtggagtgggccaagtacatccctgcattttgcgaactgccactggacgatcaggtcgctctgctgagggcccacgcaggagagcatctgctgctgggcgccactaaaagaagtatggtgttcaaggacgtgctgctgctggggaatgactatattgtcccccgacactgccctgaactggctgagatgagccgggtgtctatccgcatcctggatgaactggtgctgccattccaggagctgcagattgacgataacgaatacgcatacctgaaggccatcatctttttcgaccccgacgcaaaaggactgtccgatcctggcaagattaaaaggctgagagctcaggtccaggtgagcctggaggactatatcaatgaccggcagtacgattcacgcgggaggtttggagaactgctgctgctgctgccaaccctgcagagtattacatggcagatgatcgagcagatccagttcattaagctgttcggcatggcaaagatcgacaacctgctgcaggagatgctgctgtgaggactagtccctgttcccagagcccacttttttttctttttttgaaataaaatagcctgtctttcagatctcaaaggctcttttcagagccaccaaaaaaaaaaaaaaaaaaaaaaaaaaaaaaaaaaaaaaaaaaaaaaaaaaaaaaaaaaaaaaaaaaaaaaaaaaaaaaaaaaaaaaaaaaaaaaaaaaaaa

SEQ ID NO: 3736 - RNA, 1400 nt, synthetic construct
  misc_feature 1..1400: note = mRNA a-1 (hSL-A100) (opt28) from Homo sapiens__NP_000448.3__HNF4A(1-375)(S87A_K106R_K108R_K126R_K 127R_S142A_S143A_S148A_T166A_S167A_K300R_K307R_K309R_S313A_ S378A_T429A_T432A_S436A_K458R_S461E)
  source 1..1400: mol_type = other RNA
aggagagtcccgcagtcggcgtccagcggctctgcttgttcgtgtgtgtgtcgttgcaggccttattcaagcttaccatgcggctgagcaagaccctggtggacatggatatggcagactactccgccgctctggatccagcatatacaactctggagttcgaaaacgtccaggtgctgaccatgggaaatgacacatctccctcagagggcactaacctgaatgcccctaacagtctgggggtgagcgctctgtgcgcaatctgcggagacagggccaccggcaaacactacggggcttcctcttgtgatggatgcaagggctttttcagacgcgcagtccggaaaaatcatatgtacagctgccgattttcaaggcagtgcgtggtggacagagaccgccggaaccagtgcaggtattgtagactgaagaagtgcttccgagccggaatgcggcgcgaagctgtccagaatgagagggatagaattagtacacggcgagcagcctacgaagactccgcactgccaagcatcaacgctctgctgcaggccgaggtgctgtctaggcagatcgcagctcccgtgagcgggattaacggcgatatcagagccaaaaagattgcatccatcgctgacgtctgcgaatcaatgaaagagcagctgctggtgctggtggagtgggccaagtacatccctgcattttgcgaactgccactggacgatcaggtcgctctgctgcgcgcccacgcaggagagcatctgctgctgggcgccactaagcggagtatggtgttcaaagacgtgctgctgctggggaatgactatattgtccccaggcactgccctgaactggctgagatgagcagagtgtctatccgaatcctggatgaactggtgctgccattccaggagctgcagattgacgataacgaatacgcatacctgaaggccatcatctttttcgaccccgacgcacggggactgtccgatcctggccgcattaggagactgcgggctcaggtccaggtgagcctggaggactatatcaatgaccgccagtacgattcaagggggagatttggagaactgctgctgctgctgccaaccctgcagagtattacatggcagatgatcgagcagatccagttcattaaactgttcggcatggcaaagatcgacaacctgctgcaggagatgctgctgtgaggactagtccctgttcccagagcccacttttttttctttttttgaaataaaatagcctgtctttcagatctcaaaggctcttttcagagccaccaaaaaaaaaaaaaaaaaaaaaaaaaaaaaaaaaaaaaaaaaaaaaaaaaaaaaaaaaaaaaaaaaaaaaaaaaaaaaaaaaaaaaaaaaaaaaaaaaaaaa

SEQ ID NO: 3737 - RNA, 1400 nt, synthetic construct; identical to SEQ ID NO: 3730
  misc_feature 1..1400: note = mRNA a-1 (hSL-A100) (opt28) from Homo sapiens__NP_000448.3__HNF4A(1-375)(S87A_K106R_K108R_K126R_K 127R_S142A_S143A_S148A_T166A_S167A_S313A_S378A_T429A_T432A_ S436A_K447R_K458R_S461E_K470R)
  source 1..1400: mol_type = other RNA

SEQ ID NO: 3738 - RNA, 1400 nt, synthetic construct
  misc_feature 1..1400: note = mRNA a-1 (hSL-A100) (opt28) from Homo sapiens__NP_000448.3__HNF4A(1-375)(S87A_K106R_K108R_K126R_K 127R_S142A_S143A_S148A_T166A_S167A_K179R_K180R_K234R_K300R_ K307R_K309R_S313A_S378A_T429A_T432A_S436A_K447R_K458R_S461E _K470R)
  source 1..1400: mol_type = other RNA
aggagagtcccgcagtcggcgtccagcggctctgcttgttcgtgtgtgtgtcgttgcaggccttattcaagcttaccatgcggctgagcaagaccctggtggacatggatatggcagactactccgccgctctggatccagcatatacaactctggagttcgaaaacgtccaggtgctgaccatgggaaatgacacatctccctcagagggcactaacctgaatgcccctaacagtctgggggtgagcgctctgtgcgcaatctgcggagacagggccaccggcaaacactacggggcttcctcttgtgatggatgcaagggctttttcagacgcgcagtccggaaaaatcatatgtacagctgccgattttcaaggcagtgcgtggtggacagagaccgccggaaccagtgcaggtattgtagactgaagaagtgcttccgagccggaatgcggcgcgaagctgtccagaatgagagggatagaattagtacacggcgagcagcctacgaagactccgcactgccaagcatcaacgctctgctgcaggccgaggtgctgtctaggcagatcgcagctcccgtgagcgggattaacggcgatatcagagcccgccggattgcatccatcgctgacgtctgcgaatcaatgaaagagcagctgctggtgctggtggagtgggccaagtacatccctgcattttgcgaactgccactggacgatcaggtcgctctgctgagggcccacgcaggagagcatctgctgctgggcgccactagacgaagtatggtgttcaaagacgtgctgctgctggggaatgactatattgtcccccggcactgccctgaactggctgagatgagccgcgtgtctatcaggatcctggatgaactggtgctgccattccaggagctgcagattgacgataacgaatacgcatacctgaaggccatcatctttttcgaccccgacgcaagaggactgtccgatcctggccggattcgcaggctgagagctcaggtccaggtgagcctggaggactatatcaatgaccgacagtacgattcacgggggaggtttggagaactgctgctgctgctgccaaccctgcagagtattacatggcagatgatcgagcagatccagttcattaagctgttcggcatggcaaaaatcgacaacctgctgcaggagatgctgctgtgaggactagtccctgttcccagagcccacttttttttctttttttgaaataaaatagcctgtctttcagatctcaaaggctcttttcagagccaccaaaaaaaaaaaaaaaaaaaaaaaaaaaaaaaaaaaaaaaaaaaaaaaaaaaaaaaaaaaaaaaaaaaaaaaaaaaaaaaaaaaaaaaaaaaaaaaaaaaaa

SEQ ID NO: 3739 - RNA, 1400 nt, synthetic construct
  misc_feature 1..1400: note = mRNA a-1 (hSL-A100) (opt28) from Homo sapiens__NP_000448.3__HNF4A(1-375)(S87A_S95A_S99A_K106R_K10 8R_K126R_K127R_S142A_S143A_S148A_T166A_S167A_S313A_S378A_T4 29A_T432A_S436A_K458R_S461E)
  source 1..1400: mol_type = other RNA
aggagagtcccgcagtcggcgtccagcggctctgcttgttcgtgtgtgtgtcgttgcaggccttattcaagcttaccatgcggctgagcaagaccctggtggacatggatatggcagactactccgccgctctggatccagcatatacaactctggagttcgaaaacgtccaggtgctgaccatgggaaatgacacatctccctcagagggcactaacctgaatgcccctaacagtctgggggtgagcgctctgtgcgcaatctgcggagacagggccaccggcaaacactacggggcttcctcttgtgatggatgcaagggctttttcagacgcgcagtccggaaaaatcatatgtacgcctgccgatttgctaggcagtgcgtggtggacagagaccgccggaaccagtgcaggtattgtagactgaagaagtgcttccgagcaggaatgcggcgcgaagccgtccagaatgagagggatagaattagcacacggcgagcagcttacgaagactcagccctgccaagtatcaacgcactgctgcaggctgaggtgctgtccaggcagatcgccgcacccgtgagcgggattaacggcgatatcagagctaaaaagattgcctctatcgcagacgtctgcgaaagcatgaaagagcagctgctggtgctggtggagtgggctaagtacatccctgccttttgcgaactgccactggacgatcaggtcgcactgctgcgcgcccacgctggagagcatctgctgctgggcgcaactaagcggtccatggtgttcaaagacgtgctgctgctggggaatgactatattgtccccaggcactgccctgaactggccgagatgtcaagagtgagtatccgaatcctggatgaactggtgctgccattccaggagctgcagattgacgataacgaatacgcatacctgaaggctatcatctttttcgaccccgacgcaaaaggactgagcgatcctggcaagattaagcggctgcgcgcccaggtccaggtgtctctggaggactatatcaatgacaggcagtacgattccagagggcggtttggagaactgctgctgctgctgccaaccctgcagagcattacatggcagatgatcgagcagatccagttcattaaactgttcggcatggctaagatcgacaacctgctgcaggagatgctgctgtgaggactagtccctgttcccagagcccacttttttttctttttttgaaataaaatagcctgtctttcagatctcaaaggctcttttcagagccaccaaaaaaaaaaaaaaaaaaaaaaaaaaaaaaaaaaaaaaaaaaaaaaaaaaaaaaaaaaaaaaaaaaaaaaaaaaaaaaaaaaaaaaaaaaaaaaaaaaaaa

SEQ ID NO: 3740 - RNA, 1400 nt, synthetic construct
  misc_feature 1..1400: note = mRNA a-1 (hSL-A100) (opt28) from Homo sapiens__NP_000448.3__HNF4A(1-375)(S87A_K106R_K108R_K126R_K 127R_S138A_T139A_S142A_S143A_S148A_T166A_S167A_S313A_S378A_ T429A_T432A_S436A_K458R_S461E)
  source 1..1400: mol_type = other RNA
aggagagtcccgcagtcggcgtccagcggctctgcttgttcgtgtgtgtgtcgttgcaggccttattcaagcttaccatgcggctgagcaagaccctggtggacatggatatggcagactactccgccgctctggatccagcatatacaactctggagttcgaaaacgtccaggtgctgaccatgggaaatgacacatctccctcagagggcactaacctgaatgcccctaacagtctgggggtgagcgctctgtgcgcaatctgcggagacagggccaccggcaaacactacggggcttcctcttgtgatggatgcaagggctttttcagacgcgcagtccggaaaaatcatatgtacagctgccgattttcaaggcagtgcgtggtggacagagaccgccggaaccagtgcaggtattgtagactgaagaagtgcttccgagccggaatgcggcgcgaagctgtccagaatgagagggatagaattgcagcccggcgagcagcttacgaagacagtgccctgccatccatcaacgcactgctgcaggctgaggtgctgagcaggcagatcgccgcacccgtgtctgggattaacggcgatatcagagctaaaaagattgccagcatcgcagacgtctgcgaatccatgaaagagcagctgctggtgctggtggagtgggctaagtacatccctgccttttgcgaactgccactggacgatcaggtcgcactgctgcgcgcccacgctggagagcatctgctgctgggcgcaacaaagcggtcaatggtgttcaaagacgtgctgctgctggggaatgactatattgtccccaggcactgccctgaactggccgagatgagtagagtgagcatccgaatcctggatgaactggtgctgccattccaggagctgcagattgacgataacgaatacgcatacctgaaggctatcatctttttcgaccccgacgcaaaaggactgtctgatcctggcaagattaagcggctgcgcgcccaggtccaggtgtccctggaggactatatcaatgacaggcagtacgatagcagagggcggtttggagaactgctgctgctgctgccaactctgcagtcaattacctggcagatgatcgagcagatccagttcattaaactgttcggcatggctaagatcgacaacctgctgcaggagatgctgctgtgaggactagtccctgttcccagagcccacttttttttctttttttgaaataaaatagcctgtctttcagatctcaaaggctcttttcagagccaccaaaaaaaaaaaaaaaaaaaaaaaaaaaaaaaaaaaaaaaaaaaaaaaaaaaaaaaaaaaaaaaaaaaaaaaaaaaaaaaaaaaaaaaaaaaaaaaaaaaaa

SEQ ID NO: 3741 - RNA, 1400 nt, synthetic construct
  misc_feature 1..1400: note = mRNA a-1 (hSL-A100) (opt28) from Homo sapiens__NP_000448.3__HNF4A(1-375)(S87A_S95A_S99A_K106R_K10 8R_K126R_K127R_S138A_T139A_S142A_S143A_S148A_T166A_S167A_S3 13A_S378A_T429A_T432A_S436A_K458R_S461E)
  source 1..1400: mol_type = other RNA
aggagagtcccgcagtcggcgtccagcggctctgcttgttcgtgtgtgtgtcgttgcaggccttattcaagcttaccatgcggctgagcaagaccctggtggacatggatatggcagactactccgccgctctggatccagcatatacaactctggagttcgaaaacgtccaggtgctgaccatgggaaatgacacatctccctcagagggcactaacctgaatgcccctaacagtctgggggtgagcgctctgtgcgcaatctgcggagacagggccaccggcaaacactacggggcttcctcttgtgatggatgcaagggctttttcagacgcgcagtccggaaaaatcatatgtacgcctgccgatttgctaggcagtgcgtggtggacagagaccgccggaaccagtgcaggtattgtagactgaagaagtgcttccgagcaggaatgcggcgcgaagccgtccagaatgagagggatagaattgcagctcggcgagccgcatacgaagacagcgctctgccatcaatcaacgccctgctgcaggcagaggtgctgagtaggcagatcgctgcccccgtgtccgggattaacggcgatatcagagctaaaaagattgcaagcatcgccgacgtctgcgaatctatgaaagagcagctgctggtgctggtggagtgggcaaagtacatccctgccttttgcgaactgccactggacgatcaggtcgctctgctgcgcgcacacgccggagagcatctgctgctgggcgcaacaaagcggagcatggtgttcaaagacgtgctgctgctggggaatgactatattgtccccaggcactgccctgaactggctgagatgtccagagtgtcaatccgaatcctggatgaactggtgctgccattccaggagctgcagattgacgataacgaatacgcatacctgaaggccatcatctttttcgaccccgacgctaaaggactgagtgatcctggcaagattaagcggctgcgcgcacaggtccaggtgagcctggaggactatatcaatgacaggcagtacgattctagagggcggtttggagaactgctgctgctgctgccaactctgcagtccattacctggcagatgatcgagcagatccagttcattaaactgttcggcatggccaagatcgacaacctgctgcaggagatgctgctgtgaggactagtccctgttcccagagcccacttttttttctttttttgaaataaaatagcctgtctttcagatctcaaaggctcttttcagagccaccaaaaaaaaaaaaaaaaaaaaaaaaaaaaaaaaaaaaaaaaaaaaaaaaaaaaaaaaaaaaaaaaaaaaaaaaaaaaaaaaaaaaaaaaaaaaaaaaaaaaa

SEQ ID NO: 3742 - RNA, 1400 nt, synthetic construct
  misc_feature 1..1400: note = mRNA a-1 (hSL-A100) (opt29) from Homo sapiens__NP_000448.3__HNF4A(1-375)
  source 1..1400: mol_type = other RNA
aggagagtcccgcagtcggcgtccagcggctctgcttgttcgtgtgtgtgtcgttgcaggccttattcaagcttaccatgagactgagcaagaccctggtggacatggacatggccgactactctgccgccctggaccctgcctacaccaccctggagttcgaaaacgtgcaagtgctgaccatgggcaacgacaccagccctagcgagggcaccaacctgaacgcccctaatagcctgggagtgtccgccctgtgtgccatctgtggcgatagagccaccggcaagcactacggcgccagctcttgtgatggctgcaagggcttcttccggcggagcgtgcggaagaaccacatgtacagctgccggttcagccggcagtgcgtggtggacaaggataagcggaaccagtgccggtactgcagactgaagaagtgcttcagagccggcatgaagaaagaagccgtgcagaacgagcgggaccggatcagcaccagaagaagcagctacgaggacagcagcctgcccagcatcaacgccctgctgcaggccgaggtgctgagcagacagatcaccagcccagtgtccggcatcaacggcgacatccgggccaagaagatcgccagcattgccgacgtgtgcgagagcatgaaggaacagctgctggtgctggtggaatgggccaagtacatccccgccttttgcgagctgcccctggacgatcaggtggccctgctgagagcacacgccggcgaacatctgctgctgggagccaccaagcggagcatggtgttcaaggacgtgctgctgctgggcaacgactacatcgtgcccagacactgccctgagctggccgagatgagccgggtgtccatcagaatcctggacgaactggtgctgccgtttcaggaactgcagatcgacgacaacgagtacgcctacctgaaggccatcatctttttcgaccccgacgccaagggcctgagcgaccctggcaagatcaagcggctgagaagccaggtgcaagtgtccctggaagattacatcaacgaccggcagtacgacagccggggcagatttggcgaactgctcctgctgctgcccaccctgcagagcatcacctggcagatgatcgagcagatccagttcatcaagctgttcggcatggccaagatcgacaatctgctgcaggaaatgctgctctgaggactagtccctgttcccagagcccacttttttttctttttttgaaataaaatagcctgtctttcagatctcaaaggctcttttcagagccaccaaaaaaaaaaaaaaaaaaaaaaaaaaaaaaaaaaaaaaaaaaaaaaaaaaaaaaaaaaaaaaaaaaaaaaaaaaaaaaaaaaaaaaaaaaaaaaaaaaaaa

SEQ ID NO: 3743 - RNA, 1400 nt, synthetic construct
  misc_feature 1..1400: note = mRNA a-1 (hSL-A100) (opt29) from Homo sapiens__NP_000448.3__HNF4A(1-375)(S313A)
  source 1..1400: mol_type = other RNA
aggagagtcccgcagtcggcgtccagcggctctgcttgttcgtgtgtgtgtcgttgcaggccttattcaagcttaccatgagactgagcaagaccctggtggacatggacatggccgactactctgccgccctggaccctgcctacaccaccctggagttcgaaaacgtgcaagtgctgaccatgggcaacgacaccagccctagcgagggcaccaacctgaacgcccctaatagcctgggagtgtccgccctgtgtgccatctgtggcgatagagccaccggcaagcactacggcgccagctcttgtgatggctgcaagggcttcttccggcggagcgtgcggaagaaccacatgtacagctgccggttcagccggcagtgcgtggtggacaaggataagcggaaccagtgccggtactgcagactgaagaagtgcttcagagccggcatgaagaaagaagccgtgcagaacgagcgggaccggatcagcaccagaagaagcagctacgaggacagcagcctgcccagcatcaacgccctgctgcaggccgaggtgctgagcagacagatcaccagcccagtgtccggcatcaacggcgacatccgggccaagaagatcgccagcattgccgacgtgtgcgagagcatgaaggaacagctgctggtgctggtggaatgggccaagtacatccccgccttttgcgagctgcccctggacgatcaggtggccctgctgagagcacacgccggcgaacatctgctgctgggagccaccaagcggagcatggtgttcaaggacgtgctgctgctgggcaacgactacatcgtgcccagacactgccctgagctggccgagatgagccgggtgtccatcagaatcctggacgaactggtgctgccgtttcaggaactgcagatcgacgacaacgagtacgcctacctgaaggccatcatctttttcgaccccgacgccaagggcctgagcgaccctggcaagatcaagcggctgagagcccaggtgcaagtgtccctggaagattacatcaacgaccggcagtacgacagccggggcagatttggcgaactgctcctgctgctgcccaccctgcagagcatcacctggcagatgatcgagcagatccagttcatcaagctgttcggcatggccaagatcgacaatctgctgcaggaaatgctgctctgaggactagtccctgttcccagagcccacttttttttctttttttgaaataaaatagcctgtctttcagatctcaaaggctcttttcagagccaccaaaaaaaaaaaaaaaaaaaaaaaaaaaaaaaaaaaaaaaaaaaaaaaaaaaaaaaaaaaaaaaaaaaaaaaaaaaaaaaaaaaaaaaaaaaaaaaaaaaaa

SEQ ID NO: 3744 - RNA, 1400 nt, synthetic construct
  misc_feature 1..1400: note = mRNA a-1 (hSL-A100) (opt29) from Homo sapiens__NP_000448.3__HNF4A(1-375)(S313E)
  source 1..1400: mol_type = other RNA
aggagagtcccgcagtcggcgtccagcggctctgcttgttcgtgtgtgtgtcgttgcaggccttattcaagcttaccatgagactgagcaagaccctggtggacatggacatggccgactactctgccgccctggaccctgcctacaccaccctggagttcgaaaacgtgcaagtgctgaccatgggcaacgacaccagccctagcgagggcaccaacctgaacgcccctaatagcctgggagtgtccgccctgtgtgccatctgtggcgatagagccaccggcaagcactacggcgccagctcttgtgatggctgcaagggcttcttccggcggagcgtgcggaagaaccacatgtacagctgccggttcagccggcagtgcgtggtggacaaggataagcggaaccagtgccggtactgcagactgaagaagtgcttcagagccggcatgaagaaagaagccgtgcagaacgagcgggaccggatcagcaccagaagaagcagctacgaggacagcagcctgcccagcatcaacgccctgctgcaggccgaggtgctgagcagacagatcaccagcccagtgtccggcatcaacggcgacatccgggccaagaagatcgccagcattgccgacgtgtgcgagagcatgaaggaacagctgctggtgctggtggaatgggccaagtacatccccgccttttgcgagctgcccctggacgatcaggtggccctgctgagagcacacgccggcgaacatctgctgctgggagccaccaagcggagcatggtgttcaaggacgtgctgctgctgggcaacgactacatcgtgcccagacactgccctgagctggccgagatgagccgggtgtccatcagaatcctggacgaactggtgctgccgtttcaggaactgcagatcgacgacaacgagtacgcctacctgaaggccatcatctttttcgaccccgacgccaagggcctgagcgaccctggcaagatcaagcggctgagagaacaggtgcaagtgtccctggaagattacatcaacgaccggcagtacgacagccggggcagatttggcgaactgctcctgctgctgcccaccctgcagagcatcacctggcagatgatcgagcagatccagttcatcaagctgttcggcatggccaagatcgacaatctgctgcaggaaatgctgctctgaggactagtccctgttcccagagcccacttttttttctttttttgaaataaaatagcctgtctttcagatctcaaaggctcttttcagagccaccaaaaaaaaaaaaaaaaaaaaaaaaaaaaaaaaaaaaaaaaaaaaaaaaaaaaaaaaaaaaaaaaaaaaaaaaaaaaaaaaaaaaaaaaaaaaaaaaaaaaa

SEQ ID NO: 3745 - RNA, 1400 nt, synthetic construct
  misc_feature 1..1400: note = mRNA a-1 (hSL-A100) (opt29) from Homo sapiens__NP_000448.3__HNF4A(1-375)(S142A_S143A)
  source 1..1400: mol_type = other RNA
aggagagtcccgcagtcggcgtccagcggctctgcttgttcgtgtgtgtgtcgttgcaggccttattcaagcttaccatgagactgagcaagaccctggtggacatggacatggccgactactctgccgccctggaccctgcctacaccaccctggagttcgaaaacgtgcaagtgctgaccatgggcaacgacaccagccctagcgagggcaccaacctgaacgcccctaatagcctgggagtgtccgccctgtgtgccatctgtggcgatagagccaccggcaagcactacggcgccagctcttgtgatggctgcaagggcttcttccggcggagcgtgcggaagaaccacatgtacagctgccggttcagccggcagtgcgtggtggacaaggataagcggaaccagtgccggtactgcagactgaagaagtgcttcagagccggcatgaagaaagaagccgtgcagaacgagcgggaccggatcagcaccagaagagccgcctacgaggacagcagcctgcccagcatcaacgccctgctgcaggccgaggtgctgagcagacagatcaccagcccagtgtccggcatcaacggcgacatccgggccaagaagatcgccagcattgccgacgtgtgcgagagcatgaaggaacagctgctggtgctggtggaatgggccaagtacatccccgccttttgcgagctgcccctggacgatcaggtggccctgctgagagcacacgccggcgaacatctgctgctgggagccaccaagcggagcatggtgttcaaggacgtgctgctgctgggcaacgactacatcgtgcccagacactgccctgagctggccgagatgagccgggtgtccatcagaatcctggacgaactggtgctgccgtttcaggaactgcagatcgacgacaacgagtacgcctacctgaaggccatcatctttttcgaccccgacgccaagggcctgagcgaccctggcaagatcaagcggctgagaagccaggtgcaagtgtccctggaagattacatcaacgaccggcagtacgacagccggggcagatttggcgaactgctcctgctgctgcccaccctgcagagcatcacctggcagatgatcgagcagatccagttcatcaagctgttcggcatggccaagatcgacaatctgctgcaggaaatgctgctctgaggactagtccctgttcccagagcccacttttttttctttttttgaaataaaatagcctgtctttcagatctcaaaggctcttttcagagccaccaaaaaaaaaaaaaaaaaaaaaaaaaaaaaaaaaaaaaaaaaaaaaaaaaaaaaaaaaaaaaaaaaaaaaaaaaaaaaaaaaaaaaaaaaaaaaaaaaaaaa

SEQ ID NO: 3746 - RNA, 1400 nt, synthetic construct
  misc_feature 1..1400: note = mRNA a-1 (hSL-A100) (opt29) from Homo sapiens__NP_000448.3__HNF4A(1-375)(S142E_S143E)
  source 1..1400: mol_type = other RNA
aggagagtcccgcagtcggcgtccagcggctctgcttgttcgtgtgtgtgtcgttgcaggccttattcaagcttaccatgagactgagcaagaccctggtggacatggacatggccgactactctgccgccctggaccctgcctacaccaccctggagttcgaaaacgtgcaagtgctgaccatgggcaacgacaccagccctagcgagggcaccaacctgaacgcccctaatagcctgggagtgtccgccctgtgtgccatctgtggcgatagagccaccggcaagcactacggcgccagctcttgtgatggctgcaagggcttcttccggcggagcgtgcggaagaaccacatgtacagctgccggttcagccggcagtgcgtggtggacaaggataagcggaaccagtgccggtactgcagactgaagaagtgcttcagagccggcatgaagaaagaagccgtgcagaacgagcgggaccggatcagcaccagaagagaagagtacgaggacagcagcctgcccagcatcaacgccctgctgcaggccgaggtgctgagcagacagatcaccagcccagtgtccggcatcaacggcgacatccgggccaagaagatcgccagcattgccgacgtgtgcgagagcatgaaggaacagctgctggtgctggtggaatgggccaagtacatccccgccttttgcgagctgcccctggacgatcaggtggccctgctgagagcacacgccggcgaacatctgctgctgggagccaccaagcggagcatggtgttcaaggacgtgctgctgctgggcaacgactacatcgtgcccagacactgccctgagctggccgagatgagccgggtgtccatcagaatcctggacgaactggtgctgccgtttcaggaactgcagatcgacgacaacgagtacgcctacctgaaggccatcatctttttcgaccccgacgccaagggcctgagcgaccctggcaagatcaagcggctgagaagccaggtgcaagtgtccctggaagattacatcaacgaccggcagtacgacagccggggcagatttggcgaactgctcctgctgctgcccaccctgcagagcatcacctggcagatgatcgagcagatccagttcatcaagctgttcggcatggccaagatcgacaatctgctgcaggaaatgctgctctgaggactagtccctgttcccagagcccacttttttttctttttttgaaataaaatagcctgtctttcagatctcaaaggctcttttcagagccaccaaaaaaaaaaaaaaaaaaaaaaaaaaaaaaaaaaaaaaaaaaaaaaaaaaaaaaaaaaaaaaaaaaaaaaaaaaaaaaaaaaaaaaaaaaaaaaaaaaaaa

SEQ ID NO: 3747 - RNA, 1400 nt, synthetic construct
  misc_feature 1..1400: note = mRNA a-1 (hSL-A100) (opt29) from Homo sapiens__NP_000448.3__HNF4A(1-375)(S143A)
  source 1..1400: mol_type = other RNA
aggagagtcccgcagtcggcgtccagcggctctgcttgttcgtgtgtgtgtcgttgcaggccttattcaagcttaccatgagactgagcaagaccctggtggacatggacatggccgactactctgccgccctggaccctgcctacaccaccctggagttcgaaaacgtgcaagtgctgaccatgggcaacgacaccagccctagcgagggcaccaacctgaacgcccctaatagcctgggagtgtccgccctgtgtgccatctgtggcgatagagccaccggcaagcactacggcgccagctcttgtgatggctgcaagggcttcttccggcggagcgtgcggaagaaccacatgtacagctgccggttcagccggcagtgcgtggtggacaaggataagcggaaccagtgccggtactgcagactgaagaagtgcttcagagccggcatgaagaaagaagccgtgcagaacgagcgggaccggatcagcaccagaagaagcgcctacgaggacagcagcctgcccagcatcaacgccctgctgcaggccgaggtgctgagcagacagatcaccagcccagtgtccggcatcaacggcgacatccgggccaagaagatcgccagcattgccgacgtgtgcgagagcatgaaggaacagctgctggtgctggtggaatgggccaagtacatccccgccttttgcgagctgcccctggacgatcaggtggccctgctgagagcacacgccggcgaacatctgctgctgggagccaccaagcggagcatggtgttcaaggacgtgctgctgctgggcaacgactacatcgtgcccagacactgccctgagctggccgagatgagccgggtgtccatcagaatcctggacgaactggtgctgccgtttcaggaactgcagatcgacgacaacgagtacgcctacctgaaggccatcatctttttcgaccccgacgccaagggcctgagcgaccctggcaagatcaagcggctgagaagccaggtgcaagtgtccctggaagattacatcaacgaccggcagtacgacagccggggcagatttggcgaactgctcctgctgctgcccaccctgcagagcatcacctggcagatgatcgagcagatccagttcatcaagctgttcggcatggccaagatcgacaatctgctgcaggaaatgctgctctgaggactagtccctgttcccagagcccacttttttttctttttttgaaataaaatagcctgtctttcagatctcaaaggctcttttcagagccaccaaaaaaaaaaaaaaaaaaaaaaaaaaaaaaaaaaaaaaaaaaaaaaaaaaaaaaaaaaaaaaaaaaaaaaaaaaaaaaaaaaaaaaaaaaaaaaaaaaaaa

SEQ ID NO: 3748 - RNA, 1400 nt, synthetic construct
  misc_feature 1..1400: note = mRNA a-1 (hSL-A100) (opt29) from Homo sapiens__NP_000448.3__HNF4A(1-375)(T166A)
  source 1..1400: mol_type = other RNA
aggagagtcccgcagtcggcgtccagcggctctgcttgttcgtgtgtgtgtcgttgcaggccttattcaagcttaccatgagactgagcaagaccctggtggacatggacatggccgactactctgccgccctggaccctgcctacaccaccctggagttcgaaaacgtgcaagtgctgaccatgggcaacgacaccagccctagcgagggcaccaacctgaacgcccctaatagcctgggagtgtccgccctgtgtgccatctgtggcgatagagccaccggcaagcactacggcgccagctcttgtgatggctgcaagggcttcttccggcggagcgtgcggaagaaccacatgtacagctgccggttcagccggcagtgcgtggtggacaaggataagcggaaccagtgccggtactgcagactgaagaagtgcttcagagccggcatgaagaaagaagccgtgcagaacgagcgggaccggatcagcaccagaagaagcagctacgaggacagcagcctgcccagcatcaacgccctgctgcaggccgaggtgctgagcagacagatcgccagcccagtgtccggcatcaacggcgacatccgggccaagaagatcgccagcattgccgacgtgtgcgagagcatgaaggaacagctgctggtgctggtggaatgggccaagtacatccccgccttttgcgagctgcccctggacgatcaggtggccctgctgagagcacacgccggcgaacatctgctgctgggagccaccaagcggagcatggtgttcaaggacgtgctgctgctgggcaacgactacatcgtgcccagacactgccctgagctggccgagatgagccgggtgtccatcagaatcctggacgaactggtgctgccgtttcaggaactgcagatcgacgacaacgagtacgcctacctgaaggccatcatctttttcgaccccgacgccaagggcctgagcgaccctggcaagatcaagcggctgagaagccaggtgcaagtgtccctggaagattacatcaacgaccggcagtacgacagccggggcagatttggcgaactgctcctgctgctgcccaccctgcagagcatcacctggcagatgatcgagcagatccagttcatcaagctgttcggcatggccaagatcgacaatctgctgcaggaaatgctgctctgaggactagtccctgttcccagagcccacttttttttctttttttgaaataaaatagcctgtctttcagatctcaaaggctcttttcagagccaccaaaaaaaaaaaaaaaaaaaaaaaaaaaaaaaaaaaaaaaaaaaaaaaaaaaaaaaaaaaaaaaaaaaaaaaaaaaaaaaaaaaaaaaaaaaaaaaaaaaaa

SEQ ID NO: 3749 - RNA, 1400 nt, synthetic construct
  misc_feature 1..1400: note = mRNA a-1 (hSL-A100) (opt29) from Homo sapiens__NP_000448.3__HNF4A(1-375)(S167E)
  source 1..1400: mol_type = other RNA
aggagagtcccgcagtcggcgtccagcggctctgcttgttcgtgtgtgtgtcgttgcaggccttattcaagcttaccatgagactgagcaagaccctggtggacatggacatggccgactactctgccgccctggaccctgcctacaccaccctggagttcgaaaacgtgcaagtgctgaccatgggcaacgacaccagccctagcgagggcaccaacctgaacgcccctaatagcctgggagtgtccgccctgtgtgccatctgtggcgatagagccaccggcaagcactacggcgccagctcttgtgatggctgcaagggcttcttccggcggagcgtgcggaagaaccacatgtacagctgccggttcagccggcagtgcgtggtggacaaggataagcggaaccagtgccggtactgcagactgaagaagtgcttcagagccggcatgaagaaagaagccgtgcagaacgagcgggaccggatcagcaccagaagaagcagctacgaggacagcagcctgcccagcatcaacgccctgctgcaggccgaggtgctgagcagacagatcaccgaaccagtgtccggcatcaacggcgacatccgggccaagaagatcgccagcattgccgacgtgtgcgagagcatgaaggaacagctgctggtgctggtggaatgggccaagtacatccccgccttttgcgagctgcccctggacgatcaggtggccctgctgagagcacacgccggcgaacatctgctgctgggagccaccaagcggagcatggtgttcaaggacgtgctgctgctgggcaacgactacatcgtgcccagacactgccctgagctggccgagatgagccgggtgtccatcagaatcctggacgaactggtgctgccgtttcaggaactgcagatcgacgacaacgagtacgcctacctgaaggccatcatctttttcgaccccgacgccaagggcctgagcgaccctggcaagatcaagcggctgagaagccaggtgcaagtgtccctggaagattacatcaacgaccggcagtacgacagccggggcagatttggcgaactgctcctgctgctgcccaccctgcagagcatcacctggcagatgatcgagcagatccagttcatcaagctgttcggcatggccaagatcgacaatctgctgcaggaaatgctgctctgaggactagtccctgttcccagagcccacttttttttctttttttgaaataaaatagcctgtctttcagatctcaaaggctcttttcagagccaccaaaaaaaaaaaaaaaaaaaaaaaaaaaaaaaaaaaaaaaaaaaaaaaaaaaaaaaaaaaaaaaaaaaaaaaaaaaaaaaaaaaaaaaaaaaaaaaaaaaaa

SEQ ID NO: 3750 - RNA, 1400 nt, synthetic construct
  misc_feature 1..1400: note = mRNA a-1 (hSL-A100) (opt29) from Homo sapiens__NP_000448.3__HNF4A(1-375)(S167A)
  source 1..1400: mol_type = other RNA
aggagagtcccgcagtcggcgtccagcggctctgcttgttcgtgtgtgtgtcgttgcaggccttattcaagcttaccatgagactgagcaagaccctggtggacatggacatggccgactactctgccgccctggaccctgcctacaccaccctggagttcgaaaacgtgcaagtgctgaccatgggcaacgacaccagccctagcgagggcaccaacctgaacgcccctaatagcctgggagtgtccgccctgtgtgccatctgtggcgatagagccaccggcaagcactacggcgccagctcttgtgatggctgcaagggcttcttccggcggagcgtgcggaagaaccacatgtacagctgccggttcagccggcagtgcgtggtggacaaggataagcggaaccagtgccggtactgcagactgaagaagtgcttcagagccggcatgaagaaagaagccgtgcagaacgagcgggaccggatcagcaccagaagaagcagctacgaggacagcagcctgcccagcatcaacgccctgctgcaggccgaggtgctgagcagacagatcaccgccccagtgtccggcatcaacggcgacatccgggccaagaagatcgccagcattgccgacgtgtgcgagagcatgaaggaacagctgctggtgctggtggaatgggccaagtacatccccgccttttgcgagctgcccctggacgatcaggtggccctgctgagagcacacgccggcgaacatctgctgctgggagccaccaagcggagcatggtgttcaaggacgtgctgctgctgggcaacgactacatcgtgcccagacactgccctgagctggccgagatgagccgggtgtccatcagaatcctggacgaactggtgctgccgtttcaggaactgcagatcgacgacaacgagtacgcctacctgaaggccatcatctttttcgaccccgacgccaagggcctgagcgaccctggcaagatcaagcggctgagaagccaggtgcaagtgtccctggaagattacatcaacgaccggcagtacgacagccggggcagatttggcgaactgctcctgctgctgcccaccctgcagagcatcacctggcagatgatcgagcagatccagttcatcaagctgttcggcatggccaagatcgacaatctgctgcaggaaatgctgctctgaggactagtccctgttcccagagcccacttttttttctttttttgaaataaaatagcctgtctttcagatctcaaaggctcttttcagagccaccaaaaaaaaaaaaaaaaaaaaaaaaaaaaaaaaaaaaaaaaaaaaaaaaaaaaaaaaaaaaaaaaaaaaaaaaaaaaaaaaaaaaaaaaaaaaaaaaaaaaa

SEQ ID NO: 3751 - RNA, 1400 nt, synthetic construct; identical to SEQ ID NO: 3750
  misc_feature 1..1400: note = mRNA a-1 (hSL-A100) (opt29) from Homo sapiens__NP_000448.3__HNF4A(1-375)(S167A_S378A_T429A_T432A_ S436A)
  source 1..1400: mol_type = other RNA

SEQ ID NO: 3752 - RNA, 1400 nt, synthetic construct; identical to SEQ ID NO: 3749
  misc_feature 1..1400: note = mRNA a-1 (hSL-A100) (opt29) from Homo sapiens__NP_000448.3__HNF4A(1-375)(S167E_S378E_T429E_T432E_ S436E)
  source 1..1400: mol_type = other RNA

SEQ ID NO: 3753 - RNA, 1400 nt, synthetic construct
  misc_feature 1..1400: note = mRNA a-1 (hSL-A100) (opt29) from Homo sapiens__NP_000448.3__HNF4A(1-375)(S87A)
  source 1..1400: mol_type = other RNA
aggagagtcccgcagtcggcgtccagcggctctgcttgttcgtgtgtgtgtcgttgcaggccttattcaagcttaccatgagactgagcaagaccctggtggacatggacatggccgactactctgccgccctggaccctgcctacaccaccctggagttcgaaaacgtgcaagtgctgaccatgggcaacgacaccagccctagcgagggcaccaacctgaacgcccctaatagcctgggagtgtccgccctgtgtgccatctgtggcgatagagccaccggcaagcactacggcgccagctcttgtgatggctgcaagggcttcttccggcgggccgtgcggaagaaccacatgtacagctgccggttcagccggcagtgcgtggtggacaaggataagcggaaccagtgccggtactgcagactgaagaagtgcttcagagccggcatgaagaaagaagccgtgcagaacgagcgggaccggatcagcaccagaagaagcagctacgaggacagcagcctgcccagcatcaacgccctgctgcaggccgaggtgctgagcagacagatcaccagcccagtgtccggcatcaacggcgacatccgggccaagaagatcgccagcattgccgacgtgtgcgagagcatgaaggaacagctgctggtgctggtggaatgggccaagtacatccccgccttttgcgagctgcccctggacgatcaggtggccctgctgagagcacacgccggcgaacatctgctgctgggagccaccaagcggagcatggtgttcaaggacgtgctgctgctgggcaacgactacatcgtgcccagacactgccctgagctggccgagatgagccgggtgtccatcagaatcctggacgaactggtgctgccgtttcaggaactgcagatcgacgacaacgagtacgcctacctgaaggccatcatctttttcgaccccgacgccaagggcctgagcgaccctggcaagatcaagcggctgagaagccaggtgcaagtgtccctggaagattacatcaacgaccggcagtacgacagccggggcagatttggcgaactgctcctgctgctgcccaccctgcagagcatcacctggcagatgatcgagcagatccagttcatcaagctgttcggcatggccaagatcgacaatctgctgcaggaaatgctgctctgaggactagtccctgttcccagagcccacttttttttctttttttgaaataaaatagcctgtctttcagatctcaaaggctcttttcagagccaccaaaaaaaaaaaaaaaaaaaaaaaaaaaaaaaaaaaaaaaaaaaaaaaaaaaaaaaaaaaaaaaaaaaaaaaaaaaaaaaaaaaaaaaaaaaaaaaaaaaaa

SEQ ID NO: 3754 - RNA, 1400 nt, synthetic construct
  misc_feature 1..1400: note = mRNA a-1 (hSL-A100) (opt29) from Homo sapiens__NP_000448.3__HNF4A(1-375)(S87E)
  source 1..1400: mol_type = other RNA
aggagagtcccgcagtcggcgtccagcggctctgcttgttcgtgtgtgtgtcgttgcaggccttattcaagcttaccatgagactgagcaagaccctggtggacatggacatggccgactactctgccgccctggaccctgcctacaccaccctggagttcgaaaacgtgcaagtgctgaccatgggcaacgacaccagccctagcgagggcaccaacctgaacgcccctaatagcctgggagtgtccgccctgtgtgccatctgtggcgatagagccaccggcaagcactacggcgccagctcttgtgatggctgcaagggcttcttccggcgggaggtgcggaagaaccacatgtacagctgccggttcagccggcagtgcgtggtggacaaggataagcggaaccagtgccggtactgcagactgaagaagtgcttcagagccggcatgaagaaagaagccgtgcagaacgagcgggaccggatcagcaccagaagaagcagctacgaggacagcagcctgcccagcatcaacgccctgctgcaggccgaggtgctgagcagacagatcaccagcccagtgtccggcatcaacggcgacatccgggccaagaagatcgccagcattgccgacgtgtgcgagagcatgaaggaacagctgctggtgctggtggaatgggccaagtacatccccgccttttgcgagctgcccctggacgatcaggtggccctgctgagagcacacgccggcgaacatctgctgctgggagccaccaagcggagcatggtgttcaaggacgtgctgctgctgggcaacgactacatcgtgcccagacactgccctgagctggccgagatgagccgggtgtccatcagaatcctggacgaactggtgctgccgtttcaggaactgcagatcgacgacaacgagtacgcctacctgaaggccatcatctttttcgaccccgacgccaagggcctgagcgaccctggcaagatcaagcggctgagaagccaggtgcaagtgtccctggaagattacatcaacgaccggcagtacgacagccggggcagatttggcgaactgctcctgctgctgcccaccctgcagagcatcacctggcagatgatcgagcagatccagttcatcaagctgttcggcatggccaagatcgacaatctgctgcaggaaatgctgctctgaggactagtccctgttcccagagcccacttttttttctttttttgaaataaaatagcctgtctttcagatctcaaaggctcttttcagagccaccaaaaaaaaaaaaaaaaaaaaaaaaaaaaaaaaaaaaaaaaaaaaaaaaaaaaaaaaaaaaaaaaaaaaaaaaaaaaaaaaaaaaaaaaaaaaaaaaaaaaa

SEQ ID NO: 3755 - RNA, 1400 nt, synthetic construct
  misc_feature 1..1400: note = mRNA a-1 (hSL-A100) (opt29) from Homo sapiens__NP_000448.3__HNF4A(1-375)(R2V)
  source 1..1400: mol_type = other RNA
aggagagtcccgcagtcggcgtccagcggctctgcttgttcgtgtgtgtgtcgttgcaggccttattcaagcttaccatggtgctgagcaagaccctggtggacatggacatggccgactactctgccgccctggaccctgcctacaccaccctggagttcgaaaacgtgcaagtgctgaccatgggcaacgacaccagccctagcgagggcaccaacctgaacgcccctaatagcctgggagtgtccgccctgtgtgccatctgtggcgatagagccaccggcaagcactacggcgccagctcttgtgatggctgcaagggcttcttccggcggagcgtgcggaagaaccacatgtacagctgccggttcagccggcagtgcgtggtggacaaggataagcggaaccagtgccggtactgcagactgaagaagtgcttcagagccggcatgaagaaagaagccgtgcagaacgagcgggaccggatcagcaccagaagaagcagctacgaggacagcagcctgcccagcatcaacgccctgctgcaggccgaggtgctgagcagacagatcaccagcccagtgtccggcatcaacggcgacatccgggccaagaagatcgccagcattgccgacgtgtgcgagagcatgaaggaacagctgctggtgctggtggaatgggccaagtacatccccgccttttgcgagctgcccctggacgatcaggtggccctgctgagagcacacgccggcgaacatctgctgctgggagccaccaagcggagcatggtgttcaaggacgtgctgctgctgggcaacgactacatcgtgcccagacactgccctgagctggccgagatgagccgggtgtccatcagaatcctggacgaactggtgctgccgtttcaggaactgcagatcgacgacaacgagtacgcctacctgaaggccatcatctttttcgaccccgacgccaagggcctgagcgaccctggcaagatcaagcggctgagaagccaggtgcaagtgtccctggaagattacatcaacgaccggcagtacgacagccggggcagatttggcgaactgctcctgctgctgcccaccctgcagagcatcacctggcagatgatcgagcagatccagttcatcaagctgttcggcatggccaagatcgacaatctgctgcaggaaatgctgctctgaggactagtccctgttcccagagcccacttttttttctttttttgaaataaaatagcctgtctttcagatctcaaaggctcttttcagagccaccaaaaaaaaaaaaaaaaaaaaaaaaaaaaaaaaaaaaaaaaaaaaaaaaaaaaaaaaaaaaaaaaaaaaaaaaaaaaaaaaaaaaaaaaaaaaaaaaaaaaa

SEQ ID NO: 3756 - RNA, 1400 nt, synthetic construct
  misc_feature 1..1400: note = mRNA a-1 (hSL-A100) (opt29) from Homo sapiens__NP_000448.3__HNF4A(1-375)(R2V_K5V)
  source 1..1400: mol_type = other RNA
aggagagtcccgcagtcggcgtccagcggctctgcttgttcgtgtgtgtgtcgttgcaggccttattcaagcttaccatggtgctgagcgtgaccctggtggacatggacatggccgactactctgccgccctggaccctgcctacaccaccctggagttcgaaaacgtgcaagtgctgaccatgggcaacgacaccagccctagcgagggcaccaacctgaacgcccctaatagcctgggagtgtccgccctgtgtgccatctgtggcgatagagccaccggcaagcactacggcgccagctcttgtgatggctgcaagggcttcttccggcggagcgtgcggaagaaccacatgtacagctgccggttcagccggcagtgcgtggtggacaaggataagcggaaccagtgccggtactgcagactgaagaagtgcttcagagccggcatgaagaaagaagccgtgcagaacgagcgggaccggatcagcaccagaagaagcagctacgaggacagcagcctgcccagcatcaacgccctgctgcaggccgaggtgctgagcagacagatcaccagcccagtgtccggcatcaacggcgacatccgggccaagaagatcgccagcattgccgacgtgtgcgagagcatgaaggaacagctgctggtgctggtggaatgggccaagtacatccccgccttttgcgagctgcccctggacgatcaggtggccctgctgagagcacacgccggcgaacatctgctgctgggagccaccaagcggagcatggtgttcaaggacgtgctgctgctgggcaacgactacatcgtgcccagacactgccctgagctggccgagatgagccgggtgtccatcagaatcctggacgaactggtgctgccgtttcaggaactgcagatcgacgacaacgagtacgcctacctgaaggccatcatctttttcgaccccgacgccaagggcctgagcgaccctggcaagatcaagcggctgagaagccaggtgcaagtgtccctggaagattacatcaacgaccggcagtacgacagccggggcagatttggcgaactgctcctgctgctgcccaccctgcagagcatcacctggcagatgatcgagcagatccagttcatcaagctgttcggcatggccaagatcgacaatctgctgcaggaaatgctgctctgaggactagtccctgttcccagagcccacttttttttctttttttgaaataaaatagcctgtctttcagatctcaaaggctcttttcagagccaccaaaaaaaaaaaaaaaaaaaaaaaaaaaaaaaaaaaaaaaaaaaaaaaaaaaaaaaaaaaaaaaaaaaaaaaaaaaaaaaaaaaaaaaaaaaaaaaaaaaaa

SEQ ID NO: 3757 - RNA, 1400 nt, synthetic construct
  misc_feature 1..1400: note = mRNA a-1 (hSL-A100) (opt29) from Homo sapiens__NP_000448.3__HNF4A(1-375)(K179R_K180R)
  source 1..1400: mol_type = other RNA
aggagagtcccgcagtcggcgtccagcggctctgcttgttcgtgtgtgtgtcgttgcaggccttattcaagcttaccatgagactgagcaagaccctggtggacatggacatggccgactactctgccgccctggaccctgcctacaccaccctggagttcgaaaacgtgcaagtgctgaccatgggcaacgacaccagccctagcgagggcaccaacctgaacgcccctaatagcctgggagtgtccgccctgtgtgccatctgtggcgatagagccaccggcaagcactacggcgccagctcttgtgatggctgcaagggcttcttccggcggagcgtgcggaagaaccacatgtacagctgccggttcagccggcagtgcgtggtggacaaggataagcggaaccagtgccggtactgcagactgaagaagtgcttcagagccggcatgaagaaagaagccgtgcagaacgagcgggaccggatcagcaccagaagaagcagctacgaggacagcagcctgcccagcatcaacgccctgctgcaggccgaggtgctgagcagacagatcaccagcccagtgtccggcatcaacggcgacatccgggcccggagaatcgccagcattgccgacgtgtgcgagagcatgaaggaacagctgctggtgctggtggaatgggccaagtacatccccgccttttgcgagctgcccctggacgatcaggtggccctgctgagagcacacgccggcgaacatctgctgctgggagccaccaagcggagcatggtgttcaaggacgtgctgctgctgggcaacgactacatcgtgcccagacactgccctgagctggccgagatgagccgggtgtccatcagaatcctggacgaactggtgctgccgtttcaggaactgcagatcgacgacaacgagtacgcctacctgaaggccatcatctttttcgaccccgacgccaagggcctgagcgaccctggcaagatcaagcggctgagaagccaggtgcaagtgtccctggaagattacatcaacgaccggcagtacgacagccggggcagatttggcgaactgctcctgctgctgcccaccctgcagagcatcacctggcagatgatcgagcagatccagttcatcaagctgttcggcatggccaagatcgacaatctgctgcaggaaatgctgctctgaggactagtccctgttcccagagcccacttttttttctttttttgaaataaaatagcctgtctttcagatctcaaaggctcttttcagagccaccaaaaaaaaaaaaaaaaaaaaaaaaaaaaaaaaaaaaaaaaaaaaaaaaaaaaaaaaaaaaaaaaaaaaaaaaaaaaaaaaaaaaaaaaaaaaaaaaaaaaa

SEQ ID NO: 3758 - RNA, 1400 nt, synthetic construct
  misc_feature 1..1400: note = mRNA a-1 (hSL-A100) (opt29) from Homo sapiens__NP_000448.3__HNF4A(1-375)(K234R)
  source 1..1400: mol_type = other RNA
aggagagtcccgcagtcggcgtccagcggctctgcttgttcgtgtgtgtgtcgttgcaggccttattcaagcttaccatgagactgagcaagaccctggtggacatggacatggccgactactctgccgccctggaccctgcctacaccaccctggagttcgaaaacgtgcaagtgctgaccatgggcaacgacaccagccctagcgagggcaccaacctgaacgcccctaatagcctgggagtgtccgccctgtgtgccatctgtggcgatagagccaccggcaagcactacggcgccagctcttgtgatggctgcaagggcttcttccggcggagcgtgcggaagaaccacatgtacagctgccggttcagccggcagtgcgtggtggacaaggataagcggaaccagtgccggtactgcagactgaagaagtgcttcagagccggcatgaagaaagaagccgtgcagaacgagcgggaccggatcagcaccagaagaagcagctacgaggacagcagcctgcccagcatcaacgccctgctgcaggccgaggtgctgagcagacagatcaccagcccagtgtccggcatcaacggcgacatccgggccaagaagatcgccagcattgccgacgtgtgcgagagcatgaaggaacagctgctggtgctggtggaatgggccaagtacatccccgccttttgcgagctgcccctggacgatcaggtggccctgctgagagcacacgccggcgaacatctgctgctgggagccacccggcggagcatggtgttcaaggacgtgctgctgctgggcaacgactacatcgtgcccagacactgccctgagctggccgagatgagccgggtgtccatcagaatcctggacgaactggtgctgccgtttcaggaactgcagatcgacgacaacgagtacgcctacctgaaggccatcatctttttcgaccccgacgccaagggcctgagcgaccctggcaagatcaagcggctgagaagccaggtgcaagtgtccctggaagattacatcaacgaccggcagtacgacagccggggcagatttggcgaactgctcctgctgctgcccaccctgcagagcatcacctggcagatgatcgagcagatccagttcatcaagctgttcggcatggccaagatcgacaatctgctgcaggaaatgctgctctgaggactagtccctgttcccagagcccacttttttttctttttttgaaataaaatagcctgtctttcagatctcaaaggctcttttcagagccaccaaaaaaaaaaaaaaaaaaaaaaaaaaaaaaaaaaaaaaaaaaaaaaaaaaaaaaaaaaaaaaaaaaaaaaaaaaaaaaaaaaaaaaaaaaaaaaaaaaaaa

SEQ ID NO: 3759 - RNA, 1400 nt, synthetic construct
  misc_feature 1..1400: note = mRNA a-1 (hSL-A100) (opt29) from Homo sapiens__NP_000448.3__HNF4A(1-375)(K300R)
  source 1..1400: mol_type = other RNA
aggagagtcccgcagtcggcgtccagcggctctgcttgttcgtgtgtgtgtcgttgcaggccttattcaagcttaccatgagactgagcaagaccctggtggacatggacatggccgactactctgccgccctggaccctgcctacaccaccctggagttcgaaaacgtgcaagtgctgaccatgggcaacgacaccagccctagcgagggcaccaacctgaacgcccctaatagcctgggagtgtccgccctgtgtgccatctgtggcgatagagccaccggcaagcactacggcgccagctcttgtgatggctgcaagggcttcttccggcggagcgtgcggaagaaccacatgtacagctgccggttcagccggcagtgcgtggtggacaaggataagcggaaccagtgccggtactgcagactgaagaagtgcttcagagccggcatgaagaaagaagccgtgcagaacgagcgggaccggatcagcaccagaagaagcagctacgaggacagcagcctgcccagcatcaacgccctgctgcaggccgaggtgctgagcagacagatcaccagcccagtgtccggcatcaacggcgacatccgggccaagaagatcgccagcattgccgacgtgtgcgagagcatgaaggaacagctgctggtgctggtggaatgggccaagtacatccccgccttttgcgagctgcccctggacgatcaggtggccctgctgagagcacacgccggcgaacatctgctgctgggagccaccaagcggagcatggtgttcaaggacgtgctgctgctgggcaacgactacatcgtgcccagacactgccctgagctggccgagatgagccgggtgtccatcagaatcctggacgaactggtgctgccgtttcaggaactgcagatcgacgacaacgagtacgcctacctgaaggccatcatctttttcgaccccgacgccagaggcctgagcgaccctggcaagatcaagcggctgagaagccaggtgcaagtgtccctggaagattacatcaacgaccggcagtacgacagccggggcagatttggcgaactgctcctgctgctgcccaccctgcagagcatcacctggcagatgatcgagcagatccagttcatcaagctgttcggcatggccaagatcgacaatctgctgcaggaaatgctgctctgaggactagtccctgttcccagagcccacttttttttctttttttgaaataaaatagcctgtctttcagatctcaaaggctcttttcagagccaccaaaaaaaaaaaaaaaaaaaaaaaaaaaaaaaaaaaaaaaaaaaaaaaaaaaaaaaaaaaaaaaaaaaaaaaaaaaaaaaaaaaaaaaaaaaaaaaaaaaaa

SEQ ID NO: 3760 - RNA, 1400 nt, synthetic construct
  misc_feature 1..1400: note = mRNA a-1 (hSL-A100) (opt29) from Homo sapiens__NP_000448.3__HNF4A(1-375)(K300R_K307R_K309R)
  source 1..1400: mol_type = other RNA
aggagagtcccgcagtcggcgtccagcggctctgcttgttcgtgtgtgtgtcgttgcaggccttattcaagcttaccatgagactgagcaagaccctggtggacatggacatggccgactactctgccgccctggaccctgcctacaccaccctggagttcgaaaacgtgcaagtgctgaccatgggcaacgacaccagccctagcgagggcaccaacctgaacgcccctaatagcctgggagtgtccgccctgtgtgccatctgtggcgatagagccaccggcaagcactacggcgccagctcttgtgatggctgcaagggcttcttccggcggagcgtgcggaagaaccacatgtacagctgccggttcagccggcagtgcgtggtggacaaggataagcggaaccagtgccggtactgcagactgaagaagtgcttcagagccggcatgaagaaagaagccgtgcagaacgagcgggaccggatcagcaccagaagaagcagctacgaggacagcagcctgcccagcatcaacgccctgctgcaggccgaggtgctgagcagacagatcaccagcccagtgtccggcatcaacggcgacatccgggccaagaagatcgccagcattgccgacgtgtgcgagagcatgaaggaacagctgctggtgctggtggaatgggccaagtacatccccgccttttgcgagctgcccctggacgatcaggtggccctgctgagagcacacgccggcgaacatctgctgctgggagccaccaagcggagcatggtgttcaaggacgtgctgctgctgggcaacgactacatcgtgcccagacactgccctgagctggccgagatgagccgggtgtccatcagaatcctggacgaactggtgctgccgtttcaggaactgcagatcgacgacaacgagtacgcctacctgaaggccatcatctttttcgaccccgacgccagaggcctgagcgaccctggccggatcagacggctgagaagccaggtgcaagtgtccctggaagattacatcaacgaccggcagtacgacagccggggcagatttggcgaactgctcctgctgctgcccaccctgcagagcatcacctggcagatgatcgagcagatccagttcatcaagctgttcggcatggccaagatcgacaatctgctgcaggaaatgctgctctgaggactagtccctgttcccagagcccacttttttttctttttttgaaataaaatagcctgtctttcagatctcaaaggctcttttcagagccaccaaaaaaaaaaaaaaaaaaaaaaaaaaaaaaaaaaaaaaaaaaaaaaaaaaaaaaaaaaaaaaaaaaaaaaaaaaaaaaaaaaaaaaaaaaaaaaaaaaaaa

SEQ ID NO: 3761 - RNA, 1400 nt, synthetic construct; identical to SEQ ID NO: 3742
  misc_feature 1..1400: note = mRNA a-1 (hSL-A100) (opt29) from Homo sapiens__NP_000448.3__HNF4A(1-375)(K447R_K470R)
  source 1..1400: mol_type = other RNA

SEQ ID NO: 3762 - RNA, 1400 nt, synthetic construct; identical to SEQ ID NO: 3742
  misc_feature 1..1400: note = mRNA a-1 (hSL-A100) (opt29) from Homo sapiens__NP_000448.3__HNF4A(1-375)(K458R)
  source 1..1400: mol_type = other RNA

SEQ ID NO: 3763 - RNA, 1400 nt, synthetic construct
  misc_feature 1..1400: note = mRNA a-1 (hSL-A100) (opt29) from Homo sapiens__NP_000448.3__HNF4A(1-375)(K106R_K108R_K126R_K127R)
  source 1..1400: mol_type = other RNA
aggagagtcccgcagtcggcgtccagcggctctgcttgttcgtgtgtgtgtcgttgcaggccttattcaagcttaccatgagactgagcaagaccctggtggacatggacatggccgactactctgccgccctggaccctgcctacaccaccctggagttcgaaaacgtgcaagtgctgaccatgggcaacgacaccagccctagcgagggcaccaacctgaacgcccctaatagcctgggagtgtccgccctgtgtgccatctgtggcgatagagccaccggcaagcactacggcgccagctcttgtgatggctgcaagggcttcttccggcggagcgtgcggaagaaccacatgtacagctgccggttcagccggcagtgcgtggtggaccgggatagacggaaccagtgccggtactgcagactgaagaagtgcttcagagccggcatgcggagagaagccgtgcagaacgagcgggaccggatcagcaccagaagaagcagctacgaggacagcagcctgcccagcatcaacgccctgctgcaggccgaggtgctgagcagacagatcaccagcccagtgtccggcatcaacggcgacatccgggccaagaagatcgccagcattgccgacgtgtgcgagagcatgaaggaacagctgctggtgctggtggaatgggccaagtacatccccgccttttgcgagctgcccctggacgatcaggtggccctgctgagagcacacgccggcgaacatctgctgctgggagccaccaagcggagcatggtgttcaaggacgtgctgctgctgggcaacgactacatcgtgcccagacactgccctgagctggccgagatgagccgggtgtccatcagaatcctggacgaactggtgctgccgtttcaggaactgcagatcgacgacaacgagtacgcctacctgaaggccatcatctttttcgaccccgacgccaagggcctgagcgaccctggcaagatcaagcggctgagaagccaggtgcaagtgtccctggaagattacatcaacgaccggcagtacgacagccggggcagatttggcgaactgctcctgctgctgcccaccctgcagagcatcacctggcagatgatcgagcagatccagttcatcaagctgttcggcatggccaagatcgacaatctgctgcaggaaatgctgctctgaggactagtccctgttcccagagcccacttttttttctttttttgaaataaaatagcctgtctttcagatctcaaaggctcttttcagagccaccaaaaaaaaaaaaaaaaaaaaaaaaaaaaaaaaaaaaaaaaaaaaaaaaaaaaaaaaaaaaaaaaaaaaaaaaaaaaaaaaaaaaaaaaaaaaaaaaaaaaa

SEQ ID NO: 3764 - RNA, 1400 nt, synthetic construct
  misc_feature 1..1400: note = mRNA a-1 (hSL-A100) (opt29) from Homo sapiens__NP_000448.3__HNF4A(1-375)(E285Q)
  source 1..1400: mol_type = other RNA
aggagagtcccgcagtcggcgtccagcggctctgcttgttcgtgtgtgtgtcgttgcaggccttattcaagcttaccatgagactgagcaagaccctggtggacatggacatggccgactactctgccgccctggaccctgcctacaccaccctggagttcgaaaacgtgcaagtgctgaccatgggcaacgacaccagccctagcgagggcaccaacctgaacgcccctaatagcctgggagtgtccgccctgtgtgccatctgtggcgatagagccaccggcaagcactacggcgccagctcttgtgatggctgcaagggcttcttccggcggagcgtgcggaagaaccacatgtacagctgccggttcagccggcagtgcgtggtggacaaggataagcggaaccagtgccggtactgcagactgaagaagtgcttcagagccggcatgaagaaagaagccgtgcagaacgagcgggaccggatcagcaccagaagaagcagctacgaggacagcagcctgcccagcatcaacgccctgctgcaggccgaggtgctgagcagacagatcaccagcccagtgtccggcatcaacggcgacatccgggccaagaagatcgccagcattgccgacgtgtgcgagagcatgaaggaacagctgctggtgctggtggaatgggccaagtacatccccgccttttgcgagctgcccctggacgatcaggtggccctgctgagagcacacgccggcgaacatctgctgctgggagccaccaagcggagcatggtgttcaaggacgtgctgctgctgggcaacgactacatcgtgcccagacactgccctgagctggccgagatgagccgggtgtccatcagaatcctggacgaactggtgctgccgtttcaggaactgcagatcgacgacaaccagtacgcctacctgaaggccatcatctttttcgaccccgacgccaagggcctgagcgaccctggcaagatcaagcggctgagaagccaggtgcaagtgtccctggaagattacatcaacgaccggcagtacgacagccggggcagatttggcgaactgctcctgctgctgcccaccctgcagagcatcacctggcagatgatcgagcagatccagttcatcaagctgttcggcatggccaagatcgacaatctgctgcaggaaatgctgctctgaggactagtccctgttcccagagcccacttttttttctttttttgaaataaaatagcctgtctttcagatctcaaaggctcttttcagagccaccaaaaaaaaaaaaaaaaaaaaaaaaaaaaaaaaaaaaaaaaaaaaaaaaaaaaaaaaaaaaaaaaaaaaaaaaaaaaaaaaaaaaaaaaaaaaaaaaaaaaa

SEQ ID NO: 3765 - RNA, 1400 nt, synthetic construct
  misc_feature 1..1400: note = mRNA a-1 (hSL-A100) (opt29) from Homo sapiens__NP_000448.3__HNF4A(1-375)(T166E)
  source 1..1400: mol_type = other RNA
aggagagtcccgcagtcggcgtccagcggctctgcttgttcgtgtgtgtgtcgttgcaggccttattcaagcttaccatgagactgagcaagaccctggtggacatggacatggccgactactctgccgccctggaccctgcctacaccaccctggagttcgaaaacgtgcaagtgctgaccatgggcaacgacaccagccctagcgagggcaccaacctgaacgcccctaatagcctgggagtgtccgccctgtgtgccatctgtggcgatagagccaccggcaagcactacggcgccagctcttgtgatggctgcaagggcttcttccggcggagcgtgcggaagaaccacatgtacagctgccggttcagccggcagtgcgtggtggacaaggataagcggaaccagtgccggtactgcagactgaagaagtgcttcagagccggcatgaagaaagaagccgtgcagaacgagcgggaccggatcagcaccagaagaagcagctacgaggacagcagcctgcccagcatcaacgccctgctgcaggccgaggtgctgagcagacagatcgagagcccagtgtccggcatcaacggcgacatccgggccaagaagatcgccagcattgccgacgtgtgcgagagcatgaaggaacagctgctggtgctggtggaatgggccaagtacatccccgccttttgcgagctgcccctggacgatcaggtggccctgctgagagcacacgccggcgaacatctgctgctgggagccaccaagcggagcatggtgttcaaggacgtgctgctgctgggcaacgactacatcgtgcccagacactgccctgagctggccgagatgagccgggtgtccatcagaatcctggacgaactggtgctgccgtttcaggaactgcagatcgacgacaacgagtacgcctacctgaaggccatcatctttttcgaccccgacgccaagggcctgagcgaccctggcaagatcaagcggctgagaagccaggtgcaagtgtccctggaagattacatcaacgaccggcagtacgacagccggggcagatttggcgaactgctcctgctgctgcccaccctgcagagcatcacctggcagatgatcgagcagatccagttcatcaagctgttcggcatggccaagatcgacaatctgctgcaggaaatgctgctctgaggactagtccctgttcccagagcccacttttttttctttttttgaaataaaatagcctgtctttcagatctcaaaggctcttttcagagccaccaaaaaaaaaaaaaaaaaaaaaaaaaaaaaaaaaaaaaaaaaaaaaaaaaaaaaaaaaaaaaaaaaaaaaaaaaaaaaaaaaaaaaaaaaaaaaaaaaaaaa

SEQ ID NO: 3766 - RNA, 1400 nt, synthetic construct
  misc_feature 1..1400: note = mRNA a-1 (hSL-A100) (opt29) from Homo sapiens__NP_000448.3__HNF4A(1-375)(S148A)
  source 1..1400: mol_type = other RNA
aggagagtcccgcagtcggcgtccagcggctctgcttgttcgtgtgtgtgtcgttgcaggccttattcaagcttaccatgagactgagcaagaccctggtggacatggacatggccgactactctgccgccctggaccctgcctacaccaccctggagttcgaaaacgtgcaagtgctgaccatgggcaacgacaccagccctagcgagggcaccaacctgaacgcccctaatagcctgggagtgtccgccctgtgtgccatctgtggcgatagagccaccggcaagcactacggcgccagctcttgtgatggctgcaagggcttcttccggcggagcgtgcggaagaaccacatgtacagctgccggttcagccggcagtgcgtggtggacaaggataagcggaaccagtgccggtactgcagactgaagaagtgcttcagagccggcatgaagaaagaagccgtgcagaacgagcgggaccggatcagcaccagaagaagcagctacgaggacagcgccctgcccagcatcaacgccctgctgcaggccgaggtgctgagcagacagatcaccagcccagtgtccggcatcaacggcgacatccgggccaagaagatcgccagcattgccgacgtgtgcgagagcatgaaggaacagctgctggtgctggtggaatgggccaagtacatccccgccttttgcgagctgcccctggacgatcaggtggccctgctgagagcacacgccggcgaacatctgctgctgggagccaccaagcggagcatggtgttcaaggacgtgctgctgctgggcaacgactacatcgtgcccagacactgccctgagctggccgagatgagccgggtgtccatcagaatcctggacgaactggtgctgccgtttcaggaactgcagatcgacgacaacgagtacgcctacctgaaggccatcatctttttcgaccccgacgccaagggcctgagcgaccctggcaagatcaagcggctgagaagccaggtgcaagtgtccctggaagattacatcaacgaccggcagtacgacagccggggcagatttggcgaactgctcctgctgctgcccaccctgcagagcatcacctggcagatgatcgagcagatccagttcatcaagctgttcggcatggccaagatcgacaatctgctgcaggaaatgctgctctgaggactagtccctgttcccagagcccacttttttttctttttttgaaataaaatagcctgtctttcagatctcaaaggctcttttcagagccaccaaaaaaaaaaaaaaaaaaaaaaaaaaaaaaaaaaaaaaaaaaaaaaaaaaaaaaaaaaaaaaaaaaaaaaaaaaaaaaaaaaaaaaaaaaaaaaaaaaaaa

SEQ ID NO: 3767 - RNA, 1400 nt, synthetic construct
  misc_feature 1..1400: note = mRNA a-1 (hSL-A100) (opt29) from Homo sapiens__NP_000448.3__HNF4A(1-375)(S148E)
  source 1..1400: mol_type = other RNA
aggagagtcccgcagtcggcgtccagcggctctgcttgttcgtgtgtgtgtcgttgcaggccttattcaagcttaccatgagactgagcaagaccctggtggacatggacatggccgactactctgccgccctggaccctgcctacaccaccctggagttcgaaaacgtgcaagtgctgaccatgggcaacgacaccagccctagcgagggcaccaacctgaacgcccctaatagcctgggagtgtccgccctgtgtgccatctgtggcgatagagccaccggcaagcactacggcgccagctcttgtgatggctgcaagggcttcttccggcggagcgtgcggaagaaccacatgtacagctgccggttcagccggcagtgcgtggtggacaaggataagcggaaccagtgccggtactgcagactgaagaagtgcttcagagccggcatgaagaaagaagccgtgcagaacgagcgggaccggatcagcaccagaagaagcagctacgaggacagcgaactgcccagcatcaacgccctgctgcaggccgaggtgctgagcagacagatcaccagcccagtgtccggcatcaacggcgacatccgggccaagaagatcgccagcattgccgacgtgtgcgagagcatgaaggaacagctgctggtgctggtggaatgggccaagtacatccccgccttttgcgagctgcccctggacgatcaggtggccctgctgagagcacacgccggcgaacatctgctgctgggagccaccaagcggagcatggtgttcaaggacgtgctgctgctgggcaacgactacatcgtgcccagacactgccctgagctggccgagatgagccgggtgtccatcagaatcctggacgaactggtgctgccgtttcaggaactgcagatcgacgacaacgagtacgcctacctgaaggccatcatctttttcgaccccgacgccaagggcctgagcgaccctggcaagatcaagcggctgagaagccaggtgcaagtgtccctggaagattacatcaacgaccggcagtacgacagccggggcagatttggcgaactgctcctgctgctgcccaccctgcagagcatcacctggcagatgatcgagcagatccagttcatcaagctgttcggcatggccaagatcgacaatctgctgcaggaaatgctgctctgaggactagtccctgttcccagagcccacttttttttctttttttgaaataaaatagcctgtctttcagatctcaaaggctcttttcagagccaccaaaaaaaaaaaaaaaaaaaaaaaaaaaaaaaaaaaaaaaaaaaaaaaaaaaaaaaaaaaaaaaaaaaaaaaaaaaaaaaaaaaaaaaaaaaaaaaaaaaaa

SEQ ID NO: 3768 - RNA, 1400 nt, synthetic construct
  misc_feature 1..1400: note = mRNA a-1 (hSL-A100) (opt29) from Homo sapiens__NP_000448.3__HNF4A(1-375)(S183A)
  source 1..1400: mol_type = other RNA
aggagagtcccgcagtcggcgtccagcggctctgcttgttcgtgtgtgtgtcgttgcaggccttattcaagcttaccatgagactgagcaagaccctggtggacatggacatggccgactactctgccgccctggaccctgcctacaccaccctggagttcgaaaacgtgcaagtgctgaccatgggcaacgacaccagccctagcgagggcaccaacctgaacgcccctaatagcctgggagtgtccgccctgtgtgccatctgtggcgatagagccaccggcaagcactacggcgccagctcttgtgatggctgcaagggcttcttccggcggagcgtgcggaagaaccacatgtacagctgccggttcagccggcagtgcgtggtggacaaggataagcggaaccagtgccggtactgcagactgaagaagtgcttcagagccggcatgaagaaagaagccgtgcagaacgagcgggaccggatcagcaccagaagaagcagctacgaggacagcagcctgcccagcatcaacgccctgctgcaggccgaggtgctgagcagacagatcaccagcccagtgtccggcatcaacggcgacatccgggccaagaagatcgccgccattgccgacgtgtgcgagagcatgaaggaacagctgctggtgctggtggaatgggccaagtacatccccgccttttgcgagctgcccctggacgatcaggtggccctgctgagagcacacgccggcgaacatctgctgctgggagccaccaagcggagcatggtgttcaaggacgtgctgctgctgggcaacgactacatcgtgcccagacactgccctgagctggccgagatgagccgggtgtccatcagaatcctggacgaactggtgctgccgtttcaggaactgcagatcgacgacaacgagtacgcctacctgaaggccatcatctttttcgaccccgacgccaagggcctgagcgaccctggcaagatcaagcggctgagaagccaggtgcaagtgtccctggaagattacatcaacgaccggcagtacgacagccggggcagatttggcgaactgctcctgctgctgcccaccctgcagagcatcacctggcagatgatcgagcagatccagttcatcaagctgttcggcatggccaagatcgacaatctgctgcaggaaatgctgctctgaggactagtccctgttcccagagcccacttttttttctttttttgaaataaaatagcctgtctttcagatctcaaaggctcttttcagagccaccaaaaaaaaaaaaaaaaaaaaaaaaaaaaaaaaaaaaaaaaaaaaaaaaaaaaaaaaaaaaaaaaaaaaaaaaaaaaaaaaaaaaaaaaaaaaaaaaaaaaa

SEQ ID NO: 3769 - RNA, 1400 nt, synthetic construct
  misc_feature 1..1400: note = mRNA a-1 (hSL-A100) (opt29) from Homo sapiens__NP_000448.3__HNF4A(1-375)(S183E)
  source 1..1400: mol_type = other RNA
aggagagtcccgcagtcggcgtccagcggctctgcttgttcgtgtgtgtgtcgttgcaggccttattcaagcttaccatgagactgagcaagaccctggtggacatggacatggccgactactctgccgccctggaccctgcctacaccaccctggagttcgaaaacgtgcaagtgctgaccatgggcaacgacaccagccctagcgagggcaccaacctgaacgcccctaatagcctgggagtgtccgccctgtgtgccatctgtggcgatagagccaccggcaagcactacggcgccagctcttgtgatggctgcaagggcttcttccggcggagcgtgcggaagaaccacatgtacagctgccggttcagccggcagtgcgtggtggacaaggataagcggaaccagtgccggtactgcagactgaagaagtgcttcagagccggcatgaagaaagaagccgtgcagaacgagcgggaccggatcagcaccagaagaagcagctacgaggacagcagcctgcccagcatcaacgccctgctgcaggccgaggtgctgagcagacagatcaccagcccagtgtccggcatcaacggcgacatccgggccaagaagatcgccgagattgccgacgtgtgcgagagcatgaaggaacagctgctggtgctggtggaatgggccaagtacatccccgccttttgcgagctgcccctggacgatcaggtggccctgctgagagcacacgccggcgaacatctgctgctgggagccaccaagcggagcatggtgttcaaggacgtgctgctgctgggcaacgactacatcgtgcccagacactgccctgagctggccgagatgagccgggtgtccatcagaatcctggacgaactggtgctgccgtttcaggaactgcagatcgacgacaacgagtacgcctacctgaaggccatcatctttttcgaccccgacgccaagggcctgagcgaccctggcaagatcaagcggctgagaagccaggtgcaagtgtccctggaagattacatcaacgaccggcagtacgacagccggggcagatttggcgaactgctcctgctgctgcccaccctgcagagcatcacctggcagatgatcgagcagatccagttcatcaagctgttcggcatggccaagatcgacaatctgctgcaggaaatgctgctctgaggactagtccctgttcccagagcccacttttttttctttttttgaaataaaatagcctgtctttcagatctcaaaggctcttttcagagccaccaaaaaaaaaaaaaaaaaaaaaaaaaaaaaaaaaaaaaaaaaaaaaaaaaaaaaaaaaaaaaaaaaaaaaaaaaaaaaaaaaaaaaaaaaaaaaaaaaaaaa

SEQ ID NO: 3770 - RNA, 1400 nt, synthetic construct; identical to SEQ ID NO: 3742
  misc_feature 1..1400: note = mRNA a-1 (hSL-A100) (opt29) from Homo sapiens__NP_000448.3__HNF4A(1-375)(S461A)
  source 1..1400: mol_type = other RNA

SEQ ID NO: 3771 - RNA, 1400 nt, synthetic construct; identical to SEQ ID NO: 3742
  misc_feature 1..1400: note = mRNA a-1 (hSL-A100) (opt29) from Homo sapiens__NP_000448.3__HNF4A(1-375)(S461E)
  source 1..1400: mol_type = other RNA

SEQ ID NO: 3772 - RNA, 1400 nt, synthetic construct
  misc_feature 1..1400: note = mRNA a-1 (hSL-A100) (opt29) from Homo sapiens__NP_000448.3__HNF4A(1-375)(S142A_S143A_S313A)
  source 1..1400: mol_type = other RNA
aggagagtcccgcagtcggcgtccagcggctctgcttgttcgtgtgtgtgtcgttgcaggccttattcaagcttaccatgagactgagcaagaccctggtggacatggacatggccgactactctgccgccctggaccctgcctacaccaccctggagttcgaaaacgtgcaagtgctgaccatgggcaacgacaccagccctagcgagggcaccaacctgaacgcccctaatagcctgggagtgtccgccctgtgtgccatctgtggcgatagagccaccggcaagcactacggcgccagctcttgtgatggctgcaagggcttcttccggcggagcgtgcggaagaaccacatgtacagctgccggttcagccggcagtgcgtggtggacaaggataagcggaaccagtgccggtactgcagactgaagaagtgcttcagagccggcatgaagaaagaagccgtgcagaacgagcgggaccggatcagcaccagaagagccgcctacgaggacagcagcctgcccagcatcaacgccctgctgcaggccgaggtgctgagcagacagatcaccagcccagtgtccggcatcaacggcgacatccgggccaagaagatcgccagcattgccgacgtgtgcgagagcatgaaggaacagctgctggtgctggtggaatgggccaagtacatccccgccttttgcgagctgcccctggacgatcaggtggccctgctgagagcacacgccggcgaacatctgctgctgggagccaccaagcggagcatggtgttcaaggacgtgctgctgctgggcaacgactacatcgtgcccagacactgccctgagctggccgagatgagccgggtgtccatcagaatcctggacgaactggtgctgccgtttcaggaactgcagatcgacgacaacgagtacgcctacctgaaggccatcatctttttcgaccccgacgccaagggcctgagcgaccctggcaagatcaagcggctgagagcccaggtgcaagtgtccctggaagattacatcaacgaccggcagtacgacagccggggcagatttggcgaactgctcctgctgctgcccaccctgcagagcatcacctggcagatgatcgagcagatccagttcatcaagctgttcggcatggccaagatcgacaatctgctgcaggaaatgctgctctgaggactagtccctgttcccagagcccacttttttttctttttttgaaataaaatagcctgtctttcagatctcaaaggctcttttcagagccaccaaaaaaaaaaaaaaaaaaaaaaaaaaaaaaaaaaaaaaaaaaaaaaaaaaaaaaaaaaaaaaaaaaaaaaaaaaaaaaaaaaaaaaaaaaaaaaaaaaaaa

SEQ ID NO: 3773 - RNA, 1400 nt, synthetic construct; identical to SEQ ID NO: 3772
  misc_feature 1..1400: note = mRNA a-1 (hSL-A100) (opt29) from Homo sapiens__NP_000448.3__HNF4A(1-375)(S142A_S143A_S313A_K458R)
  source 1..1400: mol_type = other RNA

SEQ ID NO: 3774 - RNA, 1400 nt, synthetic construct
  misc_feature 1..1400: note = mRNA a-1 (hSL-A100) (opt29) from Homo sapiens__NP_000448.3__HNF4A(1-375)(S142A_S143A_S167A_S313A_ S378A_T429A_T432A_S436A_K458R)
  source 1..1400: mol_type = other RNA
aggagagtcccgcagtcggcgtccagcggctctgcttgttcgtgtgtgtgtcgttgcaggccttattcaagcttaccatgagactgagcaagaccctggtggacatggacatggccgactactctgccgccctggaccctgcctacaccaccctggagttcgaaaacgtgcaagtgctgaccatgggcaacgacaccagccctagcgagggcaccaacctgaacgcccctaatagcctgggagtgtccgccctgtgtgccatctgtggcgatagagccaccggcaagcactacggcgccagctcttgtgatggctgcaagggcttcttccggcggagcgtgcggaagaaccacatgtacagctgccggttcagccggcagtgcgtggtggacaaggataagcggaaccagtgccggtactgcagactgaagaagtgcttcagagccggcatgaagaaagaagccgtgcagaacgagcgggaccggatcagcaccagaagagccgcctacgaggacagcagcctgcccagcatcaacgccctgctgcaggccgaggtgctgagcagacagatcaccgccccagtgtccggcatcaacggcgacatccgggccaagaagatcgccagcattgccgacgtgtgcgagagcatgaaggaacagctgctggtgctggtggaatgggccaagtacatccccgccttttgcgagctgcccctggacgatcaggtggccctgctgagagcacacgccggcgaacatctgctgctgggagccaccaagcggagcatggtgttcaaggacgtgctgctgctgggcaacgactacatcgtgcccagacactgccctgagctggccgagatgagccgggtgtccatcagaatcctggacgaactggtgctgccgtttcaggaactgcagatcgacgacaacgagtacgcctacctgaaggccatcatctttttcgaccccgacgccaagggcctgagcgaccctggcaagatcaagcggctgagagcccaggtgcaagtgtccctggaagattacatcaacgaccggcagtacgacagccggggcagatttggcgaactgctcctgctgctgcccaccctgcagagcatcacctggcagatgatcgagcagatccagttcatcaagctgttcggcatggccaagatcgacaatctgctgcaggaaatgctgctctgaggactagtccctgttcccagagcccacttttttttctttttttgaaataaaatagcctgtctttcagatctcaaaggctcttttcagagccaccaaaaaaaaaaaaaaaaaaaaaaaaaaaaaaaaaaaaaaaaaaaaaaaaaaaaaaaaaaaaaaaaaaaaaaaaaaaaaaaaaaaaaaaaaaaaaaaaaaaaa

SEQ ID NO: 3775 - RNA, 1400 nt, synthetic construct
  misc_feature 1..1400: note = mRNA a-1 (hSL-A100) (opt29) from Homo sapiens__NP_000448.3__HNF4A(1-375)(S142A_S143A_S148A_S167A_ S313A_S378A_T429A_T432A_S436A_K458R)
  source 1..1400: mol_type = other RNA
aggagagtcccgcagtcggcgtccagcggctctgcttgttcgtgtgtgtgtcgttgcaggccttattcaagcttaccatgagactgagcaagaccctggtggacatggacatggccgactactctgccgccctggaccctgcctacaccaccctggagttcgaaaacgtgcaagtgctgaccatgggcaacgacaccagccctagcgagggcaccaacctgaacgcccctaatagcctgggagtgtccgccctgtgtgccatctgtggcgatagagccaccggcaagcactacggcgccagctcttgtgatggctgcaagggcttcttccggcggagcgtgcggaagaaccacatgtacagctgccggttcagccggcagtgcgtggtggacaaggataagcggaaccagtgccggtactgcagactgaagaagtgcttcagagccggcatgaagaaagaagccgtgcagaacgagcgggaccggatcagcaccagaagagccgcctacgaggacagcgccctgcccagcatcaacgccctgctgcaggccgaggtgctgagcagacagatcaccgccccagtgtccggcatcaacggcgacatccgggccaagaagatcgccagcattgccgacgtgtgcgagagcatgaaggaacagctgctggtgctggtggaatgggccaagtacatccccgccttttgcgagctgcccctggacgatcaggtggccctgctgagagcacacgccggcgaacatctgctgctgggagccaccaagcggagcatggtgttcaaggacgtgctgctgctgggcaacgactacatcgtgcccagacactgccctgagctggccgagatgagccgggtgtccatcagaatcctggacgaactggtgctgccgtttcaggaactgcagatcgacgacaacgagtacgcctacctgaaggccatcatctttttcgaccccgacgccaagggcctgagcgaccctggcaagatcaagcggctgagagcccaggtgcaagtgtccctggaagattacatcaacgaccggcagtacgacagccggggcagatttggcgaactgctcctgctgctgcccaccctgcagagcatcacctggcagatgatcgagcagatccagttcatcaagctgttcggcatggccaagatcgacaatctgctgcaggaaatgctgctctgaggactagtccctgttcccagagcccacttttttttctttttttgaaataaaatagcctgtctttcagatctcaaaggctcttttcagagccaccaaaaaaaaaaaaaaaaaaaaaaaaaaaaaaaaaaaaaaaaaaaaaaaaaaaaaaaaaaaaaaaaaaaaaaaaaaaaaaaaaaaaaaaaaaaaaaaaaaaaa

SEQ ID NO: 3776 - RNA, 1400 nt, synthetic construct
  misc_feature 1..1400: note = mRNA a-1 (hSL-A100) (opt29) from Homo sapiens__NP_000448.3__HNF4A(1-375)(K106R_K108R_K126R_K127R_ S142A_S143A_S148A_S167A_S313A_S378A_T429A_T432A_S436A_K458R )
  source 1..1400: mol_type = other RNA
aggagagtcccgcagtcggcgtccagcggctctgcttgttcgtgtgtgtgtcgttgcaggccttattcaagcttaccatgagactgagcaagaccctggtggacatggacatggccgactactctgccgccctggaccctgcctacaccaccctggagttcgaaaacgtgcaagtgctgaccatgggcaacgacaccagccctagcgagggcaccaacctgaacgcccctaatagcctgggagtgtccgccctgtgtgccatctgtggcgatagagccaccggcaagcactacggcgccagctcttgtgatggctgcaagggcttcttccggcggagcgtgcggaagaaccacatgtacagctgccggttcagccggcagtgcgtggtggaccgggatagacggaaccagtgccggtactgcagactgaagaagtgcttcagagccggcatgcggagagaagccgtgcagaacgagcgggaccggatcagcaccagaagagccgcctacgaggacagcgccctgcccagcatcaacgccctgctgcaggccgaggtgctgagcagacagatcaccgccccagtgtccggcatcaacggcgacatccgggccaagaagatcgccagcattgccgacgtgtgcgagagcatgaaggaacagctgctggtgctggtggaatgggccaagtacatccccgccttttgcgagctgcccctggacgatcaggtggccctgctgagagcacacgccggcgaacatctgctgctgggagccaccaagcggagcatggtgttcaaggacgtgctgctgctgggcaacgactacatcgtgcccagacactgccctgagctggccgagatgagccgggtgtccatcagaatcctggacgaactggtgctgccgtttcaggaactgcagatcgacgacaacgagtacgcctacctgaaggccatcatctttttcgaccccgacgccaagggcctgagcgaccctggcaagatcaagcggctgagagcccaggtgcaagtgtccctggaagattacatcaacgaccggcagtacgacagccggggcagatttggcgaactgctcctgctgctgcccaccctgcagagcatcacctggcagatgatcgagcagatccagttcatcaagctgttcggcatggccaagatcgacaatctgctgcaggaaatgctgctctgaggactagtccctgttcccagagcccacttttttttctttttttgaaataaaatagcctgtctttcagatctcaaaggctcttttcagagccaccaaaaaaaaaaaaaaaaaaaaaaaaaaaaaaaaaaaaaaaaaaaaaaaaaaaaaaaaaaaaaaaaaaaaaaaaaaaaaaaaaaaaaaaaaaaaaaaaaaaaa

SEQ ID NO: 3777 - RNA, 1400 nt, synthetic construct
  misc_feature 1..1400: note = mRNA a-1 (hSL-A100) (opt29) from Homo sapiens__NP_000448.3__HNF4A(1-375)(S142A_S143A_S148A_T166A_ S167A_S313A_S378A_T429A_T432A_S436A_K458R)
  source 1..1400: mol_type = other RNA
aggagagtcccgcagtcggcgtccagcggctctgcttgttcgtgtgtgtgtcgttgcaggccttattcaagcttaccatgagactgagcaagaccctggtggacatggacatggccgactactctgccgccctggaccctgcctacaccaccctggagttcgaaaacgtgcaagtgctgaccatgggcaacgacaccagccctagcgagggcaccaacctgaacgcccctaatagcctgggagtgtccgccctgtgtgccatctgtggcgatagagccaccggcaagcactacggcgccagctcttgtgatggctgcaagggcttcttccggcggagcgtgcggaagaaccacatgtacagctgccggttcagccggcagtgcgtggtggacaaggataagcggaaccagtgccggtactgcagactgaagaagtgcttcagagccggcatgaagaaagaagccgtgcagaacgagcgggaccggatcagcaccagaagagccgcctacgaggacagcgccctgcccagcatcaacgccctgctgcaggccgaggtgctgagcagacagatcgccgccccagtgtccggcatcaacggcgacatccgggccaagaagatcgccagcattgccgacgtgtgcgagagcatgaaggaacagctgctggtgctggtggaatgggccaagtacatccccgccttttgcgagctgcccctggacgatcaggtggccctgctgagagcacacgccggcgaacatctgctgctgggagccaccaagcggagcatggtgttcaaggacgtgctgctgctgggcaacgactacatcgtgcccagacactgccctgagctggccgagatgagccgggtgtccatcagaatcctggacgaactggtgctgccgtttcaggaactgcagatcgacgacaacgagtacgcctacctgaaggccatcatctttttcgaccccgacgccaagggcctgagcgaccctggcaagatcaagcggctgagagcccaggtgcaagtgtccctggaagattacatcaacgaccggcagtacgacagccggggcagatttggcgaactgctcctgctgctgcccaccctgcagagcatcacctggcagatgatcgagcagatccagttcatcaagctgttcggcatggccaagatcgacaatctgctgcaggaaatgctgctctgaggactagtccctgttcccagagcccacttttttttctttttttgaaataaaatagcctgtctttcagatctcaaaggctcttttcagagccaccaaaaaaaaaaaaaaaaaaaaaaaaaaaaaaaaaaaaaaaaaaaaaaaaaaaaaaaaaaaaaaaaaaaaaaaaaaaaaaaaaaaaaaaaaaaaaaaaaaaaa

SEQ ID NO: 3778 - RNA, 1400 nt, synthetic construct
  misc_feature 1..1400: note = mRNA a-1 (hSL-A100) (opt29) from Homo sapiens__NP_000448.3__HNF4A(1-375)(S87A_S142A_S143A_S148A_T 166A_S167A_S313A_S378A_T429A_T432A_S436A_K458R)
  source 1..1400: mol_type = other RNA
aggagagtcccgcagtcggcgtccagcggctctgcttgttcgtgtgtgtgtcgttgcaggccttattcaagcttaccatgagactgagcaagaccctggtggacatggacatggccgactactctgccgccctggaccctgcctacaccaccctggagttcgaaaacgtgcaagtgctgaccatgggcaacgacaccagccctagcgagggcaccaacctgaacgcccctaatagcctgggagtgtccgccctgtgtgccatctgtggcgatagagccaccggcaagcactacggcgccagctcttgtgatggctgcaagggcttcttccggcgggccgtgcggaagaaccacatgtacagctgccggttcagccggcagtgcgtggtggacaaggataagcggaaccagtgccggtactgcagactgaagaagtgcttcagagccggcatgaagaaagaagccgtgcagaacgagcgggaccggatcagcaccagaagagccgcctacgaggacagcgccctgcccagcatcaacgccctgctgcaggccgaggtgctgagcagacagatcgccgccccagtgtccggcatcaacggcgacatccgggccaagaagatcgccagcattgccgacgtgtgcgagagcatgaaggaacagctgctggtgctggtggaatgggccaagtacatccccgccttttgcgagctgcccctggacgatcaggtggccctgctgagagcacacgccggcgaacatctgctgctgggagccaccaagcggagcatggtgttcaaggacgtgctgctgctgggcaacgactacatcgtgcccagacactgccctgagctggccgagatgagccgggtgtccatcagaatcctggacgaactggtgctgccgtttcaggaactgcagatcgacgacaacgagtacgcctacctgaaggccatcatctttttcgaccccgacgccaagggcctgagcgaccctggcaagatcaagcggctgagagcccaggtgcaagtgtccctggaagattacatcaacgaccggcagtacgacagccggggcagatttggcgaactgctcctgctgctgcccaccctgcagagcatcacctggcagatgatcgagcagatccagttcatcaagctgttcggcatggccaagatcgacaatctgctgcaggaaatgctgctctgaggactagtccctgttcccagagcccacttttttttctttttttgaaataaaatagcctgtctttcagatctcaaaggctcttttcagagccaccaaaaaaaaaaaaaaaaaaaaaaaaaaaaaaaaaaaaaaaaaaaaaaaaaaaaaaaaaaaaaaaaaaaaaaaaaaaaaaaaaaaaaaaaaaaaaaaaaaaaa

SEQ ID NO: 3779 - RNA, 1400 nt, synthetic construct
  misc_feature 1..1400: note = mRNA a-1 (hSL-A100) (opt29) from Homo sapiens__NP_000448.3__HNF4A(1-375)(S87A_K106R_K108R_K126R_K 127R_S142A_S143A_S148A_T166A_S167A_S313A_S378A_T429A_T432A_ S436A_K458R)
  source 1..1400: mol_type = other RNA
aggagagtcccgcagtcggcgtccagcggctctgcttgttcgtgtgtgtgtcgttgcaggccttattcaagcttaccatgagactgagcaagaccctggtggacatggacatggccgactactctgccgccctggaccctgcctacaccaccctggagttcgaaaacgtgcaagtgctgaccatgggcaacgacaccagccctagcgagggcaccaacctgaacgcccctaatagcctgggagtgtccgccctgtgtgccatctgtggcgatagagccaccggcaagcactacggcgccagctcttgtgatggctgcaagggcttcttccggcgggccgtgcggaagaaccacatgtacagctgccggttcagccggcagtgcgtggtggaccgggatagacggaaccagtgccggtactgcagactgaagaagtgcttcagagccggcatgcggagagaagccgtgcagaacgagcgggaccggatcagcaccagaagagccgcctacgaggacagcgccctgcccagcatcaacgccctgctgcaggccgaggtgctgagcagacagatcgccgccccagtgtccggcatcaacggcgacatccgggccaagaagatcgccagcattgccgacgtgtgcgagagcatgaaggaacagctgctggtgctggtggaatgggccaagtacatccccgccttttgcgagctgcccctggacgatcaggtggccctgctgagagcacacgccggcgaacatctgctgctgggagccaccaagcggagcatggtgttcaaggacgtgctgctgctgggcaacgactacatcgtgcccagacactgccctgagctggccgagatgagccgggtgtccatcagaatcctggacgaactggtgctgccgtttcaggaactgcagatcgacgacaacgagtacgcctacctgaaggccatcatctttttcgaccccgacgccaagggcctgagcgaccctggcaagatcaagcggctgagagcccaggtgcaagtgtccctggaagattacatcaacgaccggcagtacgacagccggggcagatttggcgaactgctcctgctgctgcccaccctgcagagcatcacctggcagatgatcgagcagatccagttcatcaagctgttcggcatggccaagatcgacaatctgctgcaggaaatgctgctctgaggactagtccctgttcccagagcccacttttttttctttttttgaaataaaatagcctgtctttcagatctcaaaggctcttttcagagccaccaaaaaaaaaaaaaaaaaaaaaaaaaaaaaaaaaaaaaaaaaaaaaaaaaaaaaaaaaaaaaaaaaaaaaaaaaaaaaaaaaaaaaaaaaaaaaaaaaaaaa

SEQ ID NO: 3780 - RNA, 1400 nt, synthetic construct
  misc_feature 1..1400: note = mRNA a-1 (hSL-A100) (opt29) from Homo sapiens__NP_000448.3__HNF4A(1-375)(S87A_K106R_K108R_K126R_K 127R)
  source 1..1400: mol_type = other RNA
aggagagtcccgcagtcggcgtccagcggctctgcttgttcgtgtgtgtgtcgttgcaggccttattcaagcttaccatgagactgagcaagaccctggtggacatggacatggccgactactctgccgccctggaccctgcctacaccaccctggagttcgaaaacgtgcaagtgctgaccatgggcaacgacaccagccctagcgagggcaccaacctgaacgcccctaatagcctgggagtgtccgccctgtgtgccatctgtggcgatagagccaccggcaagcactacggcgccagctcttgtgatggctgcaagggcttcttccggcgggccgtgcggaagaaccacatgtacagctgccggttcagccggcagtgcgtggtggaccgggatagacggaaccagtgccggtactgcagactgaagaagtgcttcagagccggcatgcggagagaagccgtgcagaacgagcgggaccggatcagcaccagaagaagcagctacgaggacagcagcctgcccagcatcaacgccctgctgcaggccgaggtgctgagcagacagatcaccagcccagtgtccggcatcaacggcgacatccgggccaagaagatcgccagcattgccgacgtgtgcgagagcatgaaggaacagctgctggtgctggtggaatgggccaagtacatccccgccttttgcgagctgcccctggacgatcaggtggccctgctgagagcacacgccggcgaacatctgctgctgggagccaccaagcggagcatggtgttcaaggacgtgctgctgctgggcaacgactacatcgtgcccagacactgccctgagctggccgagatgagccgggtgtccatcagaatcctggacgaactggtgctgccgtttcaggaactgcagatcgacgacaacgagtacgcctacctgaaggccatcatctttttcgaccccgacgccaagggcctgagcgaccctggcaagatcaagcggctgagaagccaggtgcaagtgtccctggaagattacatcaacgaccggcagtacgacagccggggcagatttggcgaactgctcctgctgctgcccaccctgcagagcatcacctggcagatgatcgagcagatccagttcatcaagctgttcggcatggccaagatcgacaatctgctgcaggaaatgctgctctgaggactagtccctgttcccagagcccacttttttttctttttttgaaataaaatagcctgtctttcagatctcaaaggctcttttcagagccaccaaaaaaaaaaaaaaaaaaaaaaaaaaaaaaaaaaaaaaaaaaaaaaaaaaaaaaaaaaaaaaaaaaaaaaaaaaaaaaaaaaaaaaaaaaaaaaaaaaaaa

SEQ ID NO: 3781 - RNA, 1400 nt, synthetic construct; identical to SEQ ID NO: 3779
  misc_feature 1..1400: note = mRNA a-1 (hSL-A100) (opt29) from Homo sapiens__NP_000448.3__HNF4A(1-375)(S87A_K106R_K108R_K126R_K 127R_S142A_S143A_S148A_T166A_S167A_S313A_S378A_T429A_T432A_ S436A_K458R_S461A)
  source 1..1400: mol_type = other RNA

SEQ ID NO: 3782 - RNA, 1400 nt, synthetic construct; identical to SEQ ID NO: 3779
  misc_feature 1..1400: note = mRNA a-1 (hSL-A100) (opt29) from Homo sapiens__NP_000448.3__HNF4A(1-375)(S87A_K106R_K108R_K126R_K 127R_S142A_S143A_S148A_T166A_S167A_S313A_S378A_T429A_T432A_ S436A_K458R_S461E)
  source 1..1400: mol_type = other RNA

SEQ ID NO: 3783 - RNA, 1400 nt, synthetic construct
  misc_feature 1..1400: note = mRNA a-1 (hSL-A100) (opt29) from Homo sapiens__NP_000448.3__HNF4A(1-375)(S87A_K106R_K108R_K126R_K 127R_S142A_S143A_S148E_T166A_S167E_S313A_S378E_T429E_T432E_ S436E_K458R_S461E)
  source 1..1400: mol_type = other RNA
aggagagtcccgcagtcggcgtccagcggctctgcttgttcgtgtgtgtgtcgttgcaggccttattcaagcttaccatgagactgagcaagaccctggtggacatggacatggccgactactctgccgccctggaccctgcctacaccaccctggagttcgaaaacgtgcaagtgctgaccatgggcaacgacaccagccctagcgagggcaccaacctgaacgcccctaatagcctgggagtgtccgccctgtgtgccatctgtggcgatagagccaccggcaagcactacggcgccagctcttgtgatggctgcaagggcttcttccggcgggccgtgcggaagaaccacatgtacagctgccggttcagccggcagtgcgtggtggaccgggatagacggaaccagtgccggtactgcagactgaagaagtgcttcagagccggcatgcggagagaagccgtgcagaacgagcgggaccggatcagcaccagaagagccgcctacgaggacagcgaactgcccagcatcaacgccctgctgcaggccgaggtgctgagcagacagatcgccgaaccagtgtccggcatcaacggcgacatccgggccaagaagatcgccagcattgccgacgtgtgcgagagcatgaaggaacagctgctggtgctggtggaatgggccaagtacatccccgccttttgcgagctgcccctggacgatcaggtggccctgctgagagcacacgccggcgaacatctgctgctgggagccaccaagcggagcatggtgttcaaggacgtgctgctgctgggcaacgactacatcgtgcccagacactgccctgagctggccgagatgagccgggtgtccatcagaatcctggacgaactggtgctgccgtttcaggaactgcagatcgacgacaacgagtacgcctacctgaaggccatcatctttttcgaccccgacgccaagggcctgagcgaccctggcaagatcaagcggctgagagcccaggtgcaagtgtccctggaagattacatcaacgaccggcagtacgacagccggggcagatttggcgaactgctcctgctgctgcccaccctgcagagcatcacctggcagatgatcgagcagatccagttcatcaagctgttcggcatggccaagatcgacaatctgctgcaggaaatgctgctctgaggactagtccctgttcccagagcccacttttttttctttttttgaaataaaatagcctgtctttcagatctcaaaggctcttttcagagccaccaaaaaaaaaaaaaaaaaaaaaaaaaaaaaaaaaaaaaaaaaaaaaaaaaaaaaaaaaaaaaaaaaaaaaaaaaaaaaaaaaaaaaaaaaaaaaaaaaaaaa

SEQ ID NO: 3784 - RNA, 1400 nt, synthetic construct
  misc_feature 1..1400: note = mRNA a-1 (hSL-A100) (opt29) from Homo sapiens__NP_000448.3__HNF4A(1-375)(S87A_K106R_K108R_K126R_K 127R_S142A_S143A_S148A_T166A_S167A_K179R_K180R_S313A_S378A_ T429A_T432A_S436A_K458R_S461E)
  source 1..1400: mol_type = other RNA
aggagagtcccgcagtcggcgtccagcggctctgcttgttcgtgtgtgtgtcgttgcaggccttattcaagcttaccatgagactgagcaagaccctggtggacatggacatggccgactactctgccgccctggaccctgcctacaccaccctggagttcgaaaacgtgcaagtgctgaccatgggcaacgacaccagccctagcgagggcaccaacctgaacgcccctaatagcctgggagtgtccgccctgtgtgccatctgtggcgatagagccaccggcaagcactacggcgccagctcttgtgatggctgcaagggcttcttccggcgggccgtgcggaagaaccacatgtacagctgccggttcagccggcagtgcgtggtggaccgggatagacggaaccagtgccggtactgcagactgaagaagtgcttcagagccggcatgcggagagaagccgtgcagaacgagcgggaccggatcagcaccagaagagccgcctacgaggacagcgccctgcccagcatcaacgccctgctgcaggccgaggtgctgagcagacagatcgccgccccagtgtccggcatcaacggcgacatccgggcccggagaatcgccagcattgccgacgtgtgcgagagcatgaaggaacagctgctggtgctggtggaatgggccaagtacatccccgccttttgcgagctgcccctggacgatcaggtggccctgctgagagcacacgccggcgaacatctgctgctgggagccaccaagcggagcatggtgttcaaggacgtgctgctgctgggcaacgactacatcgtgcccagacactgccctgagctggccgagatgagccgggtgtccatcagaatcctggacgaactggtgctgccgtttcaggaactgcagatcgacgacaacgagtacgcctacctgaaggccatcatctttttcgaccccgacgccaagggcctgagcgaccctggcaagatcaagcggctgagagcccaggtgcaagtgtccctggaagattacatcaacgaccggcagtacgacagccggggcagatttggcgaactgctcctgctgctgcccaccctgcagagcatcacctggcagatgatcgagcagatccagttcatcaagctgttcggcatggccaagatcgacaatctgctgcaggaaatgctgctctgaggactagtccctgttcccagagcccacttttttttctttttttgaaataaaatagcctgtctttcagatctcaaaggctcttttcagagccaccaaaaaaaaaaaaaaaaaaaaaaaaaaaaaaaaaaaaaaaaaaaaaaaaaaaaaaaaaaaaaaaaaaaaaaaaaaaaaaaaaaaaaaaaaaaaaaaaaaaaa

SEQ ID NO: 3785 - RNA, 1400 nt, synthetic construct
  misc_feature 1..1400: note = mRNA a-1 (hSL-A100) (opt29) from Homo sapiens__NP_000448.3__HNF4A(1-375)(S87A_K106R_K108R_K126R_K 127R_S142A_S143A_S148A_T166A_S167A_K300R_K307R_K309R_S313A_ S378A_T429A_T432A_S436A_K458R_S461E)
  source 1..1400: mol_type = other RNA
aggagagtcccgcagtcggcgtccagcggctctgcttgttcgtgtgtgtgtcgttgcaggccttattcaagcttaccatgagactgagcaagaccctggtggacatggacatggccgactactctgccgccctggaccctgcctacaccaccctggagttcgaaaacgtgcaagtgctgaccatgggcaacgacaccagccctagcgagggcaccaacctgaacgcccctaatagcctgggagtgtccgccctgtgtgccatctgtggcgatagagccaccggcaagcactacggcgccagctcttgtgatggctgcaagggcttcttccggcgggccgtgcggaagaaccacatgtacagctgccggttcagccggcagtgcgtggtggaccgggatagacggaaccagtgccggtactgcagactgaagaagtgcttcagagccggcatgcggagagaagccgtgcagaacgagcgggaccggatcagcaccagaagagccgcctacgaggacagcgccctgcccagcatcaacgccctgctgcaggccgaggtgctgagcagacagatcgccgccccagtgtccggcatcaacggcgacatccgggccaagaagatcgccagcattgccgacgtgtgcgagagcatgaaggaacagctgctggtgctggtggaatgggccaagtacatccccgccttttgcgagctgcccctggacgatcaggtggccctgctgagagcacacgccggcgaacatctgctgctgggagccaccaagcggagcatggtgttcaaggacgtgctgctgctgggcaacgactacatcgtgcccagacactgccctgagctggccgagatgagccgggtgtccatcagaatcctggacgaactggtgctgccgtttcaggaactgcagatcgacgacaacgagtacgcctacctgaaggccatcatctttttcgaccccgacgccagaggcctgagcgaccctggccggatcagacggctgagagcccaggtgcaagtgtccctggaagattacatcaacgaccggcagtacgacagccggggcagatttggcgaactgctcctgctgctgcccaccctgcagagcatcacctggcagatgatcgagcagatccagttcatcaagctgttcggcatggccaagatcgacaatctgctgcaggaaatgctgctctgaggactagtccctgttcccagagcccacttttttttctttttttgaaataaaatagcctgtctttcagatctcaaaggctcttttcagagccaccaaaaaaaaaaaaaaaaaaaaaaaaaaaaaaaaaaaaaaaaaaaaaaaaaaaaaaaaaaaaaaaaaaaaaaaaaaaaaaaaaaaaaaaaaaaaaaaaaaaaa

SEQ ID NO: 3786 - RNA, 1400 nt, synthetic construct; identical to SEQ ID NO: 3779
  misc_feature 1..1400: note = mRNA a-1 (hSL-A100) (opt29) from Homo sapiens__NP_000448.3__HNF4A(1-375)(S87A_K106R_K108R_K126R_K 127R_S142A_S143A_S148A_T166A_S167A_S313A_S378A_T429A_T432A_ S436A_K447R_K458R_S461E_K470R)
  source 1..1400: mol_type = other RNA

SEQ ID NO: 3787 - RNA, 1400 nt, synthetic construct
  misc_feature 1..1400: note = mRNA a-1 (hSL-A100) (opt29) from Homo sapiens__NP_000448.3__HNF4A(1-375)(S87A_K106R_K108R_K126R_K 127R_S142A_S143A_S148A_T166A_S167A_K179R_K180R_K234R_K300R_ K307R_K309R_S313A_S378A_T429A_T432A_S436A_K447R_K458R_S461E _K470R)
  source 1..1400: mol_type = other RNA
aggagagtcccgcagtcggcgtccagcggctctgcttgttcgtgtgtgtgtcgttgcaggccttattcaagcttaccatgagactgagcaagaccctggtggacatggacatggccgactactctgccgccctggaccctgcctacaccaccctggagttcgaaaacgtgcaagtgctgaccatgggcaacgacaccagccctagcgagggcaccaacctgaacgcccctaatagcctgggagtgtccgccctgtgtgccatctgtggcgatagagccaccggcaagcactacggcgccagctcttgtgatggctgcaagggcttcttccggcgggccgtgcggaagaaccacatgtacagctgccggttcagccggcagtgcgtggtggaccgggatagacggaaccagtgccggtactgcagactgaagaagtgcttcagagccggcatgcggagagaagccgtgcagaacgagcgggaccggatcagcaccagaagagccgcctacgaggacagcgccctgcccagcatcaacgccctgctgcaggccgaggtgctgagcagacagatcgccgccccagtgtccggcatcaacggcgacatccgggcccggagaatcgccagcattgccgacgtgtgcgagagcatgaaggaacagctgctggtgctggtggaatgggccaagtacatccccgccttttgcgagctgcccctggacgatcaggtggccctgctgagagcacacgccggcgaacatctgctgctgggagccacccggcggagcatggtgttcaaggacgtgctgctgctgggcaacgactacatcgtgcccagacactgccctgagctggccgagatgagccgggtgtccatcagaatcctggacgaactggtgctgccgtttcaggaactgcagatcgacgacaacgagtacgcctacctgaaggccatcatctttttcgaccccgacgccagaggcctgagcgaccctggccggatcagacggctgagagcccaggtgcaagtgtccctggaagattacatcaacgaccggcagtacgacagccggggcagatttggcgaactgctcctgctgctgcccaccctgcagagcatcacctggcagatgatcgagcagatccagttcatcaagctgttcggcatggccaagatcgacaatctgctgcaggaaatgctgctctgaggactagtccctgttcccagagcccacttttttttctttttttgaaataaaatagcctgtctttcagatctcaaaggctcttttcagagccaccaaaaaaaaaaaaaaaaaaaaaaaaaaaaaaaaaaaaaaaaaaaaaaaaaaaaaaaaaaaaaaaaaaaaaaaaaaaaaaaaaaaaaaaaaaaaaaaaaaaaa

SEQ ID NO: 3788 - RNA, 1400 nt, synthetic construct
  misc_feature 1..1400: note = mRNA a-1 (hSL-A100) (opt29) from Homo sapiens__NP_000448.3__HNF4A(1-375)(S87A_S95A_S99A_K106R_K10 8R_K126R_K127R_S142A_S143A_S148A_T166A_S167A_S313A_S378A_T4 29A_T432A_S436A_K458R_S461E)
  source 1..1400: mol_type = other RNA
aggagagtcccgcagtcggcgtccagcggctctgcttgttcgtgtgtgtgtcgttgcaggccttattcaagcttaccatgagactgagcaagaccctggtggacatggacatggccgactactctgccgccctggaccctgcctacaccaccctggagttcgaaaacgtgcaagtgctgaccatgggcaacgacaccagccctagcgagggcaccaacctgaacgcccctaatagcctgggagtgtccgccctgtgtgccatctgtggcgatagagccaccggcaagcactacggcgccagctcttgtgatggctgcaagggcttcttccggcgggccgtgcggaagaaccacatgtacgcctgccggttcgcccggcagtgcgtggtggaccgggatagacggaaccagtgccggtactgcagactgaagaagtgcttcagagccggcatgcggagagaagccgtgcagaacgagcgggaccggatcagcaccagaagagccgcctacgaggacagcgccctgcccagcatcaacgccctgctgcaggccgaggtgctgagcagacagatcgccgccccagtgtccggcatcaacggcgacatccgggccaagaagatcgccagcattgccgacgtgtgcgagagcatgaaggaacagctgctggtgctggtggaatgggccaagtacatccccgccttttgcgagctgcccctggacgatcaggtggccctgctgagagcacacgccggcgaacatctgctgctgggagccaccaagcggagcatggtgttcaaggacgtgctgctgctgggcaacgactacatcgtgcccagacactgccctgagctggccgagatgagccgggtgtccatcagaatcctggacgaactggtgctgccgtttcaggaactgcagatcgacgacaacgagtacgcctacctgaaggccatcatctttttcgaccccgacgccaagggcctgagcgaccctggcaagatcaagcggctgagagcccaggtgcaagtgtccctggaagattacatcaacgaccggcagtacgacagccggggcagatttggcgaactgctcctgctgctgcccaccctgcagagcatcacctggcagatgatcgagcagatccagttcatcaagctgttcggcatggccaagatcgacaatctgctgcaggaaatgctgctctgaggactagtccctgttcccagagcccacttttttttctttttttgaaataaaatagcctgtctttcagatctcaaaggctcttttcagagccaccaaaaaaaaaaaaaaaaaaaaaaaaaaaaaaaaaaaaaaaaaaaaaaaaaaaaaaaaaaaaaaaaaaaaaaaaaaaaaaaaaaaaaaaaaaaaaaaaaaaaa

SEQ ID NO: 3789 - RNA, 1400 nt, synthetic construct
  misc_feature 1..1400: note = mRNA a-1 (hSL-A100) (opt29) from Homo sapiens__NP_000448.3__HNF4A(1-375)(S87A_K106R_K108R_K126R_K 127R_S138A_T139A_S142A_S143A_S148A_T166A_S167A_S313A_S378A_ T429A_T432A_S436A_K458R_S461E)
  source 1..1400: mol_type = other RNA
aggagagtcccgcagtcggcgtccagcggctctgcttgttcgtgtgtgtgtcgttgcaggccttattcaagcttaccatgagactgagcaagaccctggtggacatggacatggccgactactctgccgccctggaccctgcctacaccaccctggagttcgaaaacgtgcaagtgctgaccatgggcaacgacaccagccctagcgagggcaccaacctgaacgcccctaatagcctgggagtgtccgccctgtgtgccatctgtggcgatagagccaccggcaagcactacggcgccagctcttgtgatggctgcaagggcttcttccggcgggccgtgcggaagaaccacatgtacagctgccggttcagccggcagtgcgtggtggaccgggatagacggaaccagtgccggtactgcagactgaagaagtgcttcagagccggcatgcggagagaagccgtgcagaacgagcgggaccggatcgccgccagaagagccgcctacgaggacagcgccctgcccagcatcaacgccctgctgcaggccgaggtgctgagcagacagatcgccgccccagtgtccggcatcaacggcgacatccgggccaagaagatcgccagcattgccgacgtgtgcgagagcatgaaggaacagctgctggtgctggtggaatgggccaagtacatccccgccttttgcgagctgcccctggacgatcaggtggccctgctgagagcacacgccggcgaacatctgctgctgggagccaccaagcggagcatggtgttcaaggacgtgctgctgctgggcaacgactacatcgtgcccagacactgccctgagctggccgagatgagccgggtgtccatcagaatcctggacgaactggtgctgccgtttcaggaactgcagatcgacgacaacgagtacgcctacctgaaggccatcatctttttcgaccccgacgccaagggcctgagcgaccctggcaagatcaagcggctgagagcccaggtgcaagtgtccctggaagattacatcaacgaccggcagtacgacagccggggcagatttggcgaactgctcctgctgctgcccaccctgcagagcatcacctggcagatgatcgagcagatccagttcatcaagctgttcggcatggccaagatcgacaatctgctgcaggaaatgctgctctgaggactagtccctgttcccagagcccacttttttttctttttttgaaataaaatagcctgtctttcagatctcaaaggctcttttcagagccaccaaaaaaaaaaaaaaaaaaaaaaaaaaaaaaaaaaaaaaaaaaaaaaaaaaaaaaaaaaaaaaaaaaaaaaaaaaaaaaaaaaaaaaaaaaaaaaaaaaaaa

SEQ ID NO: 3790 - RNA, 1400 nt, synthetic construct
  misc_feature 1..1400: note = mRNA a-1 (hSL-A100) (opt29) from Homo sapiens__NP_000448.3__HNF4A(1-375)(S87A_S95A_S99A_K106R_K10 8R_K126R_K127R_S138A_T139A_S142A_S143A_S148A_T166A_S167A_S3 13A_S378A_T429A_T432A_S436A_K458R_S461E)
  source 1..1400: mol_type = other RNA
aggagagtcccgcagtcggcgtccagcggctctgcttgttcgtgtgtgtgtcgttgcaggccttattcaagcttaccatgagactgagcaagaccctggtggacatggacatggccgactactctgccgccctggaccctgcctacaccaccctggagttcgaaaacgtgcaagtgctgaccatgggcaacgacaccagccctagcgagggcaccaacctgaacgcccctaatagcctgggagtgtccgccctgtgtgccatctgtggcgatagagccaccggcaagcactacggcgccagctcttgtgatggctgcaagggcttcttccggcgggccgtgcggaagaaccacatgtacgcctgccggttcgcccggcagtgcgtggtggaccgggatagacggaaccagtgccggtactgcagactgaagaagtgcttcagagccggcatgcggagagaagccgtgcagaacgagcgggaccggatcgccgccagaagagccgcctacgaggacagcgccctgcccagcatcaacgccctgctgcaggccgaggtgctgagcagacagatcgccgccccagtgtccggcatcaacggcgacatccgggccaagaagatcgccagcattgccgacgtgtgcgagagcatgaaggaacagctgctggtgctggtggaatgggccaagtacatccccgccttttgcgagctgcccctggacgatcaggtggccctgctgagagcacacgccggcgaacatctgctgctgggagccaccaagcggagcatggtgttcaaggacgtgctgctgctgggcaacgactacatcgtgcccagacactgccctgagctggccgagatgagccgggtgtccatcagaatcctggacgaactggtgctgccgtttcaggaactgcagatcgacgacaacgagtacgcctacctgaaggccatcatctttttcgaccccgacgccaagggcctgagcgaccctggcaagatcaagcggctgagagcccaggtgcaagtgtccctggaagattacatcaacgaccggcagtacgacagccggggcagatttggcgaactgctcctgctgctgcccaccctgcagagcatcacctggcagatgatcgagcagatccagttcatcaagctgttcggcatggccaagatcgacaatctgctgcaggaaatgctgctctgaggactagtccctgttcccagagcccacttttttttctttttttgaaataaaatagcctgtctttcagatctcaaaggctcttttcagagccaccaaaaaaaaaaaaaaaaaaaaaaaaaaaaaaaaaaaaaaaaaaaaaaaaaaaaaaaaaaaaaaaaaaaaaaaaaaaaaaaaaaaaaaaaaaaaaaaaaaaaa

SEQ ID NO: 3791 - RNA, 1586 nt, synthetic construct
  misc_feature 1..1586: note = mRNA a-1 (hSL-A100) (wt) from Homo sapiens__NP_000448.3__HNF4A(39-474)
  source 1..1586: mol_type = other RNA
aggagagtcccgcagtcggcgtccagcggctctgcttgttcgtgtgtgtgtcgttgcaggccttattcaagcttaccatggacacgtccccatcagaaggcaccaacctcaacgcgcccaacagcctgggtgtcagcgccctgtgtgccatctgcggggaccgggccacgggcaaacactacggtgcctcgagctgtgacggctgcaagggcttcttccggaggagcgtgcggaagaaccacatgtactcctgcagatttagccggcagtgcgtggtggacaaagacaagaggaaccagtgccgctactgcaggctcaagaaatgcttccgggctggcatgaagaaggaagccgtccagaatgagcgggaccggatcagcactcgaaggtcaagctatgaggacagcagcctgccctccatcaatgcgctcctgcaggcggaggtcctgtcccgacagatcacctcccccgtctccgggatcaacggcgacattcgggcgaagaagattgccagcatcgcagatgtgtgtgagtccatgaaggagcagctgctggttctcgttgagtgggccaagtacatcccagctttctgcgagctccccctggacgaccaggtggccctgctcagagcccatgctggcgagcacctgctgctcggagccaccaagagatccatggtgttcaaggacgtgctgctcctaggcaatgactacattgtccctcggcactgcccggagctggcggagatgagccgggtgtccatacgcatccttgacgagctggtgctgcccttccaggagctgcagatcgatgacaatgagtatgcctacctcaaagccatcatcttctttgacccagatgccaaggggctgagcgatccagggaagatcaagcggctgcgttcccaggtgcaggtgagcttggaggactacatcaacgaccgccagtatgactcgcgtggccgctttggagagctgctgctgctgctgcccaccttgcagagcatcacctggcagatgatcgagcagatccagttcatcaagctcttcggcatggccaagattgacaacctgttgcaggagatgctgctgggagggtcccccagcgatgcaccccatgcccaccaccccctgcaccctcacctgatgcaggaacatatgggaaccaacgtcatcgttgccaacacaatgcccactcacctcagcaacggacagatgtgtgagtggccccgacccaggggacaggcagccacccctgagaccccacagccctcaccgccaggtggctcagggtctgagccctataagctcctgccgggagccgtcgccacaatcgtcaagcccctctctgccatcccccagccgaccatcaccaagcaggaagttatctagggactagtccctgttcccagagcccacttttttttctttttttgaaataaaatagcctgtctttcagatctcaaaggctcttttcagagccaccaaaaaaaaaaaaaaaaaaaaaaaaaaaaaaaaaaaaaaaaaaaaaaaaaaaaaaaaaaaaaaaaaaaaaaaaaaaaaaaaaaaaaaaaaaaaaaaaaaaaa

SEQ ID NO: 3792 - RNA, 1586 nt, synthetic construct
  misc_feature 1..1586: note = mRNA a-1 (hSL-A100) (wt mod) from Homo sapiens__NP_000448.3__HNF4A(39-474)
  source 1..1586: mol_type = other RNA
aggagagtcccgcagtcggcgtccagcggctctgcttgttcgtgtgtgtgtcgttgcaggccttattcaagcttaccatggacacgtccccatcagaaggcaccaacctcaacgcgcccaacagcctgggtgtgagcgccctgtgtgccatctgcggggaccgggccacgggcaaacactacggtgcctcgagctgtgacggctgcaagggcttcttccggaggagcgtgcggaagaaccacatgtactcctgcagatttagccggcagtgcgtggtggacaaagacaagaggaaccagtgccgctactgcaggctcaagaaatgcttccgggctggcatgaagaaggaagccgtccagaatgagcgggaccggatcagcactcgaaggtcaagctatgaggacagcagcctgccctccatcaatgcgctcctgcaggcggaggtcctgtcccgacagatcacctcccccgtctccgggatcaacggcgacattcgggcgaagaagattgccagcatcgcagatgtgtgtgagtccatgaaggagcagctgctggttctcgttgagtgggccaagtacatcccagctttctgcgagctccccctggacgaccaggtggccctgctcagagcccatgctggcgagcacctcctgctcggagccaccaagagatccatggtgttcaaggacgtgctgctcctaggcaatgactacattgtccctcggcactgcccggagctggcggagatgagccgggtgtccatacgcatccttgacgagctggtgctgcccttccaggagctgcagatcgatgacaatgagtatgcctacctcaaagccatcatcttctttgacccagatgccaaggggctgagcgatccagggaagatcaagcggctgcgttcccaggtccaggtgagcttggaggactacatcaacgaccgccagtatgactcgcgtggccgctttggagagctgctgctgctgctgcccaccttgcagagcatcacctggcagatgatcgagcagatccagttcatcaagctgttcggcatggccaagattgacaacctgttgcaggagatgctgctgggagggtcccccagcgatgcaccccatgcccaccaccccctgcaccctcacctgatgcaggaacatatgggaaccaacgtgatcgttgccaacacaatgcccactcacctcagcaacggacagatgtgtgagtggccccgacccaggggacaggcagccacccctgagaccccacagccctcaccgccaggtggctcagggtctgagccctataagctcctgccgggagccgtcgccacaatcgtcaagcccctctctgccatcccccagccgaccatcaccaagcaggaagttatctgaggactagtccctgttcccagagcccacttttttttctttttttgaaataaaatagcctgtctttcagatctcaaaggctcttttcagagccaccaaaaaaaaaaaaaaaaaaaaaaaaaaaaaaaaaaaaaaaaaaaaaaaaaaaaaaaaaaaaaaaaaaaaaaaaaaaaaaaaaaaaaaaaaaaaaaaaaaaaa

SEQ ID NO: 3793 - RNA, 1586 nt, synthetic construct
  misc_feature 1..1586: note = mRNA a-1 (hSL-A100) (opt1) from Homo sapiens__NP_000448.3__HNF4A(39-474)
  source 1..1586: mol_type = other RNA
aggagagtcccgcagtcggcgtccagcggctctgcttgttcgtgtgtgtgtcgttgcaggccttattcaagcttaccatggacaccagcccgtccgaggggaccaacctgaacgcccccaacagcctgggcgtgtccgccctctgcgccatctgcggggaccgggcgacgggcaagcactacggggccagctcctgcgacggctgcaagggcttcttccgccggagcgtccgcaagaaccacatgtactcctgccggttcagccgccagtgcgtggtggacaaggacaagcggaaccagtgccgctactgccggctgaagaagtgcttccgcgccgggatgaagaaggaggccgtccagaacgagcgggaccgcatctccacccggcgcagctcctacgaggacagctccctgcccagcatcaacgcgctcctgcaggccgaggtgctgtcccggcagatcaccagccccgtgtccggcatcaacggggacatccgcgccaagaagatcgccagcatcgccgacgtctgcgagagcatgaaggagcagctcctggtgctggtggagtgggcgaagtacatcccggccttctgcgagctccccctggacgaccaggtcgccctgctccgggcccacgccggcgagcacctcctgctgggggcgaccaagcgctccatggtgttcaaggacgtgctgctgctcggcaacgactacatcgtcccccggcactgccccgagctggccgagatgagccgcgtgtccatccggatcctggacgagctcgtgctgccgttccaggagctgcagatcgacgacaacgagtacgcctacctcaaggccatcatcttcttcgaccccgacgccaagggcctgagcgaccccgggaagatcaagcgcctgcgctcccaggtccaggtgagcctcgaggactacatcaacgaccggcagtacgactcccgcggccggttcggggagctgctgctcctgctgcccacgctccagagcatcacctggcagatgatcgagcagatccagttcatcaagctgttcggcatggcgaagatcgacaacctgctccaggagatgctgctgggcgggtccccgagcgacgcgccccacgcccaccaccccctccacccccacctgatgcaggagcacatgggcaccaacgtgatcgtcgccaacaccatgccgacgcacctgtccaacgggcagatgtgcgagtggccccgcccccggggccaggccgccacccccgagaccccgcagcccagcccgcccgggggctccggcagcgagccctacaagctgctccccggggccgtggccaccatcgtgaagcccctgtccgccatcccccagccgacgatcaccaagcaggaggtcatctgaggactagtccctgttcccagagcccacttttttttctttttttgaaataaaatagcctgtctttcagatctcaaaggctcttttcagagccaccaaaaaaaaaaaaaaaaaaaaaaaaaaaaaaaaaaaaaaaaaaaaaaaaaaaaaaaaaaaaaaaaaaaaaaaaaaaaaaaaaaaaaaaaaaaaaaaaaaaaa

SEQ ID NO: 3794 - RNA, 1586 nt, synthetic construct
  misc_feature 1..1586: note = mRNA a-1 (hSL-A100) (opt1) from Homo sapiens__NP_000448.3__HNF4A(39-474)(S313A)
  source 1..1586: mol_type = other RNA
aggagagtcccgcagtcggcgtccagcggctctgcttgttcgtgtgtgtgtcgttgcaggccttattcaagcttaccatggacaccagcccgtccgaggggaccaacctgaacgcccccaacagcctgggcgtgtccgccctctgcgccatctgcggggaccgggcgacgggcaagcactacggggccagctcctgcgacggctgcaagggcttcttccgccggagcgtccgcaagaaccacatgtactcctgccggttcagccgccagtgcgtggtggacaaggacaagcggaaccagtgccgctactgccggctgaagaagtgcttccgcgccgggatgaagaaggaggccgtccagaacgagcgggaccgcatctccacccggcgcagctcctacgaggacagctccctgcccagcatcaacgcgctcctgcaggccgaggtgctgtcccggcagatcaccagccccgtgtccggcatcaacggggacatccgcgccaagaagatcgccagcatcgccgacgtctgcgagagcatgaaggagcagctcctggtgctggtggagtgggcgaagtacatcccggccttctgcgagctccccctggacgaccaggtcgccctgctccgggcccacgccggcgagcacctcctgctgggggcgaccaagcgctccatggtgttcaaggacgtgctgctgctcggcaacgactacatcgtcccccggcactgccccgagctggccgagatgagccgcgtgtccatccggatcctggacgagctcgtgctgccgttccaggagctgcagatcgacgacaacgagtacgcctacctcaaggccatcatcttcttcgaccccgacgccaagggcctgagcgaccccgggaagatcaagcgcctgcgcgcgcaggtccaggtgagcctcgaggactacatcaacgaccggcagtacgactcccgcggccggttcggggagctgctgctcctgctgcccacgctccagagcatcacctggcagatgatcgagcagatccagttcatcaagctgttcggcatggcgaagatcgacaacctgctccaggagatgctgctgggcgggtccccgagcgacgcgccccacgcccaccaccccctccacccccacctgatgcaggagcacatgggcaccaacgtgatcgtcgccaacaccatgccgacgcacctgtccaacgggcagatgtgcgagtggccccgcccccggggccaggccgccacccccgagaccccgcagcccagcccgcccgggggctccggcagcgagccctacaagctgctccccggggccgtggccaccatcgtgaagcccctgtccgccatcccccagccgacgatcaccaagcaggaggtcatctgaggactagtccctgttcccagagcccacttttttttctttttttgaaataaaatagcctgtctttcagatctcaaaggctcttttcagagccaccaaaaaaaaaaaaaaaaaaaaaaaaaaaaaaaaaaaaaaaaaaaaaaaaaaaaaaaaaaaaaaaaaaaaaaaaaaaaaaaaaaaaaaaaaaaaaaaaaaaaa

SEQ ID NO: 3795 - RNA, 1586 nt, synthetic construct
  misc_feature 1..1586: note = mRNA a-1 (hSL-A100) (opt1) from Homo sapiens__NP_000448.3__HNF4A(39-474)(S313E)
  source 1..1586: mol_type = other RNA
aggagagtcccgcagtcggcgtccagcggctctgcttgttcgtgtgtgtgtcgttgcaggccttattcaagcttaccatggacaccagcccgtccgaggggaccaacctgaacgcccccaacagcctgggcgtgtccgccctctgcgccatctgcggggaccgggcgacgggcaagcactacggggccagctcctgcgacggctgcaagggcttcttccgccggagcgtccgcaagaaccacatgtactcctgccggttcagccgccagtgcgtggtggacaaggacaagcggaaccagtgccgctactgccggctgaagaagtgcttccgcgccgggatgaagaaggaggccgtccagaacgagcgggaccgcatctccacccggcgcagctcctacgaggacagctccctgcccagcatcaacgcgctcctgcaggccgaggtgctgtcccggcagatcaccagccccgtgtccggcatcaacggggacatccgcgccaagaagatcgccagcatcgccgacgtctgcgagagcatgaaggagcagctcctggtgctggtggagtgggcgaagtacatcccggccttctgcgagctccccctggacgaccaggtcgccctgctccgggcccacgccggcgagcacctcctgctgggggcgaccaagcgctccatggtgttcaaggacgtgctgctgctcggcaacgactacatcgtcccccggcactgccccgagctggccgagatgagccgcgtgtccatccggatcctggacgagctcgtgctgccgttccaggagctgcagatcgacgacaacgagtacgcctacctcaaggccatcatcttcttcgaccccgacgccaagggcctgagcgaccccgggaagatcaagcgcctgcgcgagcaggtccaggtgagcctcgaggactacatcaacgaccggcagtacgactcccgcggccggttcggggagctgctgctcctgctgcccacgctccagagcatcacctggcagatgatcgagcagatccagttcatcaagctgttcggcatggcgaagatcgacaacctgctccaggagatgctgctgggcgggtccccgagcgacgcgccccacgcccaccaccccctccacccccacctgatgcaggagcacatgggcaccaacgtgatcgtcgccaacaccatgccgacgcacctgtccaacgggcagatgtgcgagtggccccgcccccggggccaggccgccacccccgagaccccgcagcccagcccgcccgggggctccggcagcgagccctacaagctgctccccggggccgtggccaccatcgtgaagcccctgtccgccatcccccagccgacgatcaccaagcaggaggtcatctgaggactagtccctgttcccagagcccacttttttttctttttttgaaataaaatagcctgtctttcagatctcaaaggctcttttcagagccaccaaaaaaaaaaaaaaaaaaaaaaaaaaaaaaaaaaaaaaaaaaaaaaaaaaaaaaaaaaaaaaaaaaaaaaaaaaaaaaaaaaaaaaaaaaaaaaaaaaaaa

SEQ ID NO: 3796 - RNA, 1586 nt, synthetic construct
  misc_feature 1..1586: note = mRNA a-1 (hSL-A100) (opt1) from Homo sapiens__NP_000448.3__HNF4A(39-474)(S142A_S143A)
  source 1..1586: mol_type = other RNA
aggagagtcccgcagtcggcgtccagcggctctgcttgttcgtgtgtgtgtcgttgcaggccttattcaagcttaccatggacaccagcccgtccgaggggaccaacctgaacgcccccaacagcctgggcgtgtccgccctctgcgccatctgcggggaccgggcgacgggcaagcactacggggccagctcctgcgacggctgcaagggcttcttccgccggagcgtccgcaagaaccacatgtactcctgccggttcagccgccagtgcgtggtggacaaggacaagcggaaccagtgccgctactgccggctgaagaagtgcttccgcgccgggatgaagaaggaggccgtccagaacgagcgggaccgcatctccacccggcgcgcggcctacgaggacagctccctgcccagcatcaacgcgctcctgcaggccgaggtgctgtcccggcagatcaccagccccgtgtccggcatcaacggggacatccgcgccaagaagatcgccagcatcgccgacgtctgcgagagcatgaaggagcagctcctggtgctggtggagtgggcgaagtacatcccggccttctgcgagctccccctggacgaccaggtcgccctgctccgggcccacgccggcgagcacctcctgctgggggcgaccaagcgctccatggtgttcaaggacgtgctgctgctcggcaacgactacatcgtcccccggcactgccccgagctggccgagatgagccgcgtgtccatccggatcctggacgagctcgtgctgccgttccaggagctgcagatcgacgacaacgagtacgcctacctcaaggccatcatcttcttcgaccccgacgccaagggcctgagcgaccccgggaagatcaagcgcctgcgctcccaggtccaggtgagcctcgaggactacatcaacgaccggcagtacgactcccgcggccggttcggggagctgctgctcctgctgcccacgctccagagcatcacctggcagatgatcgagcagatccagttcatcaagctgttcggcatggcgaagatcgacaacctgctccaggagatgctgctgggcgggtccccgagcgacgcgccccacgcccaccaccccctccacccccacctgatgcaggagcacatgggcaccaacgtgatcgtcgccaacaccatgccgacgcacctgtccaacgggcagatgtgcgagtggccccgcccccggggccaggccgccacccccgagaccccgcagcccagcccgcccgggggctccggcagcgagccctacaagctgctccccggggccgtggccaccatcgtgaagcccctgtccgccatcccccagccgacgatcaccaagcaggaggtcatctgaggactagtccctgttcccagagcccacttttttttctttttttgaaataaaatagcctgtctttcagatctcaaaggctcttttcagagccaccaaaaaaaaaaaaaaaaaaaaaaaaaaaaaaaaaaaaaaaaaaaaaaaaaaaaaaaaaaaaaaaaaaaaaaaaaaaaaaaaaaaaaaaaaaaaaaaaaaaaa

SEQ ID NO: 3797 - RNA, 1586 nt, synthetic construct
  misc_feature 1..1586: note = mRNA a-1 (hSL-A100) (opt1) from Homo sapiens__NP_000448.3__HNF4A(39-474)(S142E_S143E)
  source 1..1586: mol_type = other RNA
aggagagtcccgcagtcggcgtccagcggctctgcttgttcgtgtgtgtgtcgttgcaggccttattcaagcttaccatggacaccagcccgtccgaggggaccaacctgaacgcccccaacagcctgggcgtgtccgccctctgcgccatctgcggggaccgggcgacgggcaagcactacggggccagctcctgcgacggctgcaagggcttcttccgccggagcgtccgcaagaaccacatgtactcctgccggttcagccgccagtgcgtggtggacaaggacaagcggaaccagtgccgctactgccggctgaagaagtgcttccgcgccgggatgaagaaggaggccgtccagaacgagcgggaccgcatctccacccggcgcgaggagtacgaggacagctccctgcccagcatcaacgcgctcctgcaggccgaggtgctgtcccggcagatcaccagccccgtgtccggcatcaacggggacatccgcgccaagaagatcgccagcatcgccgacgtctgcgagagcatgaaggagcagctcctggtgctggtggagtgggcgaagtacatcccggccttctgcgagctccccctggacgaccaggtcgccctgctccgggcccacgccggcgagcacctcctgctgggggcgaccaagcgctccatggtgttcaaggacgtgctgctgctcggcaacgactacatcgtcccccggcactgccccgagctggccgagatgagccgcgtgtccatccggatcctggacgagctcgtgctgccgttccaggagctgcagatcgacgacaacgagtacgcctacctcaaggccatcatcttcttcgaccccgacgccaagggcctgagcgaccccgggaagatcaagcgcctgcgctcccaggtccaggtgagcctcgaggactacatcaacgaccggcagtacgactcccgcggccggttcggggagctgctgctcctgctgcccacgctccagagcatcacctggcagatgatcgagcagatccagttcatcaagctgttcggcatggcgaagatcgacaacctgctccaggagatgctgctgggcgggtccccgagcgacgcgccccacgcccaccaccccctccacccccacctgatgcaggagcacatgggcaccaacgtgatcgtcgccaacaccatgccgacgcacctgtccaacgggcagatgtgcgagtggccccgcccccggggccaggccgccacccccgagaccccgcagcccagcccgcccgggggctccggcagcgagccctacaagctgctccccggggccgtggccaccatcgtgaagcccctgtccgccatcccccagccgacgatcaccaagcaggaggtcatctgaggactagtccctgttcccagagcccacttttttttctttttttgaaataaaatagcctgtctttcagatctcaaaggctcttttcagagccaccaaaaaaaaaaaaaaaaaaaaaaaaaaaaaaaaaaaaaaaaaaaaaaaaaaaaaaaaaaaaaaaaaaaaaaaaaaaaaaaaaaaaaaaaaaaaaaaaaaaaa

SEQ ID NO: 3798 - RNA, 1586 nt, synthetic construct
  misc_feature 1..1586: note = mRNA a-1 (hSL-A100) (opt1) from Homo sapiens__NP_000448.3__HNF4A(39-474)(S143A)
  source 1..1586: mol_type = other RNA
aggagagtcccgcagtcggcgtccagcggctctgcttgttcgtgtgtgtgtcgttgcaggccttattcaagcttaccatggacaccagcccgtccgaggggaccaacctgaacgcccccaacagcctgggcgtgtccgccctctgcgccatctgcggggaccgggcgacgggcaagcactacggggccagctcctgcgacggctgcaagggcttcttccgccggagcgtccgcaagaaccacatgtactcctgccggttcagccgccagtgcgtggtggacaaggacaagcggaaccagtgccgctactgccggctgaagaagtgcttccgcgccgggatgaagaaggaggccgtccagaacgagcgggaccgcatctccacccggcgcagcgcgtacgaggacagctccctgcccagcatcaacgcgctcctgcaggccgaggtgctgtcccggcagatcaccagccccgtgtccggcatcaacggggacatccgcgccaagaagatcgccagcatcgccgacgtctgcgagagcatgaaggagcagctcctggtgctggtggagtgggcgaagtacatcccggccttctgcgagctccccctggacgaccaggtcgccctgctccgggcccacgccggcgagcacctcctgctgggggcgaccaagcgctccatggtgttcaaggacgtgctgctgctcggcaacgactacatcgtcccccggcactgccccgagctggccgagatgagccgcgtgtccatccggatcctggacgagctcgtgctgccgttccaggagctgcagatcgacgacaacgagtacgcctacctcaaggccatcatcttcttcgaccccgacgccaagggcctgagcgaccccgggaagatcaagcgcctgcgctcccaggtccaggtgagcctcgaggactacatcaacgaccggcagtacgactcccgcggccggttcggggagctgctgctcctgctgcccacgctccagagcatcacctggcagatgatcgagcagatccagttcatcaagctgttcggcatggcgaagatcgacaacctgctccaggagatgctgctgggcgggtccccgagcgacgcgccccacgcccaccaccccctccacccccacctgatgcaggagcacatgggcaccaacgtgatcgtcgccaacaccatgccgacgcacctgtccaacgggcagatgtgcgagtggccccgcccccggggccaggccgccacccccgagaccccgcagcccagcccgcccgggggctccggcagcgagccctacaagctgctccccggggccgtggccaccatcgtgaagcccctgtccgccatcccccagccgacgatcaccaagcaggaggtcatctgaggactagtccctgttcccagagcccacttttttttctttttttgaaataaaatagcctgtctttcagatctcaaaggctcttttcagagccaccaaaaaaaaaaaaaaaaaaaaaaaaaaaaaaaaaaaaaaaaaaaaaaaaaaaaaaaaaaaaaaaaaaaaaaaaaaaaaaaaaaaaaaaaaaaaaaaaaaaaa

SEQ ID NO: 3799 - RNA, 1586 nt, synthetic construct
  misc_feature 1..1586: note = mRNA a-1 (hSL-A100) (opt1) from Homo sapiens__NP_000448.3__HNF4A(39-474)(T166A)
  source 1..1586: mol_type = other RNA
aggagagtcccgcagtcggcgtccagcggctctgcttgttcgtgtgtgtgtcgttgcaggccttattcaagcttaccatggacaccagcccgtccgaggggaccaacctgaacgcccccaacagcctgggcgtgtccgccctctgcgccatctgcggggaccgggcgacgggcaagcactacggggccagctcctgcgacggctgcaagggcttcttccgccggagcgtccgcaagaaccacatgtactcctgccggttcagccgccagtgcgtggtggacaaggacaagcggaaccagtgccgctactgccggctgaagaagtgcttccgcgccgggatgaagaaggaggccgtccagaacgagcgggaccgcatctccacccggcgcagctcctacgaggacagctccctgcccagcatcaacgcgctcctgcaggccgaggtgctgtcccggcagatcgcgagccccgtgtccggcatcaacggggacatccgcgccaagaagatcgccagcatcgccgacgtctgcgagagcatgaaggagcagctcctggtgctggtggagtgggcgaagtacatcccggccttctgcgagctccccctggacgaccaggtcgccctgctccgggcccacgccggcgagcacctcctgctgggggcgaccaagcgctccatggtgttcaaggacgtgctgctgctcggcaacgactacatcgtcccccggcactgccccgagctggccgagatgagccgcgtgtccatccggatcctggacgagctcgtgctgccgttccaggagctgcagatcgacgacaacgagtacgcctacctcaaggccatcatcttcttcgaccccgacgccaagggcctgagcgaccccgggaagatcaagcgcctgcgctcccaggtccaggtgagcctcgaggactacatcaacgaccggcagtacgactcccgcggccggttcggggagctgctgctcctgctgcccacgctccagagcatcacctggcagatgatcgagcagatccagttcatcaagctgttcggcatggcgaagatcgacaacctgctccaggagatgctgctgggcgggtccccgagcgacgcgccccacgcccaccaccccctccacccccacctgatgcaggagcacatgggcaccaacgtgatcgtcgccaacaccatgccgacgcacctgtccaacgggcagatgtgcgagtggccccgcccccggggccaggccgccacccccgagaccccgcagcccagcccgcccgggggctccggcagcgagccctacaagctgctccccggggccgtggccaccatcgtgaagcccctgtccgccatcccccagccgacgatcaccaagcaggaggtcatctgaggactagtccctgttcccagagcccacttttttttctttttttgaaataaaatagcctgtctttcagatctcaaaggctcttttcagagccaccaaaaaaaaaaaaaaaaaaaaaaaaaaaaaaaaaaaaaaaaaaaaaaaaaaaaaaaaaaaaaaaaaaaaaaaaaaaaaaaaaaaaaaaaaaaaaaaaaaaaa

SEQ ID NO: 3800 - RNA, 1586 nt, synthetic construct
  misc_feature 1..1586: note = mRNA a-1 (hSL-A100) (opt1) from Homo sapiens__NP_000448.3__HNF4A(39-474)(S167E)
  source 1..1586: mol_type = other RNA
aggagagtcccgcagtcggcgtccagcggctctgcttgttcgtgtgtgtgtcgttgcaggccttattcaagcttaccatggacaccagcccgtccgaggggaccaacctgaacgcccccaacagcctgggcgtgtccgccctctgcgccatctgcggggaccgggcgacgggcaagcactacggggccagctcctgcgacggctgcaagggcttcttccgccggagcgtccgcaagaaccacatgtactcctgccggttcagccgccagtgcgtggtggacaaggacaagcggaaccagtgccgctactgccggctgaagaagtgcttccgcgccgggatgaagaaggaggccgtccagaacgagcgggaccgcatctccacccggcgcagctcctacgaggacagctccctgcccagcatcaacgcgctcctgcaggccgaggtgctgtcccggcagatcaccgagcccgtgtccggcatcaacggggacatccgcgccaagaagatcgccagcatcgccgacgtctgcgagagcatgaaggagcagctcctggtgctggtggagtgggcgaagtacatcccggccttctgcgagctccccctggacgaccaggtcgccctgctccgggcccacgccggcgagcacctcctgctgggggcgaccaagcgctccatggtgttcaaggacgtgctgctgctcggcaacgactacatcgtcccccggcactgccccgagctggccgagatgagccgcgtgtccatccggatcctggacgagctcgtgctgccgttccaggagctgcagatcgacgacaacgagtacgcctacctcaaggccatcatcttcttcgaccccgacgccaagggcctgagcgaccccgggaagatcaagcgcctgcgctcccaggtccaggtgagcctcgaggactacatcaacgaccggcagtacgactcccgcggccggttcggggagctgctgctcctgctgcccacgctccagagcatcacctggcagatgatcgagcagatccagttcatcaagctgttcggcatggcgaagatcgacaacctgctccaggagatgctgctgggcgggtccccgagcgacgcgccccacgcccaccaccccctccacccccacctgatgcaggagcacatgggcaccaacgtgatcgtcgccaacaccatgccgacgcacctgtccaacgggcagatgtgcgagtggccccgcccccggggccaggccgccacccccgagaccccgcagcccagcccgcccgggggctccggcagcgagccctacaagctgctccccggggccgtggccaccatcgtgaagcccctgtccgccatcccccagccgacgatcaccaagcaggaggtcatctgaggactagtccctgttcccagagcccacttttttttctttttttgaaataaaatagcctgtctttcagatctcaaaggctcttttcagagccaccaaaaaaaaaaaaaaaaaaaaaaaaaaaaaaaaaaaaaaaaaaaaaaaaaaaaaaaaaaaaaaaaaaaaaaaaaaaaaaaaaaaaaaaaaaaaaaaaaaaaa

SEQ ID NO: 3801 - RNA, 1586 nt, synthetic construct
  misc_feature 1..1586: note = mRNA a-1 (hSL-A100) (opt1) from Homo sapiens__NP_000448.3__HNF4A(39-474)(S167A)
  source 1..1586: mol_type = other RNA
aggagagtcccgcagtcggcgtccagcggctctgcttgttcgtgtgtgtgtcgttgcaggccttattcaagcttaccatggacaccagcccgtccgaggggaccaacctgaacgcccccaacagcctgggcgtgtccgccctctgcgccatctgcggggaccgggcgacgggcaagcactacggggccagctcctgcgacggctgcaagggcttcttccgccggagcgtccgcaagaaccacatgtactcctgccggttcagccgccagtgcgtggtggacaaggacaagcggaaccagtgccgctactgccggctgaagaagtgcttccgcgccgggatgaagaaggaggccgtccagaacgagcgggaccgcatctccacccggcgcagctcctacgaggacagctccctgcccagcatcaacgcgctcctgcaggccgaggtgctgtcccggcagatcaccgcgcccgtgtccggcatcaacggggacatccgcgccaagaagatcgccagcatcgccgacgtctgcgagagcatgaaggagcagctcctggtgctggtggagtgggcgaagtacatcccggccttctgcgagctccccctggacgaccaggtcgccctgctccgggcccacgccggcgagcacctcctgctgggggcgaccaagcgctccatggtgttcaaggacgtgctgctgctcggcaacgactacatcgtcccccggcactgccccgagctggccgagatgagccgcgtgtccatccggatcctggacgagctcgtgctgccgttccaggagctgcagatcgacgacaacgagtacgcctacctcaaggccatcatcttcttcgaccccgacgccaagggcctgagcgaccccgggaagatcaagcgcctgcgctcccaggtccaggtgagcctcgaggactacatcaacgaccggcagtacgactcccgcggccggttcggggagctgctgctcctgctgcccacgctccagagcatcacctggcagatgatcgagcagatccagttcatcaagctgttcggcatggcgaagatcgacaacctgctccaggagatgctgctgggcgggtccccgagcgacgcgccccacgcccaccaccccctccacccccacctgatgcaggagcacatgggcaccaacgtgatcgtcgccaacaccatgccgacgcacctgtccaacgggcagatgtgcgagtggccccgcccccggggccaggccgccacccccgagaccccgcagcccagcccgcccgggggctccggcagcgagccctacaagctgctccccggggccgtggccaccatcgtgaagcccctgtccgccatcccccagccgacgatcaccaagcaggaggtcatctgaggactagtccctgttcccagagcccacttttttttctttttttgaaataaaatagcctgtctttcagatctcaaaggctcttttcagagccaccaaaaaaaaaaaaaaaaaaaaaaaaaaaaaaaaaaaaaaaaaaaaaaaaaaaaaaaaaaaaaaaaaaaaaaaaaaaaaaaaaaaaaaaaaaaaaaaaaaaaa

SEQ ID NO: 3802 - RNA, 1586 nt, synthetic construct
  misc_feature 1..1586: note = mRNA a-1 (hSL-A100) (opt1) from Homo sapiens__NP_000448.3__HNF4A(39-474)(S167A_S378A_T429A_T432A _S436A)
  source 1..1586: mol_type = other RNA
aggagagtcccgcagtcggcgtccagcggctctgcttgttcgtgtgtgtgtcgttgcaggccttattcaagcttaccatggacaccagcccgtccgaggggaccaacctgaacgcccccaacagcctgggcgtgtccgccctctgcgccatctgcggggaccgggcgacgggcaagcactacggggccagctcctgcgacggctgcaagggcttcttccgccggagcgtccgcaagaaccacatgtactcctgccggttcagccgccagtgcgtggtggacaaggacaagcggaaccagtgccgctactgccggctgaagaagtgcttccgcgccgggatgaagaaggaggccgtccagaacgagcgggaccgcatctccacccggcgcagctcctacgaggacagctccctgcccagcatcaacgcgctcctgcaggccgaggtgctgtcccggcagatcaccgcgcccgtgtccggcatcaacggggacatccgcgccaagaagatcgccagcatcgccgacgtctgcgagagcatgaaggagcagctcctggtgctggtggagtgggcgaagtacatcccggccttctgcgagctccccctggacgaccaggtcgccctgctccgggcccacgccggcgagcacctcctgctgggggcgaccaagcgctccatggtgttcaaggacgtgctgctgctcggcaacgactacatcgtcccccggcactgccccgagctggccgagatgagccgcgtgtccatccggatcctggacgagctcgtgctgccgttccaggagctgcagatcgacgacaacgagtacgcctacctcaaggccatcatcttcttcgaccccgacgccaagggcctgagcgaccccgggaagatcaagcgcctgcgctcccaggtccaggtgagcctcgaggactacatcaacgaccggcagtacgactcccgcggccggttcggggagctgctgctcctgctgcccacgctccagagcatcacctggcagatgatcgagcagatccagttcatcaagctgttcggcatggcgaagatcgacaacctgctccaggagatgctgctgggcggggcgccgagcgacgcgccccacgcccaccaccccctccacccccacctgatgcaggagcacatgggcaccaacgtgatcgtcgccaacaccatgccgacgcacctgtccaacgggcagatgtgcgagtggccccgcccccggggccaggccgccgcgcccgaggcgccgcagcccgcgccgcccgggggctccggcagcgagccctacaagctgctccccggggccgtggccaccatcgtgaagcccctgtccgccatcccccagccgacgatcaccaagcaggaggtcatctgaggactagtccctgttcccagagcccacttttttttctttttttgaaataaaatagcctgtctttcagatctcaaaggctcttttcagagccaccaaaaaaaaaaaaaaaaaaaaaaaaaaaaaaaaaaaaaaaaaaaaaaaaaaaaaaaaaaaaaaaaaaaaaaaaaaaaaaaaaaaaaaaaaaaaaaaaaaaaa

SEQ ID NO: 3803 - RNA, 1586 nt, synthetic construct
  misc_feature 1..1586: note = mRNA a-1 (hSL-A100) (opt1) from Homo sapiens__NP_000448.3__HNF4A(39-474)(S167E_S378E_T429E_T432E _S436E)
  source 1..1586: mol_type = other RNA
aggagagtcccgcagtcggcgtccagcggctctgcttgttcgtgtgtgtgtcgttgcaggccttattcaagcttaccatggacaccagcccgtccgaggggaccaacctgaacgcccccaacagcctgggcgtgtccgccctctgcgccatctgcggggaccgggcgacgggcaagcactacggggccagctcctgcgacggctgcaagggcttcttccgccggagcgtccgcaagaaccacatgtactcctgccggttcagccgccagtgcgtggtggacaaggacaagcggaaccagtgccgctactgccggctgaagaagtgcttccgcgccgggatgaagaaggaggccgtccagaacgagcgggaccgcatctccacccggcgcagctcctacgaggacagctccctgcccagcatcaacgcgctcctgcaggccgaggtgctgtcccggcagatcaccgagcccgtgtccggcatcaacggggacatccgcgccaagaagatcgccagcatcgccgacgtctgcgagagcatgaaggagcagctcctggtgctggtggagtgggcgaagtacatcccggccttctgcgagctccccctggacgaccaggtcgccctgctccgggcccacgccggcgagcacctcctgctgggggcgaccaagcgctccatggtgttcaaggacgtgctgctgctcggcaacgactacatcgtcccccggcactgccccgagctggccgagatgagccgcgtgtccatccggatcctggacgagctcgtgctgccgttccaggagctgcagatcgacgacaacgagtacgcctacctcaaggccatcatcttcttcgaccccgacgccaagggcctgagcgaccccgggaagatcaagcgcctgcgctcccaggtccaggtgagcctcgaggactacatcaacgaccggcagtacgactcccgcggccggttcggggagctgctgctcctgctgcccacgctccagagcatcacctggcagatgatcgagcagatccagttcatcaagctgttcggcatggcgaagatcgacaacctgctccaggagatgctgctgggcggggagccgagcgacgcgccccacgcccaccaccccctccacccccacctgatgcaggagcacatgggcaccaacgtgatcgtcgccaacaccatgccgacgcacctgtccaacgggcagatgtgcgagtggccccgcccccggggccaggccgccgagcccgaggagccgcagcccgagccgcccgggggctccggcagcgagccctacaagctgctccccggggccgtggccaccatcgtgaagcccctgtccgccatcccccagccgacgatcaccaagcaggaggtcatctgaggactagtccctgttcccagagcccacttttttttctttttttgaaataaaatagcctgtctttcagatctcaaaggctcttttcagagccaccaaaaaaaaaaaaaaaaaaaaaaaaaaaaaaaaaaaaaaaaaaaaaaaaaaaaaaaaaaaaaaaaaaaaaaaaaaaaaaaaaaaaaaaaaaaaaaaaaaaaa

SEQ ID NO: 3804 - RNA, 1586 nt, synthetic construct
  misc_feature 1..1586: note = mRNA a-1 (hSL-A100) (opt1) from Homo sapiens__NP_000448.3__HNF4A(39-474)(S87A)
  source 1..1586: mol_type = other RNA
aggagagtcccgcagtcggcgtccagcggctctgcttgttcgtgtgtgtgtcgttgcaggccttattcaagcttaccatggacaccagcccgtccgaggggaccaacctgaacgcccccaacagcctgggcgtgtccgccctctgcgccatctgcggggaccgggcgacgggcaagcactacggggccagctcctgcgacggctgcaagggcttcttccgccgggcggtccgcaagaaccacatgtactcctgccggttcagccgccagtgcgtggtggacaaggacaagcggaaccagtgccgctactgccggctgaagaagtgcttccgcgccgggatgaagaaggaggccgtccagaacgagcgggaccgcatctccacccggcgcagctcctacgaggacagctccctgcccagcatcaacgcgctcctgcaggccgaggtgctgtcccggcagatcaccagccccgtgtccggcatcaacggggacatccgcgccaagaagatcgccagcatcgccgacgtctgcgagagcatgaaggagcagctcctggtgctggtggagtgggcgaagtacatcccggccttctgcgagctccccctggacgaccaggtcgccctgctccgggcccacgccggcgagcacctcctgctgggggcgaccaagcgctccatggtgttcaaggacgtgctgctgctcggcaacgactacatcgtcccccggcactgccccgagctggccgagatgagccgcgtgtccatccggatcctggacgagctcgtgctgccgttccaggagctgcagatcgacgacaacgagtacgcctacctcaaggccatcatcttcttcgaccccgacgccaagggcctgagcgaccccgggaagatcaagcgcctgcgctcccaggtccaggtgagcctcgaggactacatcaacgaccggcagtacgactcccgcggccggttcggggagctgctgctcctgctgcccacgctccagagcatcacctggcagatgatcgagcagatccagttcatcaagctgttcggcatggcgaagatcgacaacctgctccaggagatgctgctgggcgggtccccgagcgacgcgccccacgcccaccaccccctccacccccacctgatgcaggagcacatgggcaccaacgtgatcgtcgccaacaccatgccgacgcacctgtccaacgggcagatgtgcgagtggccccgcccccggggccaggccgccacccccgagaccccgcagcccagcccgcccgggggctccggcagcgagccctacaagctgctccccggggccgtggccaccatcgtgaagcccctgtccgccatcccccagccgacgatcaccaagcaggaggtcatctgaggactagtccctgttcccagagcccacttttttttctttttttgaaataaaatagcctgtctttcagatctcaaaggctcttttcagagccaccaaaaaaaaaaaaaaaaaaaaaaaaaaaaaaaaaaaaaaaaaaaaaaaaaaaaaaaaaaaaaaaaaaaaaaaaaaaaaaaaaaaaaaaaaaaaaaaaaaaaa

SEQ ID NO: 3805 - RNA, 1586 nt, synthetic construct
  misc_feature 1..1586: note = mRNA a-1 (hSL-A100) (opt1) from Homo sapiens__NP_000448.3__HNF4A(39-474)(S87E)
  source 1..1586: mol_type = other RNA
aggagagtcccgcagtcggcgtccagcggctctgcttgttcgtgtgtgtgtcgttgcaggccttattcaagcttaccatggacaccagcccgtccgaggggaccaacctgaacgcccccaacagcctgggcgtgtccgccctctgcgccatctgcggggaccgggcgacgggcaagcactacggggccagctcctgcgacggctgcaagggcttcttccgccgggaggtccgcaagaaccacatgtactcctgccggttcagccgccagtgcgtggtggacaaggacaagcggaaccagtgccgctactgccggctgaagaagtgcttccgcgccgggatgaagaaggaggccgtccagaacgagcgggaccgcatctccacccggcgcagctcctacgaggacagctccctgcccagcatcaacgcgctcctgcaggccgaggtgctgtcccggcagatcaccagccccgtgtccggcatcaacggggacatccgcgccaagaagatcgccagcatcgccgacgtctgcgagagcatgaaggagcagctcctggtgctggtggagtgggcgaagtacatcccggccttctgcgagctccccctggacgaccaggtcgccctgctccgggcccacgccggcgagcacctcctgctgggggcgaccaagcgctccatggtgttcaaggacgtgctgctgctcggcaacgactacatcgtcccccggcactgccccgagctggccgagatgagccgcgtgtccatccggatcctggacgagctcgtgctgccgttccaggagctgcagatcgacgacaacgagtacgcctacctcaaggccatcatcttcttcgaccccgacgccaagggcctgagcgaccccgggaagatcaagcgcctgcgctcccaggtccaggtgagcctcgaggactacatcaacgaccggcagtacgactcccgcggccggttcggggagctgctgctcctgctgcccacgctccagagcatcacctggcagatgatcgagcagatccagttcatcaagctgttcggcatggcgaagatcgacaacctgctccaggagatgctgctgggcgggtccccgagcgacgcgccccacgcccaccaccccctccacccccacctgatgcaggagcacatgggcaccaacgtgatcgtcgccaacaccatgccgacgcacctgtccaacgggcagatgtgcgagtggccccgcccccggggccaggccgccacccccgagaccccgcagcccagcccgcccgggggctccggcagcgagccctacaagctgctccccggggccgtggccaccatcgtgaagcccctgtccgccatcccccagccgacgatcaccaagcaggaggtcatctgaggactagtccctgttcccagagcccacttttttttctttttttgaaataaaatagcctgtctttcagatctcaaaggctcttttcagagccaccaaaaaaaaaaaaaaaaaaaaaaaaaaaaaaaaaaaaaaaaaaaaaaaaaaaaaaaaaaaaaaaaaaaaaaaaaaaaaaaaaaaaaaaaaaaaaaaaaaaaa

SEQ ID NO: 3806 - RNA, 1586 nt, synthetic construct; identical to SEQ ID NO: 3793
  misc_feature 1..1586: note = mRNA a-1 (hSL-A100) (opt1) from Homo sapiens__NP_000448.3__HNF4A(39-474)(R2V)
  source 1..1586: mol_type = other RNA

SEQ ID NO: 3807 - RNA, 1586 nt, synthetic construct; identical to SEQ ID NO: 3793
  misc_feature 1..1586: note = mRNA a-1 (hSL-A100) (opt1) from Homo sapiens__NP_000448.3__HNF4A(39-474)(R2V_K5V)
  source 1..1586: mol_type = other RNA

SEQ ID NO: 3808 - RNA, 1586 nt, synthetic construct
  misc_feature 1..1586: note = mRNA a-1 (hSL-A100) (opt1) from Homo sapiens__NP_000448.3__HNF4A(39-474)(K179R_K180R)
  source 1..1586: mol_type = other RNA
aggagagtcccgcagtcggcgtccagcggctctgcttgttcgtgtgtgtgtcgttgcaggccttattcaagcttaccatggacaccagcccgtccgaggggaccaacctgaacgcccccaacagcctgggcgtgtccgccctctgcgccatctgcggggaccgggcgacgggcaagcactacggggccagctcctgcgacggctgcaagggcttcttccgccggagcgtccgcaagaaccacatgtactcctgccggttcagccgccagtgcgtggtggacaaggacaagcggaaccagtgccgctactgccggctgaagaagtgcttccgcgccgggatgaagaaggaggccgtccagaacgagcgggaccgcatctccacccggcgcagctcctacgaggacagctccctgcccagcatcaacgcgctcctgcaggccgaggtgctgtcccggcagatcaccagccccgtgtccggcatcaacggggacatccgcgcccggcgcatcgccagcatcgccgacgtctgcgagagcatgaaggagcagctcctggtgctggtggagtgggcgaagtacatcccggccttctgcgagctccccctggacgaccaggtcgccctgctccgggcccacgccggcgagcacctcctgctgggggcgaccaagcgctccatggtgttcaaggacgtgctgctgctcggcaacgactacatcgtcccccggcactgccccgagctggccgagatgagccgcgtgtccatccggatcctggacgagctcgtgctgccgttccaggagctgcagatcgacgacaacgagtacgcctacctcaaggccatcatcttcttcgaccccgacgccaagggcctgagcgaccccgggaagatcaagcgcctgcgctcccaggtccaggtgagcctcgaggactacatcaacgaccggcagtacgactcccgcggccggttcggggagctgctgctcctgctgcccacgctccagagcatcacctggcagatgatcgagcagatccagttcatcaagctgttcggcatggcgaagatcgacaacctgctccaggagatgctgctgggcgggtccccgagcgacgcgccccacgcccaccaccccctccacccccacctgatgcaggagcacatgggcaccaacgtgatcgtcgccaacaccatgccgacgcacctgtccaacgggcagatgtgcgagtggccccgcccccggggccaggccgccacccccgagaccccgcagcccagcccgcccgggggctccggcagcgagccctacaagctgctccccggggccgtggccaccatcgtgaagcccctgtccgccatcccccagccgacgatcaccaagcaggaggtcatctgaggactagtccctgttcccagagcccacttttttttctttttttgaaataaaatagcctgtctttcagatctcaaaggctcttttcagagccaccaaaaaaaaaaaaaaaaaaaaaaaaaaaaaaaaaaaaaaaaaaaaaaaaaaaaaaaaaaaaaaaaaaaaaaaaaaaaaaaaaaaaaaaaaaaaaaaaaaaaa

SEQ ID NO: 3809 - RNA, 1586 nt, synthetic construct
  misc_feature 1..1586: note = mRNA a-1 (hSL-A100) (opt1) from Homo sapiens__NP_000448.3__HNF4A(39-474)(K234R)
  source 1..1586: mol_type = other RNA
aggagagtcccgcagtcggcgtccagcggctctgcttgttcgtgtgtgtgtcgttgcaggccttattcaagcttaccatggacaccagcccgtccgaggggaccaacctgaacgcccccaacagcctgggcgtgtccgccctctgcgccatctgcggggaccgggcgacgggcaagcactacggggccagctcctgcgacggctgcaagggcttcttccgccggagcgtccgcaagaaccacatgtactcctgccggttcagccgccagtgcgtggtggacaaggacaagcggaaccagtgccgctactgccggctgaagaagtgcttccgcgccgggatgaagaaggaggccgtccagaacgagcgggaccgcatctccacccggcgcagctcctacgaggacagctccctgcccagcatcaacgcgctcctgcaggccgaggtgctgtcccggcagatcaccagccccgtgtccggcatcaacggggacatccgcgccaagaagatcgccagcatcgccgacgtctgcgagagcatgaaggagcagctcctggtgctggtggagtgggcgaagtacatcccggccttctgcgagctccccctggacgaccaggtcgccctgctccgggcccacgccggcgagcacctcctgctgggggcgacccgccgctccatggtgttcaaggacgtgctgctgctcggcaacgactacatcgtcccccggcactgccccgagctggccgagatgagccgcgtgtccatccggatcctggacgagctcgtgctgccgttccaggagctgcagatcgacgacaacgagtacgcctacctcaaggccatcatcttcttcgaccccgacgccaagggcctgagcgaccccgggaagatcaagcgcctgcgctcccaggtccaggtgagcctcgaggactacatcaacgaccggcagtacgactcccgcggccggttcggggagctgctgctcctgctgcccacgctccagagcatcacctggcagatgatcgagcagatccagttcatcaagctgttcggcatggcgaagatcgacaacctgctccaggagatgctgctgggcgggtccccgagcgacgcgccccacgcccaccaccccctccacccccacctgatgcaggagcacatgggcaccaacgtgatcgtcgccaacaccatgccgacgcacctgtccaacgggcagatgtgcgagtggccccgcccccggggccaggccgccacccccgagaccccgcagcccagcccgcccgggggctccggcagcgagccctacaagctgctccccggggccgtggccaccatcgtgaagcccctgtccgccatcccccagccgacgatcaccaagcaggaggtcatctgaggactagtccctgttcccagagcccacttttttttctttttttgaaataaaatagcctgtctttcagatctcaaaggctcttttcagagccaccaaaaaaaaaaaaaaaaaaaaaaaaaaaaaaaaaaaaaaaaaaaaaaaaaaaaaaaaaaaaaaaaaaaaaaaaaaaaaaaaaaaaaaaaaaaaaaaaaaaaa

SEQ ID NO: 3810 - RNA, 1586 nt, synthetic construct
  misc_feature 1..1586: note = mRNA a-1 (hSL-A100) (opt1) from Homo sapiens__NP_000448.3__HNF4A(39-474)(K300R)
  source 1..1586: mol_type = other RNA
aggagagtcccgcagtcggcgtccagcggctctgcttgttcgtgtgtgtgtcgttgcaggccttattcaagcttaccatggacaccagcccgtccgaggggaccaacctgaacgcccccaacagcctgggcgtgtccgccctctgcgccatctgcggggaccgggcgacgggcaagcactacggggccagctcctgcgacggctgcaagggcttcttccgccggagcgtccgcaagaaccacatgtactcctgccggttcagccgccagtgcgtggtggacaaggacaagcggaaccagtgccgctactgccggctgaagaagtgcttccgcgccgggatgaagaaggaggccgtccagaacgagcgggaccgcatctccacccggcgcagctcctacgaggacagctccctgcccagcatcaacgcgctcctgcaggccgaggtgctgtcccggcagatcaccagccccgtgtccggcatcaacggggacatccgcgccaagaagatcgccagcatcgccgacgtctgcgagagcatgaaggagcagctcctggtgctggtggagtgggcgaagtacatcccggccttctgcgagctccccctggacgaccaggtcgccctgctccgggcccacgccggcgagcacctcctgctgggggcgaccaagcgctccatggtgttcaaggacgtgctgctgctcggcaacgactacatcgtcccccggcactgccccgagctggccgagatgagccgcgtgtccatccggatcctggacgagctcgtgctgccgttccaggagctgcagatcgacgacaacgagtacgcctacctcaaggccatcatcttcttcgaccccgacgcccgcggcctgagcgaccccgggaagatcaagcgcctgcgctcccaggtccaggtgagcctcgaggactacatcaacgaccggcagtacgactcccgcggccggttcggggagctgctgctcctgctgcccacgctccagagcatcacctggcagatgatcgagcagatccagttcatcaagctgttcggcatggcgaagatcgacaacctgctccaggagatgctgctgggcgggtccccgagcgacgcgccccacgcccaccaccccctccacccccacctgatgcaggagcacatgggcaccaacgtgatcgtcgccaacaccatgccgacgcacctgtccaacgggcagatgtgcgagtggccccgcccccggggccaggccgccacccccgagaccccgcagcccagcccgcccgggggctccggcagcgagccctacaagctgctccccggggccgtggccaccatcgtgaagcccctgtccgccatcccccagccgacgatcaccaagcaggaggtcatctgaggactagtccctgttcccagagcccacttttttttctttttttgaaataaaatagcctgtctttcagatctcaaaggctcttttcagagccaccaaaaaaaaaaaaaaaaaaaaaaaaaaaaaaaaaaaaaaaaaaaaaaaaaaaaaaaaaaaaaaaaaaaaaaaaaaaaaaaaaaaaaaaaaaaaaaaaaaaaa

SEQ ID NO: 3811 - RNA, 1586 nt, synthetic construct
  misc_feature 1..1586: note = mRNA a-1 (hSL-A100) (opt1) from Homo sapiens__NP_000448.3__HNF4A(39-474)(K300R_K307R_K309R)
  source 1..1586: mol_type = other RNA
aggagagtcccgcagtcggcgtccagcggctctgcttgttcgtgtgtgtgtcgttgcaggccttattcaagcttaccatggacaccagcccgtccgaggggaccaacctgaacgcccccaacagcctgggcgtgtccgccctctgcgccatctgcggggaccgggcgacgggcaagcactacggggccagctcctgcgacggctgcaagggcttcttccgccggagcgtccgcaagaaccacatgtactcctgccggttcagccgccagtgcgtggtggacaaggacaagcggaaccagtgccgctactgccggctgaagaagtgcttccgcgccgggatgaagaaggaggccgtccagaacgagcgggaccgcatctccacccggcgcagctcctacgaggacagctccctgcccagcatcaacgcgctcctgcaggccgaggtgctgtcccggcagatcaccagccccgtgtccggcatcaacggggacatccgcgccaagaagatcgccagcatcgccgacgtctgcgagagcatgaaggagcagctcctggtgctggtggagtgggcgaagtacatcccggccttctgcgagctccccctggacgaccaggtcgccctgctccgggcccacgccggcgagcacctcctgctgggggcgaccaagcgctccatggtgttcaaggacgtgctgctgctcggcaacgactacatcgtcccccggcactgccccgagctggccgagatgagccgcgtgtccatccggatcctggacgagctcgtgctgccgttccaggagctgcagatcgacgacaacgagtacgcctacctcaaggccatcatcttcttcgaccccgacgcccgcggcctgagcgaccccgggcgcatccggcgcctgcgctcccaggtccaggtgagcctcgaggactacatcaacgaccggcagtacgactcccgcggccggttcggggagctgctgctcctgctgcccacgctccagagcatcacctggcagatgatcgagcagatccagttcatcaagctgttcggcatggcgaagatcgacaacctgctccaggagatgctgctgggcgggtccccgagcgacgcgccccacgcccaccaccccctccacccccacctgatgcaggagcacatgggcaccaacgtgatcgtcgccaacaccatgccgacgcacctgtccaacgggcagatgtgcgagtggccccgcccccggggccaggccgccacccccgagaccccgcagcccagcccgcccgggggctccggcagcgagccctacaagctgctccccggggccgtggccaccatcgtgaagcccctgtccgccatcccccagccgacgatcaccaagcaggaggtcatctgaggactagtccctgttcccagagcccacttttttttctttttttgaaataaaatagcctgtctttcagatctcaaaggctcttttcagagccaccaaaaaaaaaaaaaaaaaaaaaaaaaaaaaaaaaaaaaaaaaaaaaaaaaaaaaaaaaaaaaaaaaaaaaaaaaaaaaaaaaaaaaaaaaaaaaaaaaaaaa

SEQ ID NO: 3812 - RNA, 1586 nt, synthetic construct
  misc_feature 1..1586: note = mRNA a-1 (hSL-A100) (opt1) from Homo sapiens__NP_000448.3__HNF4A(39-474)(K447R_K470R)
  source 1..1586: mol_type = other RNA
aggagagtcccgcagtcggcgtccagcggctctgcttgttcgtgtgtgtgtcgttgcaggccttattcaagcttaccatggacaccagcccgtccgaggggaccaacctgaacgcccccaacagcctgggcgtgtccgccctctgcgccatctgcggggaccgggcgacgggcaagcactacggggccagctcctgcgacggctgcaagggcttcttccgccggagcgtccgcaagaaccacatgtactcctgccggttcagccgccagtgcgtggtggacaaggacaagcggaaccagtgccgctactgccggctgaagaagtgcttccgcgccgggatgaagaaggaggccgtccagaacgagcgggaccgcatctccacccggcgcagctcctacgaggacagctccctgcccagcatcaacgcgctcctgcaggccgaggtgctgtcccggcagatcaccagccccgtgtccggcatcaacggggacatccgcgccaagaagatcgccagcatcgccgacgtctgcgagagcatgaaggagcagctcctggtgctggtggagtgggcgaagtacatcccggccttctgcgagctccccctggacgaccaggtcgccctgctccgggcccacgccggcgagcacctcctgctgggggcgaccaagcgctccatggtgttcaaggacgtgctgctgctcggcaacgactacatcgtcccccggcactgccccgagctggccgagatgagccgcgtgtccatccggatcctggacgagctcgtgctgccgttccaggagctgcagatcgacgacaacgagtacgcctacctcaaggccatcatcttcttcgaccccgacgccaagggcctgagcgaccccgggaagatcaagcgcctgcgctcccaggtccaggtgagcctcgaggactacatcaacgaccggcagtacgactcccgcggccggttcggggagctgctgctcctgctgcccacgctccagagcatcacctggcagatgatcgagcagatccagttcatcaagctgttcggcatggcgaagatcgacaacctgctccaggagatgctgctgggcgggtccccgagcgacgcgccccacgcccaccaccccctccacccccacctgatgcaggagcacatgggcaccaacgtgatcgtcgccaacaccatgccgacgcacctgtccaacgggcagatgtgcgagtggccccgcccccggggccaggccgccacccccgagaccccgcagcccagcccgcccgggggctccggcagcgagccctaccggctgctccccggggccgtggccaccatcgtgaagcccctgtccgccatcccccagccgacgatcacccggcaggaggtcatctgaggactagtccctgttcccagagcccacttttttttctttttttgaaataaaatagcctgtctttcagatctcaaaggctcttttcagagccaccaaaaaaaaaaaaaaaaaaaaaaaaaaaaaaaaaaaaaaaaaaaaaaaaaaaaaaaaaaaaaaaaaaaaaaaaaaaaaaaaaaaaaaaaaaaaaaaaaaaaa

SEQ ID NO: 3813 - RNA, 1586 nt, synthetic construct
  misc_feature 1..1586: note = mRNA a-1 (hSL-A100) (opt1) from Homo sapiens__NP_000448.3__HNF4A(39-474)(K458R)
  source 1..1586: mol_type = other RNA
aggagagtcccgcagtcggcgtccagcggctctgcttgttcgtgtgtgtgtcgttgcaggccttattcaagcttaccatggacaccagcccgtccgaggggaccaacctgaacgcccccaacagcctgggcgtgtccgccctctgcgccatctgcggggaccgggcgacgggcaagcactacggggccagctcctgcgacggctgcaagggcttcttccgccggagcgtccgcaagaaccacatgtactcctgccggttcagccgccagtgcgtggtggacaaggacaagcggaaccagtgccgctactgccggctgaagaagtgcttccgcgccgggatgaagaaggaggccgtccagaacgagcgggaccgcatctccacccggcgcagctcctacgaggacagctccctgcccagcatcaacgcgctcctgcaggccgaggtgctgtcccggcagatcaccagccccgtgtccggcatcaacggggacatccgcgccaagaagatcgccagcatcgccgacgtctgcgagagcatgaaggagcagctcctggtgctggtggagtgggcgaagtacatcccggccttctgcgagctccccctggacgaccaggtcgccctgctccgggcccacgccggcgagcacctcctgctgggggcgaccaagcgctccatggtgttcaaggacgtgctgctgctcggcaacgactacatcgtcccccggcactgccccgagctggccgagatgagccgcgtgtccatccggatcctggacgagctcgtgctgccgttccaggagctgcagatcgacgacaacgagtacgcctacctcaaggccatcatcttcttcgaccccgacgccaagggcctgagcgaccccgggaagatcaagcgcctgcgctcccaggtccaggtgagcctcgaggactacatcaacgaccggcagtacgactcccgcggccggttcggggagctgctgctcctgctgcccacgctccagagcatcacctggcagatgatcgagcagatccagttcatcaagctgttcggcatggcgaagatcgacaacctgctccaggagatgctgctgggcgggtccccgagcgacgcgccccacgcccaccaccccctccacccccacctgatgcaggagcacatgggcaccaacgtgatcgtcgccaacaccatgccgacgcacctgtccaacgggcagatgtgcgagtggccccgcccccggggccaggccgccacccccgagaccccgcagcccagcccgcccgggggctccggcagcgagccctacaagctgctccccggggccgtggccaccatcgtgcggcccctgtccgccatcccccagccgacgatcaccaagcaggaggtcatctgaggactagtccctgttcccagagcccacttttttttctttttttgaaataaaatagcctgtctttcagatctcaaaggctcttttcagagccaccaaaaaaaaaaaaaaaaaaaaaaaaaaaaaaaaaaaaaaaaaaaaaaaaaaaaaaaaaaaaaaaaaaaaaaaaaaaaaaaaaaaaaaaaaaaaaaaaaaaaa

SEQ ID NO: 3814 - RNA, 1586 nt, synthetic construct
  misc_feature 1..1586: note = mRNA a-1 (hSL-A100) (opt1) from Homo sapiens__NP_000448.3__HNF4A(39-474)(K106R_K108R_K126R_K127R )
  source 1..1586: mol_type = other RNA
aggagagtcccgcagtcggcgtccagcggctctgcttgttcgtgtgtgtgtcgttgcaggccttattcaagcttaccatggacaccagcccgtccgaggggaccaacctgaacgcccccaacagcctgggcgtgtccgccctctgcgccatctgcggggaccgggcgacgggcaagcactacggggccagctcctgcgacggctgcaagggcttcttccgccggagcgtccgcaagaaccacatgtactcctgccggttcagccgccagtgcgtggtggaccgcgaccggcggaaccagtgccgctactgccggctgaagaagtgcttccgcgccgggatgcgccgcgaggccgtccagaacgagcgggaccgcatctccacccggcgcagctcctacgaggacagctccctgcccagcatcaacgcgctcctgcaggccgaggtgctgtcccggcagatcaccagccccgtgtccggcatcaacggggacatccgcgccaagaagatcgccagcatcgccgacgtctgcgagagcatgaaggagcagctcctggtgctggtggagtgggcgaagtacatcccggccttctgcgagctccccctggacgaccaggtcgccctgctccgggcccacgccggcgagcacctcctgctgggggcgaccaagcgctccatggtgttcaaggacgtgctgctgctcggcaacgactacatcgtcccccggcactgccccgagctggccgagatgagccgcgtgtccatccggatcctggacgagctcgtgctgccgttccaggagctgcagatcgacgacaacgagtacgcctacctcaaggccatcatcttcttcgaccccgacgccaagggcctgagcgaccccgggaagatcaagcgcctgcgctcccaggtccaggtgagcctcgaggactacatcaacgaccggcagtacgactcccgcggccggttcggggagctgctgctcctgctgcccacgctccagagcatcacctggcagatgatcgagcagatccagttcatcaagctgttcggcatggcgaagatcgacaacctgctccaggagatgctgctgggcgggtccccgagcgacgcgccccacgcccaccaccccctccacccccacctgatgcaggagcacatgggcaccaacgtgatcgtcgccaacaccatgccgacgcacctgtccaacgggcagatgtgcgagtggccccgcccccggggccaggccgccacccccgagaccccgcagcccagcccgcccgggggctccggcagcgagccctacaagctgctccccggggccgtggccaccatcgtgaagcccctgtccgccatcccccagccgacgatcaccaagcaggaggtcatctgaggactagtccctgttcccagagcccacttttttttctttttttgaaataaaatagcctgtctttcagatctcaaaggctcttttcagagccaccaaaaaaaaaaaaaaaaaaaaaaaaaaaaaaaaaaaaaaaaaaaaaaaaaaaaaaaaaaaaaaaaaaaaaaaaaaaaaaaaaaaaaaaaaaaaaaaaaaaaa

SEQ ID NO: 3815 - RNA, 1586 nt, synthetic construct
  misc_feature 1..1586: note = mRNA a-1 (hSL-A100) (opt1) from Homo sapiens__NP_000448.3__HNF4A(39-474)(E285Q)
  source 1..1586: mol_type = other RNA
aggagagtcccgcagtcggcgtccagcggctctgcttgttcgtgtgtgtgtcgttgcaggccttattcaagcttaccatggacaccagcccgtccgaggggaccaacctgaacgcccccaacagcctgggcgtgtccgccctctgcgccatctgcggggaccgggcgacgggcaagcactacggggccagctcctgcgacggctgcaagggcttcttccgccggagcgtccgcaagaaccacatgtactcctgccggttcagccgccagtgcgtggtggacaaggacaagcggaaccagtgccgctactgccggctgaagaagtgcttccgcgccgggatgaagaaggaggccgtccagaacgagcgggaccgcatctccacccggcgcagctcctacgaggacagctccctgcccagcatcaacgcgctcctgcaggccgaggtgctgtcccggcagatcaccagccccgtgtccggcatcaacggggacatccgcgccaagaagatcgccagcatcgccgacgtctgcgagagcatgaaggagcagctcctggtgctggtggagtgggcgaagtacatcccggccttctgcgagctccccctggacgaccaggtcgccctgctccgggcccacgccggcgagcacctcctgctgggggcgaccaagcgctccatggtgttcaaggacgtgctgctgctcggcaacgactacatcgtcccccggcactgccccgagctggccgagatgagccgcgtgtccatccggatcctggacgagctcgtgctgccgttccaggagctgcagatcgacgacaaccagtacgcctacctcaaggccatcatcttcttcgaccccgacgccaagggcctgagcgaccccgggaagatcaagcgcctgcgctcccaggtccaggtgagcctcgaggactacatcaacgaccggcagtacgactcccgcggccggttcggggagctgctgctcctgctgcccacgctccagagcatcacctggcagatgatcgagcagatccagttcatcaagctgttcggcatggcgaagatcgacaacctgctccaggagatgctgctgggcgggtccccgagcgacgcgccccacgcccaccaccccctccacccccacctgatgcaggagcacatgggcaccaacgtgatcgtcgccaacaccatgccgacgcacctgtccaacgggcagatgtgcgagtggccccgcccccggggccaggccgccacccccgagaccccgcagcccagcccgcccgggggctccggcagcgagccctacaagctgctccccggggccgtggccaccatcgtgaagcccctgtccgccatcccccagccgacgatcaccaagcaggaggtcatctgaggactagtccctgttcccagagcccacttttttttctttttttgaaataaaatagcctgtctttcagatctcaaaggctcttttcagagccaccaaaaaaaaaaaaaaaaaaaaaaaaaaaaaaaaaaaaaaaaaaaaaaaaaaaaaaaaaaaaaaaaaaaaaaaaaaaaaaaaaaaaaaaaaaaaaaaaaaaaa

SEQ ID NO: 3816 - RNA, 1586 nt, synthetic construct
  misc_feature 1..1586: note = mRNA a-1 (hSL-A100) (opt1) from Homo sapiens__NP_000448.3__HNF4A(39-474)(T166E)
  source 1..1586: mol_type = other RNA
aggagagtcccgcagtcggcgtccagcggctctgcttgttcgtgtgtgtgtcgttgcaggccttattcaagcttaccatggacaccagcccgtccgaggggaccaacctgaacgcccccaacagcctgggcgtgtccgccctctgcgccatctgcggggaccgggcgacgggcaagcactacggggccagctcctgcgacggctgcaagggcttcttccgccggagcgtccgcaagaaccacatgtactcctgccggttcagccgccagtgcgtggtggacaaggacaagcggaaccagtgccgctactgccggctgaagaagtgcttccgcgccgggatgaagaaggaggccgtccagaacgagcgggaccgcatctccacccggcgcagctcctacgaggacagctccctgcccagcatcaacgcgctcctgcaggccgaggtgctgtcccggcagatcgagagccccgtgtccggcatcaacggggacatccgcgccaagaagatcgccagcatcgccgacgtctgcgagagcatgaaggagcagctcctggtgctggtggagtgggcgaagtacatcccggccttctgcgagctccccctggacgaccaggtcgccctgctccgggcccacgccggcgagcacctcctgctgggggcgaccaagcgctccatggtgttcaaggacgtgctgctgctcggcaacgactacatcgtcccccggcactgccccgagctggccgagatgagccgcgtgtccatccggatcctggacgagctcgtgctgccgttccaggagctgcagatcgacgacaacgagtacgcctacctcaaggccatcatcttcttcgaccccgacgccaagggcctgagcgaccccgggaagatcaagcgcctgcgctcccaggtccaggtgagcctcgaggactacatcaacgaccggcagtacgactcccgcggccggttcggggagctgctgctcctgctgcccacgctccagagcatcacctggcagatgatcgagcagatccagttcatcaagctgttcggcatggcgaagatcgacaacctgctccaggagatgctgctgggcgggtccccgagcgacgcgccccacgcccaccaccccctccacccccacctgatgcaggagcacatgggcaccaacgtgatcgtcgccaacaccatgccgacgcacctgtccaacgggcagatgtgcgagtggccccgcccccggggccaggccgccacccccgagaccccgcagcccagcccgcccgggggctccggcagcgagccctacaagctgctccccggggccgtggccaccatcgtgaagcccctgtccgccatcccccagccgacgatcaccaagcaggaggtcatctgaggactagtccctgttcccagagcccacttttttttctttttttgaaataaaatagcctgtctttcagatctcaaaggctcttttcagagccaccaaaaaaaaaaaaaaaaaaaaaaaaaaaaaaaaaaaaaaaaaaaaaaaaaaaaaaaaaaaaaaaaaaaaaaaaaaaaaaaaaaaaaaaaaaaaaaaaaaaaa

SEQ ID NO: 3817 - RNA, 1586 nt, synthetic construct
  misc_feature 1..1586: note = mRNA a-1 (hSL-A100) (opt1) from Homo sapiens__NP_000448.3__HNF4A(39-474)(S148A)
  source 1..1586: mol_type = other RNA
aggagagtcccgcagtcggcgtccagcggctctgcttgttcgtgtgtgtgtcgttgcaggccttattcaagcttaccatggacaccagcccgtccgaggggaccaacctgaacgcccccaacagcctgggcgtgtccgccctctgcgccatctgcggggaccgggcgacgggcaagcactacggggccagctcctgcgacggctgcaagggcttcttccgccggagcgtccgcaagaaccacatgtactcctgccggttcagccgccagtgcgtggtggacaaggacaagcggaaccagtgccgctactgccggctgaagaagtgcttccgcgccgggatgaagaaggaggccgtccagaacgagcgggaccgcatctccacccggcgcagctcctacgaggacagcgcgctgcccagcatcaacgcgctcctgcaggccgaggtgctgtcccggcagatcaccagccccgtgtccggcatcaacggggacatccgcgccaagaagatcgccagcatcgccgacgtctgcgagagcatgaaggagcagctcctggtgctggtggagtgggcgaagtacatcccggccttctgcgagctccccctggacgaccaggtcgccctgctccgggcccacgccggcgagcacctcctgctgggggcgaccaagcgctccatggtgttcaaggacgtgctgctgctcggcaacgactacatcgtcccccggcactgccccgagctggccgagatgagccgcgtgtccatccggatcctggacgagctcgtgctgccgttccaggagctgcagatcgacgacaacgagtacgcctacctcaaggccatcatcttcttcgaccccgacgccaagggcctgagcgaccccgggaagatcaagcgcctgcgctcccaggtccaggtgagcctcgaggactacatcaacgaccggcagtacgactcccgcggccggttcggggagctgctgctcctgctgcccacgctccagagcatcacctggcagatgatcgagcagatccagttcatcaagctgttcggcatggcgaagatcgacaacctgctccaggagatgctgctgggcgggtccccgagcgacgcgccccacgcccaccaccccctccacccccacctgatgcaggagcacatgggcaccaacgtgatcgtcgccaacaccatgccgacgcacctgtccaacgggcagatgtgcgagtggccccgcccccggggccaggccgccacccccgagaccccgcagcccagcccgcccgggggctccggcagcgagccctacaagctgctccccggggccgtggccaccatcgtgaagcccctgtccgccatcccccagccgacgatcaccaagcaggaggtcatctgaggactagtccctgttcccagagcccacttttttttctttttttgaaataaaatagcctgtctttcagatctcaaaggctcttttcagagccaccaaaaaaaaaaaaaaaaaaaaaaaaaaaaaaaaaaaaaaaaaaaaaaaaaaaaaaaaaaaaaaaaaaaaaaaaaaaaaaaaaaaaaaaaaaaaaaaaaaaaa

SEQ ID NO: 3818 - RNA, 1586 nt, synthetic construct
  misc_feature 1..1586: note = mRNA a-1 (hSL-A100) (opt1) from Homo sapiens__NP_000448.3__HNF4A(39-474)(S148E)
  source 1..1586: mol_type = other RNA
aggagagtcccgcagtcggcgtccagcggctctgcttgttcgtgtgtgtgtcgttgcaggccttattcaagcttaccatggacaccagcccgtccgaggggaccaacctgaacgcccccaacagcctgggcgtgtccgccctctgcgccatctgcggggaccgggcgacgggcaagcactacggggccagctcctgcgacggctgcaagggcttcttccgccggagcgtccgcaagaaccacatgtactcctgccggttcagccgccagtgcgtggtggacaaggacaagcggaaccagtgccgctactgccggctgaagaagtgcttccgcgccgggatgaagaaggaggccgtccagaacgagcgggaccgcatctccacccggcgcagctcctacgaggacagcgagctgcccagcatcaacgcgctcctgcaggccgaggtgctgtcccggcagatcaccagccccgtgtccggcatcaacggggacatccgcgccaagaagatcgccagcatcgccgacgtctgcgagagcatgaaggagcagctcctggtgctggtggagtgggcgaagtacatcccggccttctgcgagctccccctggacgaccaggtcgccctgctccgggcccacgccggcgagcacctcctgctgggggcgaccaagcgctccatggtgttcaaggacgtgctgctgctcggcaacgactacatcgtcccccggcactgccccgagctggccgagatgagccgcgtgtccatccggatcctggacgagctcgtgctgccgttccaggagctgcagatcgacgacaacgagtacgcctacctcaaggccatcatcttcttcgaccccgacgccaagggcctgagcgaccccgggaagatcaagcgcctgcgctcccaggtccaggtgagcctcgaggactacatcaacgaccggcagtacgactcccgcggccggttcggggagctgctgctcctgctgcccacgctccagagcatcacctggcagatgatcgagcagatccagttcatcaagctgttcggcatggcgaagatcgacaacctgctccaggagatgctgctgggcgggtccccgagcgacgcgccccacgcccaccaccccctccacccccacctgatgcaggagcacatgggcaccaacgtgatcgtcgccaacaccatgccgacgcacctgtccaacgggcagatgtgcgagtggccccgcccccggggccaggccgccacccccgagaccccgcagcccagcccgcccgggggctccggcagcgagccctacaagctgctccccggggccgtggccaccatcgtgaagcccctgtccgccatcccccagccgacgatcaccaagcaggaggtcatctgaggactagtccctgttcccagagcccacttttttttctttttttgaaataaaatagcctgtctttcagatctcaaaggctcttttcagagccaccaaaaaaaaaaaaaaaaaaaaaaaaaaaaaaaaaaaaaaaaaaaaaaaaaaaaaaaaaaaaaaaaaaaaaaaaaaaaaaaaaaaaaaaaaaaaaaaaaaaaa

SEQ ID NO: 3819 - RNA, 1586 nt, synthetic construct
  misc_feature 1..1586: note = mRNA a-1 (hSL-A100) (opt1) from Homo sapiens__NP_000448.3__HNF4A(39-474)(S183A)
  source 1..1586: mol_type = other RNA
aggagagtcccgcagtcggcgtccagcggctctgcttgttcgtgtgtgtgtcgttgcaggccttattcaagcttaccatggacaccagcccgtccgaggggaccaacctgaacgcccccaacagcctgggcgtgtccgccctctgcgccatctgcggggaccgggcgacgggcaagcactacggggccagctcctgcgacggctgcaagggcttcttccgccggagcgtccgcaagaaccacatgtactcctgccggttcagccgccagtgcgtggtggacaaggacaagcggaaccagtgccgctactgccggctgaagaagtgcttccgcgccgggatgaagaaggaggccgtccagaacgagcgggaccgcatctccacccggcgcagctcctacgaggacagctccctgcccagcatcaacgcgctcctgcaggccgaggtgctgtcccggcagatcaccagccccgtgtccggcatcaacggggacatccgcgccaagaagatcgccgcgatcgccgacgtctgcgagagcatgaaggagcagctcctggtgctggtggagtgggcgaagtacatcccggccttctgcgagctccccctggacgaccaggtcgccctgctccgggcccacgccggcgagcacctcctgctgggggcgaccaagcgctccatggtgttcaaggacgtgctgctgctcggcaacgactacatcgtcccccggcactgccccgagctggccgagatgagccgcgtgtccatccggatcctggacgagctcgtgctgccgttccaggagctgcagatcgacgacaacgagtacgcctacctcaaggccatcatcttcttcgaccccgacgccaagggcctgagcgaccccgggaagatcaagcgcctgcgctcccaggtccaggtgagcctcgaggactacatcaacgaccggcagtacgactcccgcggccggttcggggagctgctgctcctgctgcccacgctccagagcatcacctggcagatgatcgagcagatccagttcatcaagctgttcggcatggcgaagatcgacaacctgctccaggagatgctgctgggcgggtccccgagcgacgcgccccacgcccaccaccccctccacccccacctgatgcaggagcacatgggcaccaacgtgatcgtcgccaacaccatgccgacgcacctgtccaacgggcagatgtgcgagtggccccgcccccggggccaggccgccacccccgagaccccgcagcccagcccgcccgggggctccggcagcgagccctacaagctgctccccggggccgtggccaccatcgtgaagcccctgtccgccatcccccagccgacgatcaccaagcaggaggtcatctgaggactagtccctgttcccagagcccacttttttttctttttttgaaataaaatagcctgtctttcagatctcaaaggctcttttcagagccaccaaaaaaaaaaaaaaaaaaaaaaaaaaaaaaaaaaaaaaaaaaaaaaaaaaaaaaaaaaaaaaaaaaaaaaaaaaaaaaaaaaaaaaaaaaaaaaaaaaaaa

SEQ ID NO: 3820 - RNA, 1586 nt, synthetic construct
  misc_feature 1..1586: note = mRNA a-1 (hSL-A100) (opt1) from Homo sapiens__NP_000448.3__HNF4A(39-474)(S183E)
  source 1..1586: mol_type = other RNA
aggagagtcccgcagtcggcgtccagcggctctgcttgttcgtgtgtgtgtcgttgcaggccttattcaagcttaccatggacaccagcccgtccgaggggaccaacctgaacgcccccaacagcctgggcgtgtccgccctctgcgccatctgcggggaccgggcgacgggcaagcactacggggccagctcctgcgacggctgcaagggcttcttccgccggagcgtccgcaagaaccacatgtactcctgccggttcagccgccagtgcgtggtggacaaggacaagcggaaccagtgccgctactgccggctgaagaagtgcttccgcgccgggatgaagaaggaggccgtccagaacgagcgggaccgcatctccacccggcgcagctcctacgaggacagctccctgcccagcatcaacgcgctcctgcaggccgaggtgctgtcccggcagatcaccagccccgtgtccggcatcaacggggacatccgcgccaagaagatcgccgagatcgccgacgtctgcgagagcatgaaggagcagctcctggtgctggtggagtgggcgaagtacatcccggccttctgcgagctccccctggacgaccaggtcgccctgctccgggcccacgccggcgagcacctcctgctgggggcgaccaagcgctccatggtgttcaaggacgtgctgctgctcggcaacgactacatcgtcccccggcactgccccgagctggccgagatgagccgcgtgtccatccggatcctggacgagctcgtgctgccgttccaggagctgcagatcgacgacaacgagtacgcctacctcaaggccatcatcttcttcgaccccgacgccaagggcctgagcgaccccgggaagatcaagcgcctgcgctcccaggtccaggtgagcctcgaggactacatcaacgaccggcagtacgactcccgcggccggttcggggagctgctgctcctgctgcccacgctccagagcatcacctggcagatgatcgagcagatccagttcatcaagctgttcggcatggcgaagatcgacaacctgctccaggagatgctgctgggcgggtccccgagcgacgcgccccacgcccaccaccccctccacccccacctgatgcaggagcacatgggcaccaacgtgatcgtcgccaacaccatgccgacgcacctgtccaacgggcagatgtgcgagtggccccgcccccggggccaggccgccacccccgagaccccgcagcccagcccgcccgggggctccggcagcgagccctacaagctgctccccggggccgtggccaccatcgtgaagcccctgtccgccatcccccagccgacgatcaccaagcaggaggtcatctgaggactagtccctgttcccagagcccacttttttttctttttttgaaataaaatagcctgtctttcagatctcaaaggctcttttcagagccaccaaaaaaaaaaaaaaaaaaaaaaaaaaaaaaaaaaaaaaaaaaaaaaaaaaaaaaaaaaaaaaaaaaaaaaaaaaaaaaaaaaaaaaaaaaaaaaaaaaaaa

SEQ ID NO: 3821 - RNA, 1586 nt, synthetic construct
  misc_feature 1..1586: note = mRNA a-1 (hSL-A100) (opt1) from Homo sapiens__NP_000448.3__HNF4A(39-474)(S461A)
  source 1..1586: mol_type = other RNA
aggagagtcccgcagtcggcgtccagcggctctgcttgttcgtgtgtgtgtcgttgcaggccttattcaagcttaccatggacaccagcccgtccgaggggaccaacctgaacgcccccaacagcctgggcgtgtccgccctctgcgccatctgcggggaccgggcgacgggcaagcactacggggccagctcctgcgacggctgcaagggcttcttccgccggagcgtccgcaagaaccacatgtactcctgccggttcagccgccagtgcgtggtggacaaggacaagcggaaccagtgccgctactgccggctgaagaagtgcttccgcgccgggatgaagaaggaggccgtccagaacgagcgggaccgcatctccacccggcgcagctcctacgaggacagctccctgcccagcatcaacgcgctcctgcaggccgaggtgctgtcccggcagatcaccagccccgtgtccggcatcaacggggacatccgcgccaagaagatcgccagcatcgccgacgtctgcgagagcatgaaggagcagctcctggtgctggtggagtgggcgaagtacatcccggccttctgcgagctccccctggacgaccaggtcgccctgctccgggcccacgccggcgagcacctcctgctgggggcgaccaagcgctccatggtgttcaaggacgtgctgctgctcggcaacgactacatcgtcccccggcactgccccgagctggccgagatgagccgcgtgtccatccggatcctggacgagctcgtgctgccgttccaggagctgcagatcgacgacaacgagtacgcctacctcaaggccatcatcttcttcgaccccgacgccaagggcctgagcgaccccgggaagatcaagcgcctgcgctcccaggtccaggtgagcctcgaggactacatcaacgaccggcagtacgactcccgcggccggttcggggagctgctgctcctgctgcccacgctccagagcatcacctggcagatgatcgagcagatccagttcatcaagctgttcggcatggcgaagatcgacaacctgctccaggagatgctgctgggcgggtccccgagcgacgcgccccacgcccaccaccccctccacccccacctgatgcaggagcacatgggcaccaacgtgatcgtcgccaacaccatgccgacgcacctgtccaacgggcagatgtgcgagtggccccgcccccggggccaggccgccacccccgagaccccgcagcccagcccgcccgggggctccggcagcgagccctacaagctgctccccggggccgtggccaccatcgtgaagcccctggcggccatcccccagccgacgatcaccaagcaggaggtcatctgaggactagtccctgttcccagagcccacttttttttctttttttgaaataaaatagcctgtctttcagatctcaaaggctcttttcagagccaccaaaaaaaaaaaaaaaaaaaaaaaaaaaaaaaaaaaaaaaaaaaaaaaaaaaaaaaaaaaaaaaaaaaaaaaaaaaaaaaaaaaaaaaaaaaaaaaaaaaaa

SEQ ID NO: 3822 - RNA, 1586 nt, synthetic construct
  misc_feature 1..1586: note = mRNA a-1 (hSL-A100) (opt1) from Homo sapiens__NP_000448.3__HNF4A(39-474)(S461E)
  source 1..1586: mol_type = other RNA
aggagagtcccgcagtcggcgtccagcggctctgcttgttcgtgtgtgtgtcgttgcaggccttattcaagcttaccatggacaccagcccgtccgaggggaccaacctgaacgcccccaacagcctgggcgtgtccgccctctgcgccatctgcggggaccgggcgacgggcaagcactacggggccagctcctgcgacggctgcaagggcttcttccgccggagcgtccgcaagaaccacatgtactcctgccggttcagccgccagtgcgtggtggacaaggacaagcggaaccagtgccgctactgccggctgaagaagtgcttccgcgccgggatgaagaaggaggccgtccagaacgagcgggaccgcatctccacccggcgcagctcctacgaggacagctccctgcccagcatcaacgcgctcctgcaggccgaggtgctgtcccggcagatcaccagccccgtgtccggcatcaacggggacatccgcgccaagaagatcgccagcatcgccgacgtctgcgagagcatgaaggagcagctcctggtgctggtggagtgggcgaagtacatcccggccttctgcgagctccccctggacgaccaggtcgccctgctccgggcccacgccggcgagcacctcctgctgggggcgaccaagcgctccatggtgttcaaggacgtgctgctgctcggcaacgactacatcgtcccccggcactgccccgagctggccgagatgagccgcgtgtccatccggatcctggacgagctcgtgctgccgttccaggagctgcagatcgacgacaacgagtacgcctacctcaaggccatcatcttcttcgaccccgacgccaagggcctgagcgaccccgggaagatcaagcgcctgcgctcccaggtccaggtgagcctcgaggactacatcaacgaccggcagtacgactcccgcggccggttcggggagctgctgctcctgctgcccacgctccagagcatcacctggcagatgatcgagcagatccagttcatcaagctgttcggcatggcgaagatcgacaacctgctccaggagatgctgctgggcgggtccccgagcgacgcgccccacgcccaccaccccctccacccccacctgatgcaggagcacatgggcaccaacgtgatcgtcgccaacaccatgccgacgcacctgtccaacgggcagatgtgcgagtggccccgcccccggggccaggccgccacccccgagaccccgcagcccagcccgcccgggggctccggcagcgagccctacaagctgctccccggggccgtggccaccatcgtgaagcccctggaggccatcccccagccgacgatcaccaagcaggaggtcatctgaggactagtccctgttcccagagcccacttttttttctttttttgaaataaaatagcctgtctttcagatctcaaaggctcttttcagagccaccaaaaaaaaaaaaaaaaaaaaaaaaaaaaaaaaaaaaaaaaaaaaaaaaaaaaaaaaaaaaaaaaaaaaaaaaaaaaaaaaaaaaaaaaaaaaaaaaaaaaa

SEQ ID NO: 3823 - RNA, 1586 nt, synthetic construct
  misc_feature 1..1586: note = mRNA a-1 (hSL-A100) (opt1) from Homo sapiens__NP_000448.3__HNF4A(39-474)(S142A_S143A_S313A)
  source 1..1586: mol_type = other RNA
aggagagtcccgcagtcggcgtccagcggctctgcttgttcgtgtgtgtgtcgttgcaggccttattcaagcttaccatggacaccagcccgtccgaggggaccaacctgaacgcccccaacagcctgggcgtgtccgccctctgcgccatctgcggggaccgggcgacgggcaagcactacggggccagctcctgcgacggctgcaagggcttcttccgccggagcgtccgcaagaaccacatgtactcctgccggttcagccgccagtgcgtggtggacaaggacaagcggaaccagtgccgctactgccggctgaagaagtgcttccgcgccgggatgaagaaggaggccgtccagaacgagcgggaccgcatctccacccggcgcgcggcctacgaggacagctccctgcccagcatcaacgcgctcctgcaggccgaggtgctgtcccggcagatcaccagccccgtgtccggcatcaacggggacatccgcgccaagaagatcgccagcatcgccgacgtctgcgagagcatgaaggagcagctcctggtgctggtggagtgggcgaagtacatcccggccttctgcgagctccccctggacgaccaggtcgccctgctccgggcccacgccggcgagcacctcctgctgggggcgaccaagcgctccatggtgttcaaggacgtgctgctgctcggcaacgactacatcgtcccccggcactgccccgagctggccgagatgagccgcgtgtccatccggatcctggacgagctcgtgctgccgttccaggagctgcagatcgacgacaacgagtacgcctacctcaaggccatcatcttcttcgaccccgacgccaagggcctgagcgaccccgggaagatcaagcgcctgcgcgcgcaggtccaggtgagcctcgaggactacatcaacgaccggcagtacgactcccgcggccggttcggggagctgctgctcctgctgcccacgctccagagcatcacctggcagatgatcgagcagatccagttcatcaagctgttcggcatggcgaagatcgacaacctgctccaggagatgctgctgggcgggtccccgagcgacgcgccccacgcccaccaccccctccacccccacctgatgcaggagcacatgggcaccaacgtgatcgtcgccaacaccatgccgacgcacctgtccaacgggcagatgtgcgagtggccccgcccccggggccaggccgccacccccgagaccccgcagcccagcccgcccgggggctccggcagcgagccctacaagctgctccccggggccgtggccaccatcgtgaagcccctgtccgccatcccccagccgacgatcaccaagcaggaggtcatctgaggactagtccctgttcccagagcccacttttttttctttttttgaaataaaatagcctgtctttcagatctcaaaggctcttttcagagccaccaaaaaaaaaaaaaaaaaaaaaaaaaaaaaaaaaaaaaaaaaaaaaaaaaaaaaaaaaaaaaaaaaaaaaaaaaaaaaaaaaaaaaaaaaaaaaaaaaaaaa

SEQ ID NO: 3824 - RNA, 1586 nt, synthetic construct
  misc_feature 1..1586: note = mRNA a-1 (hSL-A100) (opt1) from Homo sapiens__NP_000448.3__HNF4A(39-474)(S142A_S143A_S313A_K458R )
  source 1..1586: mol_type = other RNA
aggagagtcccgcagtcggcgtccagcggctctgcttgttcgtgtgtgtgtcgttgcaggccttattcaagcttaccatggacaccagcccgtccgaggggaccaacctgaacgcccccaacagcctgggcgtgtccgccctctgcgccatctgcggggaccgggcgacgggcaagcactacggggccagctcctgcgacggctgcaagggcttcttccgccggagcgtccgcaagaaccacatgtactcctgccggttcagccgccagtgcgtggtggacaaggacaagcggaaccagtgccgctactgccggctgaagaagtgcttccgcgccgggatgaagaaggaggccgtccagaacgagcgggaccgcatctccacccggcgcgcggcctacgaggacagctccctgcccagcatcaacgcgctcctgcaggccgaggtgctgtcccggcagatcaccagccccgtgtccggcatcaacggggacatccgcgccaagaagatcgccagcatcgccgacgtctgcgagagcatgaaggagcagctcctggtgctggtggagtgggcgaagtacatcccggccttctgcgagctccccctggacgaccaggtcgccctgctccgggcccacgccggcgagcacctcctgctgggggcgaccaagcgctccatggtgttcaaggacgtgctgctgctcggcaacgactacatcgtcccccggcactgccccgagctggccgagatgagccgcgtgtccatccggatcctggacgagctcgtgctgccgttccaggagctgcagatcgacgacaacgagtacgcctacctcaaggccatcatcttcttcgaccccgacgccaagggcctgagcgaccccgggaagatcaagcgcctgcgcgcgcaggtccaggtgagcctcgaggactacatcaacgaccggcagtacgactcccgcggccggttcggggagctgctgctcctgctgcccacgctccagagcatcacctggcagatgatcgagcagatccagttcatcaagctgttcggcatggcgaagatcgacaacctgctccaggagatgctgctgggcgggtccccgagcgacgcgccccacgcccaccaccccctccacccccacctgatgcaggagcacatgggcaccaacgtgatcgtcgccaacaccatgccgacgcacctgtccaacgggcagatgtgcgagtggccccgcccccggggccaggccgccacccccgagaccccgcagcccagcccgcccgggggctccggcagcgagccctacaagctgctccccggggccgtggccaccatcgtgcggcccctgtccgccatcccccagccgacgatcaccaagcaggaggtcatctgaggactagtccctgttcccagagcccacttttttttctttttttgaaataaaatagcctgtctttcagatctcaaaggctcttttcagagccaccaaaaaaaaaaaaaaaaaaaaaaaaaaaaaaaaaaaaaaaaaaaaaaaaaaaaaaaaaaaaaaaaaaaaaaaaaaaaaaaaaaaaaaaaaaaaaaaaaaaaa

SEQ ID NO: 3825 - RNA, 1586 nt, synthetic construct
  misc_feature 1..1586: note = mRNA a-1 (hSL-A100) (opt1) from Homo sapiens__NP_000448.3__HNF4A(39-474)(S142A_S143A_S167A_S313A _S378A_T429A_T432A_S436A_K458R)
  source 1..1586: mol_type = other RNA
aggagagtcccgcagtcggcgtccagcggctctgcttgttcgtgtgtgtgtcgttgcaggccttattcaagcttaccatggacaccagcccgtccgaggggaccaacctgaacgcccccaacagcctgggcgtgtccgccctctgcgccatctgcggggaccgggcgacgggcaagcactacggggccagctcctgcgacggctgcaagggcttcttccgccggagcgtccgcaagaaccacatgtactcctgccggttcagccgccagtgcgtggtggacaaggacaagcggaaccagtgccgctactgccggctgaagaagtgcttccgcgccgggatgaagaaggaggccgtccagaacgagcgggaccgcatctccacccggcgcgcggcctacgaggacagctccctgcccagcatcaacgcgctcctgcaggccgaggtgctgtcccggcagatcaccgcgcccgtgtccggcatcaacggggacatccgcgccaagaagatcgccagcatcgccgacgtctgcgagagcatgaaggagcagctcctggtgctggtggagtgggcgaagtacatcccggccttctgcgagctccccctggacgaccaggtcgccctgctccgggcccacgccggcgagcacctcctgctgggggcgaccaagcgctccatggtgttcaaggacgtgctgctgctcggcaacgactacatcgtcccccggcactgccccgagctggccgagatgagccgcgtgtccatccggatcctggacgagctcgtgctgccgttccaggagctgcagatcgacgacaacgagtacgcctacctcaaggccatcatcttcttcgaccccgacgccaagggcctgagcgaccccgggaagatcaagcgcctgcgcgcgcaggtccaggtgagcctcgaggactacatcaacgaccggcagtacgactcccgcggccggttcggggagctgctgctcctgctgcccacgctccagagcatcacctggcagatgatcgagcagatccagttcatcaagctgttcggcatggcgaagatcgacaacctgctccaggagatgctgctgggcggggcgccgagcgacgcgccccacgcccaccaccccctccacccccacctgatgcaggagcacatgggcaccaacgtgatcgtcgccaacaccatgccgacgcacctgtccaacgggcagatgtgcgagtggccccgcccccggggccaggccgccgcgcccgaggcgccgcagcccgcgccgcccgggggctccggcagcgagccctacaagctgctccccggggccgtggccaccatcgtgcggcccctgtccgccatcccccagccgacgatcaccaagcaggaggtcatctgaggactagtccctgttcccagagcccacttttttttctttttttgaaataaaatagcctgtctttcagatctcaaaggctcttttcagagccaccaaaaaaaaaaaaaaaaaaaaaaaaaaaaaaaaaaaaaaaaaaaaaaaaaaaaaaaaaaaaaaaaaaaaaaaaaaaaaaaaaaaaaaaaaaaaaaaaaaaaa

SEQ ID NO: 3826 - RNA, 1586 nt, synthetic construct
  misc_feature 1..1586: note = mRNA a-1 (hSL-A100) (opt1) from Homo sapiens__NP_000448.3__HNF4A(39-474)(S142A_S143A_S148A_S167A _S313A_S378A_T429A_T432A_S436A_K458R)
  source 1..1586: mol_type = other RNA
aggagagtcccgcagtcggcgtccagcggctctgcttgttcgtgtgtgtgtcgttgcaggccttattcaagcttaccatggacaccagcccgtccgaggggaccaacctgaacgcccccaacagcctgggcgtgtccgccctctgcgccatctgcggggaccgggcgacgggcaagcactacggggccagctcctgcgacggctgcaagggcttcttccgccggagcgtccgcaagaaccacatgtactcctgccggttcagccgccagtgcgtggtggacaaggacaagcggaaccagtgccgctactgccggctgaagaagtgcttccgcgccgggatgaagaaggaggccgtccagaacgagcgggaccgcatctccacccggcgcgcggcctacgaggacagcgcgctgcccagcatcaacgcgctcctgcaggccgaggtgctgtcccggcagatcaccgcgcccgtgtccggcatcaacggggacatccgcgccaagaagatcgccagcatcgccgacgtctgcgagagcatgaaggagcagctcctggtgctggtggagtgggcgaagtacatcccggccttctgcgagctccccctggacgaccaggtcgccctgctccgggcccacgccggcgagcacctcctgctgggggcgaccaagcgctccatggtgttcaaggacgtgctgctgctcggcaacgactacatcgtcccccggcactgccccgagctggccgagatgagccgcgtgtccatccggatcctggacgagctcgtgctgccgttccaggagctgcagatcgacgacaacgagtacgcctacctcaaggccatcatcttcttcgaccccgacgccaagggcctgagcgaccccgggaagatcaagcgcctgcgcgcgcaggtccaggtgagcctcgaggactacatcaacgaccggcagtacgactcccgcggccggttcggggagctgctgctcctgctgcccacgctccagagcatcacctggcagatgatcgagcagatccagttcatcaagctgttcggcatggcgaagatcgacaacctgctccaggagatgctgctgggcggggcgccgagcgacgcgccccacgcccaccaccccctccacccccacctgatgcaggagcacatgggcaccaacgtgatcgtcgccaacaccatgccgacgcacctgtccaacgggcagatgtgcgagtggccccgcccccggggccaggccgccgcgcccgaggcgccgcagcccgcgccgcccgggggctccggcagcgagccctacaagctgctccccggggccgtggccaccatcgtgcggcccctgtccgccatcccccagccgacgatcaccaagcaggaggtcatctgaggactagtccctgttcccagagcccacttttttttctttttttgaaataaaatagcctgtctttcagatctcaaaggctcttttcagagccaccaaaaaaaaaaaaaaaaaaaaaaaaaaaaaaaaaaaaaaaaaaaaaaaaaaaaaaaaaaaaaaaaaaaaaaaaaaaaaaaaaaaaaaaaaaaaaaaaaaaaa

SEQ ID NO: 3827 - RNA, 1586 nt, synthetic construct
  misc_feature 1..1586: note = mRNA a-1 (hSL-A100) (opt1) from Homo sapiens__NP_000448.3__HNF4A(39-474)(K106R_K108R_K126R_K127R _S142A_S143A_S148A_S167A_S313A_S378A_T429A_T432A_S436A_K458 R)
  source 1..1586: mol_type = other RNA
aggagagtcccgcagtcggcgtccagcggctctgcttgttcgtgtgtgtgtcgttgcaggccttattcaagcttaccatggacaccagcccgtccgaggggaccaacctgaacgcccccaacagcctgggcgtgtccgccctctgcgccatctgcggggaccgggcgacgggcaagcactacggggccagctcctgcgacggctgcaagggcttcttccgccggagcgtccgcaagaaccacatgtactcctgccggttcagccgccagtgcgtggtggaccgcgaccggcggaaccagtgccgctactgccggctgaagaagtgcttccgcgccgggatgcgccgcgaggccgtccagaacgagcgggaccgcatctccacccggcgcgcggcctacgaggacagcgcgctgcccagcatcaacgcgctcctgcaggccgaggtgctgtcccggcagatcaccgcgcccgtgtccggcatcaacggggacatccgcgccaagaagatcgccagcatcgccgacgtctgcgagagcatgaaggagcagctcctggtgctggtggagtgggcgaagtacatcccggccttctgcgagctccccctggacgaccaggtcgccctgctccgggcccacgccggcgagcacctcctgctgggggcgaccaagcgctccatggtgttcaaggacgtgctgctgctcggcaacgactacatcgtcccccggcactgccccgagctggccgagatgagccgcgtgtccatccggatcctggacgagctcgtgctgccgttccaggagctgcagatcgacgacaacgagtacgcctacctcaaggccatcatcttcttcgaccccgacgccaagggcctgagcgaccccgggaagatcaagcgcctgcgcgcgcaggtccaggtgagcctcgaggactacatcaacgaccggcagtacgactcccgcggccggttcggggagctgctgctcctgctgcccacgctccagagcatcacctggcagatgatcgagcagatccagttcatcaagctgttcggcatggcgaagatcgacaacctgctccaggagatgctgctgggcggggcgccgagcgacgcgccccacgcccaccaccccctccacccccacctgatgcaggagcacatgggcaccaacgtgatcgtcgccaacaccatgccgacgcacctgtccaacgggcagatgtgcgagtggccccgcccccggggccaggccgccgcgcccgaggcgccgcagcccgcgccgcccgggggctccggcagcgagccctacaagctgctccccggggccgtggccaccatcgtgcggcccctgtccgccatcccccagccgacgatcaccaagcaggaggtcatctgaggactagtccctgttcccagagcccacttttttttctttttttgaaataaaatagcctgtctttcagatctcaaaggctcttttcagagccaccaaaaaaaaaaaaaaaaaaaaaaaaaaaaaaaaaaaaaaaaaaaaaaaaaaaaaaaaaaaaaaaaaaaaaaaaaaaaaaaaaaaaaaaaaaaaaaaaaaaaa

SEQ ID NO: 3828 - RNA, 1586 nt, synthetic construct
  misc_feature 1..1586: note = mRNA a-1 (hSL-A100) (opt1) from Homo sapiens__NP_000448.3__HNF4A(39-474)(S142A_S143A_S148A_T166A _S167A_S313A_S378A_T429A_T432A_S436A_K458R)
  source 1..1586: mol_type = other RNA
aggagagtcccgcagtcggcgtccagcggctctgcttgttcgtgtgtgtgtcgttgcaggccttattcaagcttaccatggacaccagcccgtccgaggggaccaacctgaacgcccccaacagcctgggcgtgtccgccctctgcgccatctgcggggaccgggcgacgggcaagcactacggggccagctcctgcgacggctgcaagggcttcttccgccggagcgtccgcaagaaccacatgtactcctgccggttcagccgccagtgcgtggtggacaaggacaagcggaaccagtgccgctactgccggctgaagaagtgcttccgcgccgggatgaagaaggaggccgtccagaacgagcgggaccgcatctccacccggcgcgcggcctacgaggacagcgcgctgcccagcatcaacgcgctcctgcaggccgaggtgctgtcccggcagatcgcggcgcccgtgtccggcatcaacggggacatccgcgccaagaagatcgccagcatcgccgacgtctgcgagagcatgaaggagcagctcctggtgctggtggagtgggcgaagtacatcccggccttctgcgagctccccctggacgaccaggtcgccctgctccgggcccacgccggcgagcacctcctgctgggggcgaccaagcgctccatggtgttcaaggacgtgctgctgctcggcaacgactacatcgtcccccggcactgccccgagctggccgagatgagccgcgtgtccatccggatcctggacgagctcgtgctgccgttccaggagctgcagatcgacgacaacgagtacgcctacctcaaggccatcatcttcttcgaccccgacgccaagggcctgagcgaccccgggaagatcaagcgcctgcgcgcgcaggtccaggtgagcctcgaggactacatcaacgaccggcagtacgactcccgcggccggttcggggagctgctgctcctgctgcccacgctccagagcatcacctggcagatgatcgagcagatccagttcatcaagctgttcggcatggcgaagatcgacaacctgctccaggagatgctgctgggcggggcgccgagcgacgcgccccacgcccaccaccccctccacccccacctgatgcaggagcacatgggcaccaacgtgatcgtcgccaacaccatgccgacgcacctgtccaacgggcagatgtgcgagtggccccgcccccggggccaggccgccgcgcccgaggcgccgcagcccgcgccgcccgggggctccggcagcgagccctacaagctgctccccggggccgtggccaccatcgtgcggcccctgtccgccatcccccagccgacgatcaccaagcaggaggtcatctgaggactagtccctgttcccagagcccacttttttttctttttttgaaataaaatagcctgtctttcagatctcaaaggctcttttcagagccaccaaaaaaaaaaaaaaaaaaaaaaaaaaaaaaaaaaaaaaaaaaaaaaaaaaaaaaaaaaaaaaaaaaaaaaaaaaaaaaaaaaaaaaaaaaaaaaaaaaaaa

SEQ ID NO: 3829 - RNA, 1586 nt, synthetic construct
  misc_feature 1..1586: note = mRNA a-1 (hSL-A100) (opt1) from Homo sapiens__NP_000448.3__HNF4A(39-474)(S87A_S142A_S143A_S148A_ T166A_S167A_S313A_S378A_T429A_T432A_S436A_K458R)
  source 1..1586: mol_type = other RNA
aggagagtcccgcagtcggcgtccagcggctctgcttgttcgtgtgtgtgtcgttgcaggccttattcaagcttaccatggacaccagcccgtccgaggggaccaacctgaacgcccccaacagcctgggcgtgtccgccctctgcgccatctgcggggaccgggcgacgggcaagcactacggggccagctcctgcgacggctgcaagggcttcttccgccgggcggtccgcaagaaccacatgtactcctgccggttcagccgccagtgcgtggtggacaaggacaagcggaaccagtgccgctactgccggctgaagaagtgcttccgcgccgggatgaagaaggaggccgtccagaacgagcgggaccgcatctccacccggcgcgcggcctacgaggacagcgcgctgcccagcatcaacgcgctcctgcaggccgaggtgctgtcccggcagatcgcggcgcccgtgtccggcatcaacggggacatccgcgccaagaagatcgccagcatcgccgacgtctgcgagagcatgaaggagcagctcctggtgctggtggagtgggcgaagtacatcccggccttctgcgagctccccctggacgaccaggtcgccctgctccgggcccacgccggcgagcacctcctgctgggggcgaccaagcgctccatggtgttcaaggacgtgctgctgctcggcaacgactacatcgtcccccggcactgccccgagctggccgagatgagccgcgtgtccatccggatcctggacgagctcgtgctgccgttccaggagctgcagatcgacgacaacgagtacgcctacctcaaggccatcatcttcttcgaccccgacgccaagggcctgagcgaccccgggaagatcaagcgcctgcgcgcgcaggtccaggtgagcctcgaggactacatcaacgaccggcagtacgactcccgcggccggttcggggagctgctgctcctgctgcccacgctccagagcatcacctggcagatgatcgagcagatccagttcatcaagctgttcggcatggcgaagatcgacaacctgctccaggagatgctgctgggcggggcgccgagcgacgcgccccacgcccaccaccccctccacccccacctgatgcaggagcacatgggcaccaacgtgatcgtcgccaacaccatgccgacgcacctgtccaacgggcagatgtgcgagtggccccgcccccggggccaggccgccgcgcccgaggcgccgcagcccgcgccgcccgggggctccggcagcgagccctacaagctgctccccggggccgtggccaccatcgtgcggcccctgtccgccatcccccagccgacgatcaccaagcaggaggtcatctgaggactagtccctgttcccagagcccacttttttttctttttttgaaataaaatagcctgtctttcagatctcaaaggctcttttcagagccaccaaaaaaaaaaaaaaaaaaaaaaaaaaaaaaaaaaaaaaaaaaaaaaaaaaaaaaaaaaaaaaaaaaaaaaaaaaaaaaaaaaaaaaaaaaaaaaaaaaaaa

SEQ ID NO: 3830 - RNA, 1586 nt, synthetic construct
  misc_feature 1..1586: note = mRNA a-1 (hSL-A100) (opt1) from Homo sapiens__NP_000448.3__HNF4A(39-474)(S87A_K106R_K108R_K126R_ K127R_S142A_S143A_S148A_T166A_S167A_S313A_S378A_T429A_T432A _S436A_K458R)
  source 1..1586: mol_type = other RNA
aggagagtcccgcagtcggcgtccagcggctctgcttgttcgtgtgtgtgtcgttgcaggccttattcaagcttaccatggacaccagcccgtccgaggggaccaacctgaacgcccccaacagcctgggcgtgtccgccctctgcgccatctgcggggaccgggcgacgggcaagcactacggggccagctcctgcgacggctgcaagggcttcttccgccgggcggtccgcaagaaccacatgtactcctgccggttcagccgccagtgcgtggtggaccgcgaccggcggaaccagtgccgctactgccggctgaagaagtgcttccgcgccgggatgcgccgcgaggccgtccagaacgagcgggaccgcatctccacccggcgcgcggcctacgaggacagcgcgctgcccagcatcaacgcgctcctgcaggccgaggtgctgtcccggcagatcgcggcgcccgtgtccggcatcaacggggacatccgcgccaagaagatcgccagcatcgccgacgtctgcgagagcatgaaggagcagctcctggtgctggtggagtgggcgaagtacatcccggccttctgcgagctccccctggacgaccaggtcgccctgctccgggcccacgccggcgagcacctcctgctgggggcgaccaagcgctccatggtgttcaaggacgtgctgctgctcggcaacgactacatcgtcccccggcactgccccgagctggccgagatgagccgcgtgtccatccggatcctggacgagctcgtgctgccgttccaggagctgcagatcgacgacaacgagtacgcctacctcaaggccatcatcttcttcgaccccgacgccaagggcctgagcgaccccgggaagatcaagcgcctgcgcgcgcaggtccaggtgagcctcgaggactacatcaacgaccggcagtacgactcccgcggccggttcggggagctgctgctcctgctgcccacgctccagagcatcacctggcagatgatcgagcagatccagttcatcaagctgttcggcatggcgaagatcgacaacctgctccaggagatgctgctgggcggggcgccgagcgacgcgccccacgcccaccaccccctccacccccacctgatgcaggagcacatgggcaccaacgtgatcgtcgccaacaccatgccgacgcacctgtccaacgggcagatgtgcgagtggccccgcccccggggccaggccgccgcgcccgaggcgccgcagcccgcgccgcccgggggctccggcagcgagccctacaagctgctccccggggccgtggccaccatcgtgcggcccctgtccgccatcccccagccgacgatcaccaagcaggaggtcatctgaggactagtccctgttcccagagcccacttttttttctttttttgaaataaaatagcctgtctttcagatctcaaaggctcttttcagagccaccaaaaaaaaaaaaaaaaaaaaaaaaaaaaaaaaaaaaaaaaaaaaaaaaaaaaaaaaaaaaaaaaaaaaaaaaaaaaaaaaaaaaaaaaaaaaaaaaaaaaa

SEQ ID NO: 3831 - RNA, 1586 nt, synthetic construct
  misc_feature 1..1586: note = mRNA a-1 (hSL-A100) (opt1) from Homo sapiens__NP_000448.3__HNF4A(39-474)(S87A_K106R_K108R_K126R_ K127R)
  source 1..1586: mol_type = other RNA
aggagagtcccgcagtcggcgtccagcggctctgcttgttcgtgtgtgtgtcgttgcaggccttattcaagcttaccatggacaccagcccgtccgaggggaccaacctgaacgcccccaacagcctgggcgtgtccgccctctgcgccatctgcggggaccgggcgacgggcaagcactacggggccagctcctgcgacggctgcaagggcttcttccgccgggcggtccgcaagaaccacatgtactcctgccggttcagccgccagtgcgtggtggaccgcgaccggcggaaccagtgccgctactgccggctgaagaagtgcttccgcgccgggatgcgccgggaggccgtccagaacgagcgggaccgcatctccacccggcgcagctcctacgaggacagctccctgcccagcatcaacgcgctcctgcaggccgaggtgctgtcccggcagatcaccagccccgtgtccggcatcaacggggacatccgcgccaagaagatcgccagcatcgccgacgtctgcgagagcatgaaggagcagctcctggtgctggtggagtgggcgaagtacatcccggccttctgcgagctccccctggacgaccaggtcgccctgctccgggcccacgccggcgagcacctcctgctgggggcgaccaagcgctccatggtgttcaaggacgtgctgctgctcggcaacgactacatcgtcccccggcactgccccgagctggccgagatgagccgcgtgtccatccggatcctggacgagctcgtgctgccgttccaggagctgcagatcgacgacaacgagtacgcctacctcaaggccatcatcttcttcgaccccgacgccaagggcctgagcgaccccgggaagatcaagcgcctgcgctcccaggtccaggtgagcctcgaggactacatcaacgaccggcagtacgactcccgcggccggttcggggagctgctgctcctgctgcccacgctccagagcatcacctggcagatgatcgagcagatccagttcatcaagctgttcggcatggcgaagatcgacaacctgctccaggagatgctgctgggcgggtccccgagcgacgcgccccacgcccaccaccccctccacccccacctgatgcaggagcacatgggcaccaacgtgatcgtcgccaacaccatgccgacgcacctgtccaacgggcagatgtgcgagtggccccgcccccggggccaggccgccacccccgagaccccgcagcccagcccgcccgggggctccggcagcgagccctacaagctgctccccggggccgtggccaccatcgtgaagcccctgtccgccatcccccagccgacgatcaccaagcaggaggtcatctgaggactagtccctgttcccagagcccacttttttttctttttttgaaataaaatagcctgtctttcagatctcaaaggctcttttcagagccaccaaaaaaaaaaaaaaaaaaaaaaaaaaaaaaaaaaaaaaaaaaaaaaaaaaaaaaaaaaaaaaaaaaaaaaaaaaaaaaaaaaaaaaaaaaaaaaaaaaaaa

SEQ ID NO: 3832 - RNA, 1586 nt, synthetic construct
  misc_feature 1..1586: note = mRNA a-1 (hSL-A100) (opt1) from Homo sapiens__NP_000448.3__HNF4A(39-474)(S87A_K106R_K108R_K126R_ K127R_S142A_S143A_S148A_T166A_S167A_S313A_S378A_T429A_T432A _S436A_K458R_S461A)
  source 1..1586: mol_type = other RNA
aggagagtcccgcagtcggcgtccagcggctctgcttgttcgtgtgtgtgtcgttgcaggccttattcaagcttaccatggacaccagcccgtccgaggggaccaacctgaacgcccccaacagcctgggcgtgtccgccctctgcgccatctgcggggaccgggcgacgggcaagcactacggggccagctcctgcgacggctgcaagggcttcttccgccgggcggtccgcaagaaccacatgtactcctgccggttcagccgccagtgcgtggtggaccgcgaccggcggaaccagtgccgctactgccggctgaagaagtgcttccgcgccgggatgcgccgggaggccgtccagaacgagcgggaccgcatctccacccggcgcgccgcctacgaggacagcgccctgcccagcatcaacgcgctcctgcaggccgaggtgctgtcccggcagatcgccgcgcccgtgtccggcatcaacggggacatccgcgccaagaagatcgccagcatcgccgacgtctgcgagagcatgaaggagcagctcctggtgctggtggagtgggcgaagtacatcccggccttctgcgagctccccctggacgaccaggtcgccctgctccgggcccacgccggcgagcacctcctgctgggggcgaccaagcgctccatggtgttcaaggacgtgctgctgctcggcaacgactacatcgtcccccggcactgccccgagctggccgagatgagccgcgtgtccatccggatcctggacgagctcgtgctgccgttccaggagctgcagatcgacgacaacgagtacgcctacctcaaggccatcatcttcttcgaccccgacgccaagggcctgagcgaccccgggaagatcaagcgcctgcgcgcccaggtccaggtgagcctcgaggactacatcaacgaccggcagtacgactcccgcggccggttcggggagctgctgctcctgctgcccacgctccagagcatcacctggcagatgatcgagcagatccagttcatcaagctgttcggcatggcgaagatcgacaacctgctccaggagatgctgctgggcggggccccgagcgacgcgccccacgcccaccaccccctccacccccacctgatgcaggagcacatgggcaccaacgtgatcgtcgccaacaccatgccgacgcacctgtccaacgggcagatgtgcgagtggccccgcccccggggccaggccgccgcccccgaggccccgcagcccgcgccgcccgggggctccggcagcgagccctacaagctgctccccggggccgtggccaccatcgtgcggcccctggccgccatcccccagccgacgatcaccaagcaggaggtcatctgaggactagtccctgttcccagagcccacttttttttctttttttgaaataaaatagcctgtctttcagatctcaaaggctcttttcagagccaccaaaaaaaaaaaaaaaaaaaaaaaaaaaaaaaaaaaaaaaaaaaaaaaaaaaaaaaaaaaaaaaaaaaaaaaaaaaaaaaaaaaaaaaaaaaaaaaaaaaaa

SEQ ID NO: 3833 - RNA, 1586 nt, synthetic construct
  misc_feature 1..1586: note = mRNA a-1 (hSL-A100) (opt1) from Homo sapiens__NP_000448.3__HNF4A(39-474)(S87A_K106R_K108R_K126R_ K127R_S142A_S143A_S148A_T166A_S167A_S313A_S378A_T429A_T432A _S436A_K458R_S461E)
  source 1..1586: mol_type = other RNA
aggagagtcccgcagtcggcgtccagcggctctgcttgttcgtgtgtgtgtcgttgcaggccttattcaagcttaccatggacaccagcccgtccgaggggaccaacctgaacgcccccaacagcctgggcgtgtccgccctctgcgccatctgcggggaccgggcgacgggcaagcactacggggccagctcctgcgacggctgcaagggcttcttccgccgggcggtccgcaagaaccacatgtactcctgccggttcagccgccagtgcgtggtggaccgcgaccggcggaaccagtgccgctactgccggctgaagaagtgcttccgcgccgggatgcgccgggaggccgtccagaacgagcgggaccgcatctccacccggcgcgccgcctacgaggacagcgccctgcccagcatcaacgcgctcctgcaggccgaggtgctgtcccggcagatcgccgcgcccgtgtccggcatcaacggggacatccgcgccaagaagatcgccagcatcgccgacgtctgcgagagcatgaaggagcagctcctggtgctggtggagtgggcgaagtacatcccggccttctgcgagctccccctggacgaccaggtcgccctgctccgggcccacgccggcgagcacctcctgctgggggcgaccaagcgctccatggtgttcaaggacgtgctgctgctcggcaacgactacatcgtcccccggcactgccccgagctggccgagatgagccgcgtgtccatccggatcctggacgagctcgtgctgccgttccaggagctgcagatcgacgacaacgagtacgcctacctcaaggccatcatcttcttcgaccccgacgccaagggcctgagcgaccccgggaagatcaagcgcctgcgcgcccaggtccaggtgagcctcgaggactacatcaacgaccggcagtacgactcccgcggccggttcggggagctgctgctcctgctgcccacgctccagagcatcacctggcagatgatcgagcagatccagttcatcaagctgttcggcatggcgaagatcgacaacctgctccaggagatgctgctgggcggggccccgagcgacgcgccccacgcccaccaccccctccacccccacctgatgcaggagcacatgggcaccaacgtgatcgtcgccaacaccatgccgacgcacctgtccaacgggcagatgtgcgagtggccccgcccccggggccaggccgccgcccccgaggccccgcagcccgcgccgcccgggggctccggcagcgagccctacaagctgctccccggggccgtggccaccatcgtgcggcccctggaggccatcccccagccgacgatcaccaagcaggaggtcatctgaggactagtccctgttcccagagcccacttttttttctttttttgaaataaaatagcctgtctttcagatctcaaaggctcttttcagagccaccaaaaaaaaaaaaaaaaaaaaaaaaaaaaaaaaaaaaaaaaaaaaaaaaaaaaaaaaaaaaaaaaaaaaaaaaaaaaaaaaaaaaaaaaaaaaaaaaaaaaa

SEQ ID NO: 3834 - RNA, 1586 nt, synthetic construct
  misc_feature 1..1586: note = mRNA a-1 (hSL-A100) (opt1) from Homo sapiens__NP_000448.3__HNF4A(39-474)(S87A_K106R_K108R_K126R_ K127R_S142A_S143A_S148E_T166A_S167E_S313A_S378E_T429E_T432E _S436E_K458R_S461E)
  source 1..1586: mol_type = other RNA
aggagagtcccgcagtcggcgtccagcggctctgcttgttcgtgtgtgtgtcgttgcaggccttattcaagcttaccatggacaccagcccgtccgaggggaccaacctgaacgcccccaacagcctgggcgtgtccgccctctgcgccatctgcggggaccgggcgacgggcaagcactacggggccagctcctgcgacggctgcaagggcttcttccgccgggcggtccgcaagaaccacatgtactcctgccggttcagccgccagtgcgtggtggaccgcgaccggcggaaccagtgccgctactgccggctgaagaagtgcttccgcgccgggatgcgccgggaggccgtccagaacgagcgggaccgcatctccacccggcgcgccgcctacgaggacagcgagctgcccagcatcaacgcgctcctgcaggccgaggtgctgtcccggcagatcgccgagcccgtgtccggcatcaacggggacatccgcgccaagaagatcgccagcatcgccgacgtctgcgagagcatgaaggagcagctcctggtgctggtggagtgggcgaagtacatcccggccttctgcgagctccccctggacgaccaggtcgccctgctccgggcccacgccggcgagcacctcctgctgggggcgaccaagcgctccatggtgttcaaggacgtgctgctgctcggcaacgactacatcgtcccccggcactgccccgagctggccgagatgagccgcgtgtccatccggatcctggacgagctcgtgctgccgttccaggagctgcagatcgacgacaacgagtacgcctacctcaaggccatcatcttcttcgaccccgacgccaagggcctgagcgaccccgggaagatcaagcgcctgcgcgcccaggtccaggtgagcctcgaggactacatcaacgaccggcagtacgactcccgcggccggttcggggagctgctgctcctgctgcccacgctccagagcatcacctggcagatgatcgagcagatccagttcatcaagctgttcggcatggcgaagatcgacaacctgctccaggagatgctgctgggcggggagccgagcgacgcgccccacgcccaccaccccctccacccccacctgatgcaggagcacatgggcaccaacgtgatcgtcgccaacaccatgccgacgcacctgtccaacgggcagatgtgcgagtggccccgcccccggggccaggccgccgagcccgaggagccgcagcccgagccgcccgggggctccggcagcgagccctacaagctgctccccggggccgtggccaccatcgtgcggcccctggaggccatcccccagccgacgatcaccaagcaggaggtcatctgaggactagtccctgttcccagagcccacttttttttctttttttgaaataaaatagcctgtctttcagatctcaaaggctcttttcagagccaccaaaaaaaaaaaaaaaaaaaaaaaaaaaaaaaaaaaaaaaaaaaaaaaaaaaaaaaaaaaaaaaaaaaaaaaaaaaaaaaaaaaaaaaaaaaaaaaaaaaaa

SEQ ID NO: 3835 - RNA, 1586 nt, synthetic construct
  misc_feature 1..1586: note = mRNA a-1 (hSL-A100) (opt1) from Homo sapiens__NP_000448.3__HNF4A(39-474)(S87A_K106R_K108R_K126R_ K127R_S142A_S143A_S148A_T166A_S167A_K179R_K180R_S313A_S378A _T429A_T432A_S436A_K458R_S461E)
  source 1..1586: mol_type = other RNA
aggagagtcccgcagtcggcgtccagcggctctgcttgttcgtgtgtgtgtcgttgcaggccttattcaagcttaccatggacaccagcccgtccgaggggaccaacctgaacgcccccaacagcctgggcgtgtccgccctctgcgccatctgcggggaccgggcgacgggcaagcactacggggccagctcctgcgacggctgcaagggcttcttccgccgggcggtccgcaagaaccacatgtactcctgccggttcagccgccagtgcgtggtggaccgcgaccggcggaaccagtgccgctactgccggctgaagaagtgcttccgcgccgggatgcgccgggaggccgtccagaacgagcgggaccgcatctccacccggcgcgccgcctacgaggacagcgccctgcccagcatcaacgcgctcctgcaggccgaggtgctgtcccggcagatcgccgcgcccgtgtccggcatcaacggggacatccgcgcccgccggatcgccagcatcgccgacgtctgcgagagcatgaaggagcagctcctggtgctggtggagtgggcgaagtacatcccggccttctgcgagctccccctggacgaccaggtcgccctgctccgggcccacgccggcgagcacctcctgctgggggcgaccaagcgctccatggtgttcaaggacgtgctgctgctcggcaacgactacatcgtcccccggcactgccccgagctggccgagatgagccgcgtgtccatccggatcctggacgagctcgtgctgccgttccaggagctgcagatcgacgacaacgagtacgcctacctcaaggccatcatcttcttcgaccccgacgccaagggcctgagcgaccccgggaagatcaagcgcctgcgcgcccaggtccaggtgagcctcgaggactacatcaacgaccggcagtacgactcccgcggccggttcggggagctgctgctcctgctgcccacgctccagagcatcacctggcagatgatcgagcagatccagttcatcaagctgttcggcatggcgaagatcgacaacctgctccaggagatgctgctgggcggggccccgagcgacgcgccccacgcccaccaccccctccacccccacctgatgcaggagcacatgggcaccaacgtgatcgtcgccaacaccatgccgacgcacctgtccaacgggcagatgtgcgagtggccccgcccccggggccaggccgccgcccccgaggccccgcagcccgcgccgcccgggggctccggcagcgagccctacaagctgctccccggggccgtggccaccatcgtgcggcccctggaggccatcccccagccgacgatcaccaagcaggaggtcatctgaggactagtccctgttcccagagcccacttttttttctttttttgaaataaaatagcctgtctttcagatctcaaaggctcttttcagagccaccaaaaaaaaaaaaaaaaaaaaaaaaaaaaaaaaaaaaaaaaaaaaaaaaaaaaaaaaaaaaaaaaaaaaaaaaaaaaaaaaaaaaaaaaaaaaaaaaaaaaa

SEQ ID NO: 3836 - RNA, 1586 nt, synthetic construct
  misc_feature 1..1586: note = mRNA a-1 (hSL-A100) (opt1) from Homo sapiens__NP_000448.3__HNF4A(39-474)(S87A_K106R_K108R_K126R_ K127R_S142A_S143A_S148A_T166A_S167A_K300R_K307R_K309R_S313A _S378A_T429A_T432A_S436A_K458R_S461E)
  source 1..1586: mol_type = other RNA
aggagagtcccgcagtcggcgtccagcggctctgcttgttcgtgtgtgtgtcgttgcaggccttattcaagcttaccatggacaccagcccgtccgaggggaccaacctgaacgcccccaacagcctgggcgtgtccgccctctgcgccatctgcggggaccgggcgacgggcaagcactacggggccagctcctgcgacggctgcaagggcttcttccgccgggcggtccgcaagaaccacatgtactcctgccggttcagccgccagtgcgtggtggaccgcgaccggcggaaccagtgccgctactgccggctgaagaagtgcttccgcgccgggatgcgccgggaggccgtccagaacgagcgggaccgcatctccacccggcgcgccgcctacgaggacagcgccctgcccagcatcaacgcgctcctgcaggccgaggtgctgtcccggcagatcgccgcgcccgtgtccggcatcaacggggacatccgcgccaagaagatcgccagcatcgccgacgtctgcgagagcatgaaggagcagctcctggtgctggtggagtgggcgaagtacatcccggccttctgcgagctccccctggacgaccaggtcgccctgctccgggcccacgccggcgagcacctcctgctgggggcgaccaagcgctccatggtgttcaaggacgtgctgctgctcggcaacgactacatcgtcccccggcactgccccgagctggccgagatgagccgcgtgtccatccggatcctggacgagctcgtgctgccgttccaggagctgcagatcgacgacaacgagtacgcctacctcaaggccatcatcttcttcgaccccgacgcccgcggcctgagcgaccccgggcggatccgccgcctgcgcgcccaggtccaggtgagcctcgaggactacatcaacgaccggcagtacgactcccgcggccggttcggggagctgctgctcctgctgcccacgctccagagcatcacctggcagatgatcgagcagatccagttcatcaagctgttcggcatggcgaagatcgacaacctgctccaggagatgctgctgggcggggccccgagcgacgcgccccacgcccaccaccccctccacccccacctgatgcaggagcacatgggcaccaacgtgatcgtcgccaacaccatgccgacgcacctgtccaacgggcagatgtgcgagtggccccgcccccggggccaggccgccgcccccgaggccccgcagcccgcgccgcccgggggctccggcagcgagccctacaagctgctccccggggccgtggccaccatcgtgcggcccctggaggccatcccccagccgacgatcaccaagcaggaggtcatctgaggactagtccctgttcccagagcccacttttttttctttttttgaaataaaatagcctgtctttcagatctcaaaggctcttttcagagccaccaaaaaaaaaaaaaaaaaaaaaaaaaaaaaaaaaaaaaaaaaaaaaaaaaaaaaaaaaaaaaaaaaaaaaaaaaaaaaaaaaaaaaaaaaaaaaaaaaaaaa

SEQ ID NO: 3837 - RNA, 1586 nt, synthetic construct
  misc_feature 1..1586: note = mRNA a-1 (hSL-A100) (opt1) from Homo sapiens__NP_000448.3__HNF4A(39-474)(S87A_K106R_K108R_K126R_ K127R_S142A_S143A_S148A_T166A_S167A_S313A_S378A_T429A_T432A _S436A_K447R_K458R_S461E_K470R)
  source 1..1586: mol_type = other RNA
aggagagtcccgcagtcggcgtccagcggctctgcttgttcgtgtgtgtgtcgttgcaggccttattcaagcttaccatggacaccagcccgtccgaggggaccaacctgaacgcccccaacagcctgggcgtgtccgccctctgcgccatctgcggggaccgggcgacgggcaagcactacggggccagctcctgcgacggctgcaagggcttcttccgccgggcggtccgcaagaaccacatgtactcctgccggttcagccgccagtgcgtggtggaccgcgaccggcggaaccagtgccgctactgccggctgaagaagtgcttccgcgccgggatgcgccgggaggccgtccagaacgagcgggaccgcatctccacccggcgcgccgcctacgaggacagcgccctgcccagcatcaacgcgctcctgcaggccgaggtgctgtcccggcagatcgccgcgcccgtgtccggcatcaacggggacatccgcgccaagaagatcgccagcatcgccgacgtctgcgagagcatgaaggagcagctcctggtgctggtggagtgggcgaagtacatcccggccttctgcgagctccccctggacgaccaggtcgccctgctccgggcccacgccggcgagcacctcctgctgggggcgaccaagcgctccatggtgttcaaggacgtgctgctgctcggcaacgactacatcgtcccccggcactgccccgagctggccgagatgagccgcgtgtccatccggatcctggacgagctcgtgctgccgttccaggagctgcagatcgacgacaacgagtacgcctacctcaaggccatcatcttcttcgaccccgacgccaagggcctgagcgaccccgggaagatcaagcgcctgcgcgcccaggtccaggtgagcctcgaggactacatcaacgaccggcagtacgactcccgcggccggttcggggagctgctgctcctgctgcccacgctccagagcatcacctggcagatgatcgagcagatccagttcatcaagctgttcggcatggcgaagatcgacaacctgctccaggagatgctgctgggcggggccccgagcgacgcgccccacgcccaccaccccctccacccccacctgatgcaggagcacatgggcaccaacgtgatcgtcgccaacaccatgccgacgcacctgtccaacgggcagatgtgcgagtggccccgcccccggggccaggccgccgcccccgaggccccgcagcccgcgccgcccgggggctccggcagcgagccctaccgcctgctccccggggccgtggccaccatcgtgcggcccctggaggccatcccccagccgacgatcacccggcaggaggtcatctgaggactagtccctgttcccagagcccacttttttttctttttttgaaataaaatagcctgtctttcagatctcaaaggctcttttcagagccaccaaaaaaaaaaaaaaaaaaaaaaaaaaaaaaaaaaaaaaaaaaaaaaaaaaaaaaaaaaaaaaaaaaaaaaaaaaaaaaaaaaaaaaaaaaaaaaaaaaaaa

SEQ ID NO: 3838 - RNA, 1586 nt, synthetic construct
  misc_feature 1..1586: note = mRNA a-1 (hSL-A100) (opt1) from Homo sapiens__NP_000448.3__HNF4A(39-474)(S87A_K106R_K108R_K126R_ K127R_S142A_S143A_S148A_T166A_S167A_K179R_K180R_K234R_K300R _K307R_K309R_S313A_S378A_T429A_T432A_S436A_K447R_K458R_S461 E_K470R)
  source 1..1586: mol_type = other RNA
aggagagtcccgcagtcggcgtccagcggctctgcttgttcgtgtgtgtgtcgttgcaggccttattcaagcttaccatggacaccagcccgtccgaggggaccaacctgaacgcccccaacagcctgggcgtgtccgccctctgcgccatctgcggggaccgggcgacgggcaagcactacggggccagctcctgcgacggctgcaagggcttcttccgccgggcggtccgcaagaaccacatgtactcctgccggttcagccgccagtgcgtggtggaccgcgaccggcggaaccagtgccgctactgccggctgaagaagtgcttccgcgccgggatgcgccgggaggccgtccagaacgagcgggaccgcatctccacccggcgcgccgcctacgaggacagcgccctgcccagcatcaacgcgctcctgcaggccgaggtgctgtcccggcagatcgccgcgcccgtgtccggcatcaacggggacatccgcgcccgccggatcgccagcatcgccgacgtctgcgagagcatgaaggagcagctcctggtgctggtggagtgggcgaagtacatcccggccttctgcgagctccccctggacgaccaggtcgccctgctccgggcccacgccggcgagcacctcctgctgggggcgacccggcgctccatggtgttcaaggacgtgctgctgctcggcaacgactacatcgtcccccggcactgccccgagctggccgagatgagccgcgtgtccatccggatcctggacgagctcgtgctgccgttccaggagctgcagatcgacgacaacgagtacgcctacctcaaggccatcatcttcttcgaccccgacgcccgcggcctgagcgaccccgggcggatccgccgcctgcgcgcccaggtccaggtgagcctcgaggactacatcaacgaccggcagtacgactcccgcggccggttcggggagctgctgctcctgctgcccacgctccagagcatcacctggcagatgatcgagcagatccagttcatcaagctgttcggcatggcgaagatcgacaacctgctccaggagatgctgctgggcggggccccgagcgacgcgccccacgcccaccaccccctccacccccacctgatgcaggagcacatgggcaccaacgtgatcgtcgccaacaccatgccgacgcacctgtccaacgggcagatgtgcgagtggccccgcccccggggccaggccgccgcccccgaggccccgcagcccgcgccgcccgggggctccggcagcgagccctaccgcctgctccccggggccgtggccaccatcgtgcggcccctggaggccatcccccagccgacgatcacccggcaggaggtcatctgaggactagtccctgttcccagagcccacttttttttctttttttgaaataaaatagcctgtctttcagatctcaaaggctcttttcagagccaccaaaaaaaaaaaaaaaaaaaaaaaaaaaaaaaaaaaaaaaaaaaaaaaaaaaaaaaaaaaaaaaaaaaaaaaaaaaaaaaaaaaaaaaaaaaaaaaaaaaaa

SEQ ID NO: 3839 - RNA, 1586 nt, synthetic construct
  misc_feature 1..1586: note = mRNA a-1 (hSL-A100) (opt1) from Homo sapiens__NP_000448.3__HNF4A(39-474)(S87A_S95A_S99A_K106R_K1 08R_K126R_K127R_S142A_S143A_S148A_T166A_S167A_S313A_S378A_T 429A_T432A_S436A_K458R_S461E)
  source 1..1586: mol_type = other RNA
aggagagtcccgcagtcggcgtccagcggctctgcttgttcgtgtgtgtgtcgttgcaggccttattcaagcttaccatggacaccagcccgtccgaggggaccaacctgaacgcccccaacagcctgggcgtgtccgccctctgcgccatctgcggggaccgggcgacgggcaagcactacggggccagctcctgcgacggctgcaagggcttcttccgccgggcggtccgcaagaaccacatgtacgcctgccggttcgcccgccagtgcgtggtggaccgcgaccggcggaaccagtgccgctactgccggctgaagaagtgcttccgcgccgggatgcgccgggaggccgtccagaacgagcgggaccgcatctccacccggcgcgccgcctacgaggacagcgccctgcccagcatcaacgcgctcctgcaggccgaggtgctgtcccggcagatcgccgcgcccgtgtccggcatcaacggggacatccgcgccaagaagatcgccagcatcgccgacgtctgcgagagcatgaaggagcagctcctggtgctggtggagtgggcgaagtacatcccggccttctgcgagctccccctggacgaccaggtcgccctgctccgggcccacgccggcgagcacctcctgctgggggcgaccaagcgctccatggtgttcaaggacgtgctgctgctcggcaacgactacatcgtcccccggcactgccccgagctggccgagatgagccgcgtgtccatccggatcctggacgagctcgtgctgccgttccaggagctgcagatcgacgacaacgagtacgcctacctcaaggccatcatcttcttcgaccccgacgccaagggcctgagcgaccccgggaagatcaagcgcctgcgcgcccaggtccaggtgagcctcgaggactacatcaacgaccggcagtacgactcccgcggccggttcggggagctgctgctcctgctgcccacgctccagagcatcacctggcagatgatcgagcagatccagttcatcaagctgttcggcatggcgaagatcgacaacctgctccaggagatgctgctgggcggggccccgagcgacgcgccccacgcccaccaccccctccacccccacctgatgcaggagcacatgggcaccaacgtgatcgtcgccaacaccatgccgacgcacctgtccaacgggcagatgtgcgagtggccccgcccccggggccaggccgccgcccccgaggccccgcagcccgcgccgcccgggggctccggcagcgagccctacaagctgctccccggggccgtggccaccatcgtgcggcccctggaggccatcccccagccgacgatcaccaagcaggaggtcatctgaggactagtccctgttcccagagcccacttttttttctttttttgaaataaaatagcctgtctttcagatctcaaaggctcttttcagagccaccaaaaaaaaaaaaaaaaaaaaaaaaaaaaaaaaaaaaaaaaaaaaaaaaaaaaaaaaaaaaaaaaaaaaaaaaaaaaaaaaaaaaaaaaaaaaaaaaaaaaa

SEQ ID NO: 3840 - RNA, 1586 nt, synthetic construct
  misc_feature 1..1586: note = mRNA a-1 (hSL-A100) (opt1) from Homo sapiens__NP_000448.3__HNF4A(39-474)(S87A_K106R_K108R_K126R_ K127R_S138A_T139A_S142A_S143A_S148A_T166A_S167A_S313A_S378A _T429A_T432A_S436A_K458R_S461E)
  source 1..1586: mol_type = other RNA
aggagagtcccgcagtcggcgtccagcggctctgcttgttcgtgtgtgtgtcgttgcaggccttattcaagcttaccatggacaccagcccgtccgaggggaccaacctgaacgcccccaacagcctgggcgtgtccgccctctgcgccatctgcggggaccgggcgacgggcaagcactacggggccagctcctgcgacggctgcaagggcttcttccgccgggcggtccgcaagaaccacatgtactcctgccggttcagccgccagtgcgtggtggaccgcgaccggcggaaccagtgccgctactgccggctgaagaagtgcttccgcgccgggatgcgccgggaggccgtccagaacgagcgggaccgcatcgccgcccggcgcgccgcctacgaggacagcgccctgcccagcatcaacgcgctcctgcaggccgaggtgctgtcccggcagatcgccgcgcccgtgtccggcatcaacggggacatccgcgccaagaagatcgccagcatcgccgacgtctgcgagagcatgaaggagcagctcctggtgctggtggagtgggcgaagtacatcccggccttctgcgagctccccctggacgaccaggtcgccctgctccgggcccacgccggcgagcacctcctgctgggggcgaccaagcgctccatggtgttcaaggacgtgctgctgctcggcaacgactacatcgtcccccggcactgccccgagctggccgagatgagccgcgtgtccatccggatcctggacgagctcgtgctgccgttccaggagctgcagatcgacgacaacgagtacgcctacctcaaggccatcatcttcttcgaccccgacgccaagggcctgagcgaccccgggaagatcaagcgcctgcgcgcccaggtccaggtgagcctcgaggactacatcaacgaccggcagtacgactcccgcggccggttcggggagctgctgctcctgctgcccacgctccagagcatcacctggcagatgatcgagcagatccagttcatcaagctgttcggcatggcgaagatcgacaacctgctccaggagatgctgctgggcggggccccgagcgacgcgccccacgcccaccaccccctccacccccacctgatgcaggagcacatgggcaccaacgtgatcgtcgccaacaccatgccgacgcacctgtccaacgggcagatgtgcgagtggccccgcccccggggccaggccgccgcccccgaggccccgcagcccgcgccgcccgggggctccggcagcgagccctacaagctgctccccggggccgtggccaccatcgtgcggcccctggaggccatcccccagccgacgatcaccaagcaggaggtcatctgaggactagtccctgttcccagagcccacttttttttctttttttgaaataaaatagcctgtctttcagatctcaaaggctcttttcagagccaccaaaaaaaaaaaaaaaaaaaaaaaaaaaaaaaaaaaaaaaaaaaaaaaaaaaaaaaaaaaaaaaaaaaaaaaaaaaaaaaaaaaaaaaaaaaaaaaaaaaaa

SEQ ID NO: 3841 - RNA, 1586 nt, synthetic construct
  misc_feature 1..1586: note = mRNA a-1 (hSL-A100) (opt1) from Homo sapiens__NP_000448.3__HNF4A(39-474)(S87A_S95A_S99A_K106R_K1 08R_K126R_K127R_S138A_T139A_S142A_S143A_S148A_T166A_S167A_S 313A_S378A_T429A_T432A_S436A_K458R_S461E)
  source 1..1586: mol_type = other RNA
aggagagtcccgcagtcggcgtccagcggctctgcttgttcgtgtgtgtgtcgttgcaggccttattcaagcttaccatggacaccagcccgtccgaggggaccaacctgaacgcccccaacagcctgggcgtgtccgccctctgcgccatctgcggggaccgggcgacgggcaagcactacggggccagctcctgcgacggctgcaagggcttcttccgccgggcggtccgcaagaaccacatgtacgcctgccggttcgcccgccagtgcgtggtggaccgcgaccggcggaaccagtgccgctactgccggctgaagaagtgcttccgcgccgggatgcgccgggaggccgtccagaacgagcgggaccgcatcgccgcccggcgcgccgcctacgaggacagcgccctgcccagcatcaacgcgctcctgcaggccgaggtgctgtcccggcagatcgccgcgcccgtgtccggcatcaacggggacatccgcgccaagaagatcgccagcatcgccgacgtctgcgagagcatgaaggagcagctcctggtgctggtggagtgggcgaagtacatcccggccttctgcgagctccccctggacgaccaggtcgccctgctccgggcccacgccggcgagcacctcctgctgggggcgaccaagcgctccatggtgttcaaggacgtgctgctgctcggcaacgactacatcgtcccccggcactgccccgagctggccgagatgagccgcgtgtccatccggatcctggacgagctcgtgctgccgttccaggagctgcagatcgacgacaacgagtacgcctacctcaaggccatcatcttcttcgaccccgacgccaagggcctgagcgaccccgggaagatcaagcgcctgcgcgcccaggtccaggtgagcctcgaggactacatcaacgaccggcagtacgactcccgcggccggttcggggagctgctgctcctgctgcccacgctccagagcatcacctggcagatgatcgagcagatccagttcatcaagctgttcggcatggcgaagatcgacaacctgctccaggagatgctgctgggcggggccccgagcgacgcgccccacgcccaccaccccctccacccccacctgatgcaggagcacatgggcaccaacgtgatcgtcgccaacaccatgccgacgcacctgtccaacgggcagatgtgcgagtggccccgcccccggggccaggccgccgcccccgaggccccgcagcccgcgccgcccgggggctccggcagcgagccctacaagctgctccccggggccgtggccaccatcgtgcggcccctggaggccatcccccagccgacgatcaccaagcaggaggtcatctgaggactagtccctgttcccagagcccacttttttttctttttttgaaataaaatagcctgtctttcagatctcaaaggctcttttcagagccaccaaaaaaaaaaaaaaaaaaaaaaaaaaaaaaaaaaaaaaaaaaaaaaaaaaaaaaaaaaaaaaaaaaaaaaaaaaaaaaaaaaaaaaaaaaaaaaaaaaaaa

SEQ ID NO: 3842 - RNA, 1586 nt, synthetic construct
  misc_feature 1..1586: note = mRNA a-1 (hSL-A100) (opt1) from Homo sapiens__NP_000448.3__HNF4A(39-474)
  source 1..1586: mol_type = other RNA
aggagagtcccgcagtcggcgtccagcggctctgcttgttcgtgtgtgtgtcgttgcaggccttattcaagcttaccatggacaccagcccgtccgaggggaccaacctgaacgcccccaacagcctgggcgtgtccgccctctgcgccatctgcggggaccgggcgacgggcaagcactacggggccagctcctgcgacggctgcaagggcttcttccgccggagcgtccgcaagaaccacatgtactcctgccggttcagccgccagtgcgtggtggacaaggacaagcggaaccagtgccgctactgccggctgaagaagtgcttccgcgccgggatgaagaaggaggccgtccagaacgagcgggaccgcatctccacccggcgcagctcctacgaggacagctccctgcccagcatcaacgcgctcctgcaggccgaggtgctgtcccggcagatcaccagccccgtgtccggcatcaacggggacatccgcgccaagaagatcgccagcatcgccgacgtctgcgagagcatgaaggagcagctcctggtgctggtggagtgggcgaagtacatcccggccttctgcgagctccccctggacgaccaggtcgccctgctccgggcccacgccggcgagcacctcctgctgggggcgaccaagcgctccatggtgttcaaggacgtgctgctgctcggcaacgactacatcgtcccccggcactgccccgagctggccgagatgagccgcgtgtccatccggatcctggacgagctcgtgctgccgttccaggagctgcagatcgacgacaacgagtacgcctacctcaaggccatcatcttcttcgaccccgacgccaagggcctgagcgaccccgggaagatcaagcgcctgcgctcccaggtccaggtgagcctcgaggactacatcaacgaccggcagtacgactcccgcggccggttcggggagctgctgctcctgctgcccacgctccagagcatcacctggcagatgatcgagcagatccagttcatcaagctgttcggcatggcgaagatcgacaacctgctccaggagatgctgctgggcgggtccccgagcgacgcgccccacgcccaccaccccctccacccccacctgatgcaggagcacatgggcaccaacgtgatcgtcgccaacaccatgccgacgcacctgtccaacgggcagatgtgcgagtggccccgcccccggggccaggccgccacccccgagaccccgcagcccagcccgcccgggggctccggcagcgagccctacaagctcctgcccggggccgtggccaccatcgtgaagcccctgtccgccatcccccagccgacgatcaccaagcaggaggtcatctgaggactagtccctgttcccagagcccacttttttttctttttttgaaataaaatagcctgtctttcagatctcaaaggctcttttcagagccaccaaaaaaaaaaaaaaaaaaaaaaaaaaaaaaaaaaaaaaaaaaaaaaaaaaaaaaaaaaaaaaaaaaaaaaaaaaaaaaaaaaaaaaaaaaaaaaaaaaaaa

SEQ ID NO: 3843 - RNA, 1586 nt, synthetic construct
  misc_feature 1..1586: note = mRNA a-1 (hSL-A100) (opt1) from Homo sapiens__NP_000448.3__HNF4A(39-474)(S313A)
  source 1..1586: mol_type = other RNA
aggagagtcccgcagtcggcgtccagcggctctgcttgttcgtgtgtgtgtcgttgcaggccttattcaagcttaccatggacaccagcccgtccgaggggaccaacctgaacgcccccaacagcctgggcgtgtccgccctctgcgccatctgcggggaccgggcgacgggcaagcactacggggccagctcctgcgacggctgcaagggcttcttccgccggagcgtccgcaagaaccacatgtactcctgccggttcagccgccagtgcgtggtggacaaggacaagcggaaccagtgccgctactgccggctgaagaagtgcttccgcgccgggatgaagaaggaggccgtccagaacgagcgggaccgcatctccacccggcgcagctcctacgaggacagctccctgcccagcatcaacgcgctcctgcaggccgaggtgctgtcccggcagatcaccagccccgtgtccggcatcaacggggacatccgcgccaagaagatcgccagcatcgccgacgtctgcgagagcatgaaggagcagctcctggtgctggtggagtgggcgaagtacatcccggccttctgcgagctccccctggacgaccaggtcgccctgctccgggcccacgccggcgagcacctcctgctgggggcgaccaagcgctccatggtgttcaaggacgtgctgctgctcggcaacgactacatcgtcccccggcactgccccgagctggccgagatgagccgcgtgtccatccggatcctggacgagctcgtgctgccgttccaggagctgcagatcgacgacaacgagtacgcctacctcaaggccatcatcttcttcgaccccgacgccaagggcctgagcgaccccgggaagatcaagcgcctgcgcgcgcaggtccaggtgtccctcgaggactacatcaacgaccggcagtacgacagccgcggccggttcggggagctgctgctcctgctgcccacgctccagtccatcacctggcagatgatcgagcagatccagttcatcaagctgttcggcatggccaagatcgacaacctgctccaggagatgctgctgggcgggagcccgtccgacgcgccccacgcccaccaccccctccacccccacctgatgcaggagcacatgggcaccaacgtgatcgtcgccaacaccatgccgacgcacctgagcaacgggcagatgtgcgagtggccccgcccccggggccaggccgccacccccgagaccccgcagccctccccgcccgggggcagcggctccgagccctacaagctgctccccggggccgtggccaccatcgtgaagcccctgagcgcgatcccccagccgacgatcaccaagcaggaggtcatctgaggactagtccctgttcccagagcccacttttttttctttttttgaaataaaatagcctgtctttcagatctcaaaggctcttttcagagccaccaaaaaaaaaaaaaaaaaaaaaaaaaaaaaaaaaaaaaaaaaaaaaaaaaaaaaaaaaaaaaaaaaaaaaaaaaaaaaaaaaaaaaaaaaaaaaaaaaaaaa

SEQ ID NO: 3844 - RNA, 1586 nt, synthetic construct
  misc_feature 1..1586: note = mRNA a-1 (hSL-A100) (opt1) from Homo sapiens__NP_000448.3__HNF4A(39-474)(S313E)
  source 1..1586: mol_type = other RNA
aggagagtcccgcagtcggcgtccagcggctctgcttgttcgtgtgtgtgtcgttgcaggccttattcaagcttaccatggacaccagcccgtccgaggggaccaacctgaacgcccccaacagcctgggcgtgtccgccctctgcgccatctgcggggaccgggcgacgggcaagcactacggggccagctcctgcgacggctgcaagggcttcttccgccggagcgtccgcaagaaccacatgtactcctgccggttcagccgccagtgcgtggtggacaaggacaagcggaaccagtgccgctactgccggctgaagaagtgcttccgcgccgggatgaagaaggaggccgtccagaacgagcgggaccgcatctccacccggcgcagctcctacgaggacagctccctgcccagcatcaacgcgctcctgcaggccgaggtgctgtcccggcagatcaccagccccgtgtccggcatcaacggggacatccgcgccaagaagatcgccagcatcgccgacgtctgcgagagcatgaaggagcagctcctggtgctggtggagtgggcgaagtacatcccggccttctgcgagctccccctggacgaccaggtcgccctgctccgggcccacgccggcgagcacctcctgctgggggcgaccaagcgctccatggtgttcaaggacgtgctgctgctcggcaacgactacatcgtcccccggcactgccccgagctggccgagatgagccgcgtgtccatccggatcctggacgagctcgtgctgccgttccaggagctgcagatcgacgacaacgagtacgcctacctcaaggccatcatcttcttcgaccccgacgccaagggcctgagcgaccccgggaagatcaagcgcctgcgcgagcaggtccaggtgtccctcgaggactacatcaacgaccggcagtacgacagccgcggccggttcggggagctgctgctcctgctgcccacgctccagtccatcacctggcagatgatcgagcagatccagttcatcaagctgttcggcatggcgaagatcgacaacctgctccaggagatgctgctgggcgggagcccgtccgacgcgccccacgcccaccaccccctccacccccacctgatgcaggagcacatgggcaccaacgtgatcgtcgccaacaccatgccgacgcacctgagcaacgggcagatgtgcgagtggccccgcccccggggccaggccgccacccccgagaccccgcagccctccccgcccgggggcagcggctccgagccctacaagctgctccccggggccgtggccaccatcgtgaagcccctgagcgccatcccccagccgacgatcaccaagcaggaggtcatctgaggactagtccctgttcccagagcccacttttttttctttttttgaaataaaatagcctgtctttcagatctcaaaggctcttttcagagccaccaaaaaaaaaaaaaaaaaaaaaaaaaaaaaaaaaaaaaaaaaaaaaaaaaaaaaaaaaaaaaaaaaaaaaaaaaaaaaaaaaaaaaaaaaaaaaaaaaaaaa

SEQ ID NO: 3845 - RNA, 1586 nt, synthetic construct
  misc_feature 1..1586: note = mRNA a-1 (hSL-A100) (opt1) from Homo sapiens__NP_000448.3__HNF4A(39-474)(S142A_S143A)
  source 1..1586: mol_type = other RNA
aggagagtcccgcagtcggcgtccagcggctctgcttgttcgtgtgtgtgtcgttgcaggccttattcaagcttaccatggacaccagcccgtccgaggggaccaacctgaacgcccccaacagcctgggcgtgtccgccctctgcgccatctgcggggaccgggcgacgggcaagcactacggggccagctcctgcgacggctgcaagggcttcttccgccggagcgtccgcaagaaccacatgtactcctgccggttcagccgccagtgcgtggtggacaaggacaagcggaaccagtgccgctactgccggctgaagaagtgcttccgcgccgggatgaagaaggaggccgtccagaacgagcgggaccgcatctccacccggcgcgcggcctacgaggacagctccctgcccagcatcaacgccctcctgcaggccgaggtgctgtcccggcagatcaccagccccgtgtccggcatcaacggggacatccgcgccaagaagatcgcgagcatcgccgacgtctgcgagtccatgaaggagcagctcctggtgctggtggagtgggccaagtacatcccggccttctgcgagctccccctggacgaccaggtcgccctgctccgggcgcacgccggcgagcacctcctgctgggggccaccaagcgcagcatggtgttcaaggacgtgctgctgctcggcaacgactacatcgtcccccggcactgccccgagctggccgagatgagccgcgtgtccatccggatcctggacgagctcgtgctgccgttccaggagctgcagatcgacgacaacgagtacgcctacctcaaggcgatcatcttcttcgaccccgacgccaagggcctgagcgaccccgggaagatcaagcgcctgcgctcccaggtccaggtgagcctcgaggactacatcaacgaccggcagtacgactcccgcggccggttcggggagctgctgctcctgctgcccacgctccagagcatcacctggcagatgatcgagcagatccagttcatcaagctgttcggcatggccaagatcgacaacctgctccaggagatgctgctgggcgggtccccgagcgacgcgccccacgcccaccaccccctccacccccacctgatgcaggagcacatgggcaccaacgtgatcgtcgccaacaccatgccgacgcacctgtccaacgggcagatgtgcgagtggccccgcccccggggccaggccgccacccccgagaccccgcagcccagcccgcccgggggctccggcagcgagccctacaagctgctccccggggccgtggcgaccatcgtgaagcccctgtccgccatcccccagccgacgatcaccaagcaggaggtcatctgaggactagtccctgttcccagagcccacttttttttctttttttgaaataaaatagcctgtctttcagatctcaaaggctcttttcagagccaccaaaaaaaaaaaaaaaaaaaaaaaaaaaaaaaaaaaaaaaaaaaaaaaaaaaaaaaaaaaaaaaaaaaaaaaaaaaaaaaaaaaaaaaaaaaaaaaaaaaaa

SEQ ID NO: 3846 - RNA, 1586 nt, synthetic construct
  misc_feature 1..1586: note = mRNA a-1 (hSL-A100) (opt1) from Homo sapiens__NP_000448.3__HNF4A(39-474)(S142E_S143E)
  source 1..1586: mol_type = other RNA
aggagagtcccgcagtcggcgtccagcggctctgcttgttcgtgtgtgtgtcgttgcaggccttattcaagcttaccatggacaccagcccgtccgaggggaccaacctgaacgcccccaacagcctgggcgtgtccgccctctgcgccatctgcggggaccgggcgacgggcaagcactacggggccagctcctgcgacggctgcaagggcttcttccgccggagcgtccgcaagaaccacatgtactcctgccggttcagccgccagtgcgtggtggacaaggacaagcggaaccagtgccgctactgccggctgaagaagtgcttccgcgccgggatgaagaaggaggccgtccagaacgagcgggaccgcatctccacccggcgcgaggagtacgaggacagctccctgcccagcatcaacgcgctcctgcaggccgaggtgctgtcccggcagatcaccagccccgtgtccggcatcaacggggacatccgcgccaagaagatcgccagcatcgccgacgtctgcgagtccatgaaggagcagctcctggtgctggtggagtgggcgaagtacatcccggccttctgcgagctccccctggacgaccaggtcgccctgctccgggcccacgccggcgagcacctcctgctgggggcgaccaagcgcagcatggtgttcaaggacgtgctgctgctcggcaacgactacatcgtcccccggcactgccccgagctggccgagatgagccgcgtgtccatccggatcctggacgagctcgtgctgccgttccaggagctgcagatcgacgacaacgagtacgcctacctcaaggccatcatcttcttcgaccccgacgccaagggcctgagcgaccccgggaagatcaagcgcctgcgctcccaggtccaggtgagcctcgaggactacatcaacgaccggcagtacgactcccgcggccggttcggggagctgctgctcctgctgcccacgctccagagcatcacctggcagatgatcgagcagatccagttcatcaagctgttcggcatggcgaagatcgacaacctgctccaggagatgctgctgggcgggtccccgagcgacgcgccccacgcccaccaccccctccacccccacctgatgcaggagcacatgggcaccaacgtgatcgtcgccaacaccatgccgacgcacctgtccaacgggcagatgtgcgagtggccccgcccccggggccaggccgccacccccgagaccccgcagcccagcccgcccgggggctccggcagcgagccctacaagctgctccccggggccgtggccaccatcgtgaagcccctgtccgccatcccccagccgacgatcaccaagcaggaggtcatctgaggactagtccctgttcccagagcccacttttttttctttttttgaaataaaatagcctgtctttcagatctcaaaggctcttttcagagccaccaaaaaaaaaaaaaaaaaaaaaaaaaaaaaaaaaaaaaaaaaaaaaaaaaaaaaaaaaaaaaaaaaaaaaaaaaaaaaaaaaaaaaaaaaaaaaaaaaaaaa

SEQ ID NO: 3847 - RNA, 1586 nt, synthetic construct
  misc_feature 1..1586: note = mRNA a-1 (hSL-A100) (opt1) from Homo sapiens__NP_000448.3__HNF4A(39-474)(S143A)
  source 1..1586: mol_type = other RNA
aggagagtcccgcagtcggcgtccagcggctctgcttgttcgtgtgtgtgtcgttgcaggccttattcaagcttaccatggacaccagcccgtccgaggggaccaacctgaacgcccccaacagcctgggcgtgtccgccctctgcgccatctgcggggaccgggcgacgggcaagcactacggggccagctcctgcgacggctgcaagggcttcttccgccggagcgtccgcaagaaccacatgtactcctgccggttcagccgccagtgcgtggtggacaaggacaagcggaaccagtgccgctactgccggctgaagaagtgcttccgcgccgggatgaagaaggaggccgtccagaacgagcgggaccgcatctccacccggcgcagcgcgtacgaggactccagcctgccctccatcaacgccctcctgcaggccgaggtgctgagccggcagatcacctcccccgtgagcggcatcaacggggacatccgcgccaagaagatcgcctccatcgcggacgtctgcgagagcatgaaggagcagctcctggtgctggtggagtgggccaagtacatcccggccttctgcgagctccccctggacgaccaggtcgccctgctccgggcccacgcgggcgagcacctcctgctgggggccaccaagcgcagcatggtgttcaaggacgtgctgctgctcggcaacgactacatcgtcccccggcactgccccgagctggccgagatgtcccgcgtgagcatccggatcctggacgagctcgtgctgccgttccaggagctgcagatcgacgacaacgagtacgcctacctcaaggccatcatcttcttcgaccccgacgcgaagggcctgtccgaccccgggaagatcaagcgcctgcgcagccaggtccaggtgtccctcgaggactacatcaacgaccggcagtacgacagccgcggccggttcggggagctgctgctcctgctgcccacgctccagtccatcacctggcagatgatcgagcagatccagttcatcaagctgttcggcatggccaagatcgacaacctgctccaggagatgctgctgggcgggagcccgtccgacgcgccccacgcccaccaccccctccacccccacctgatgcaggagcacatgggcaccaacgtgatcgtcgccaacaccatgccgacgcacctgagcaacgggcagatgtgcgagtggccccgcccccggggccaggccgccacccccgagaccccgcagccctccccgcccgggggcagcggctccgagccctacaagctgctccccggggccgtggccaccatcgtgaagcccctgagcgcgatcccccagccgacgatcaccaagcaggaggtcatctgaggactagtccctgttcccagagcccacttttttttctttttttgaaataaaatagcctgtctttcagatctcaaaggctcttttcagagccaccaaaaaaaaaaaaaaaaaaaaaaaaaaaaaaaaaaaaaaaaaaaaaaaaaaaaaaaaaaaaaaaaaaaaaaaaaaaaaaaaaaaaaaaaaaaaaaaaaaaaa

SEQ ID NO: 3848 - RNA, 1586 nt, synthetic construct
  misc_feature 1..1586: note = mRNA a-1 (hSL-A100) (opt1) from Homo sapiens__NP_000448.3__HNF4A(39-474)(T166A)
  source 1..1586: mol_type = other RNA
aggagagtcccgcagtcggcgtccagcggctctgcttgttcgtgtgtgtgtcgttgcaggccttattcaagcttaccatggacaccagcccgtccgaggggaccaacctgaacgcccccaacagcctgggcgtgtccgccctctgcgccatctgcggggaccgggcgacgggcaagcactacggggccagctcctgcgacggctgcaagggcttcttccgccggagcgtccgcaagaaccacatgtactcctgccggttcagccgccagtgcgtggtggacaaggacaagcggaaccagtgccgctactgccggctgaagaagtgcttccgcgccgggatgaagaaggaggccgtccagaacgagcgggaccgcatctccacccggcgcagctcctacgaggacagctccctgcccagcatcaacgcgctcctgcaggccgaggtgctgtcccggcagatcgccagccccgtgtccggcatcaacggggacatccgcgccaagaagatcgccagcatcgcggacgtctgcgagagcatgaaggagcagctcctggtgctggtggagtgggccaagtacatcccggccttctgcgagctccccctggacgaccaggtcgccctgctccgggcccacgcgggcgagcacctcctgctgggggccaccaagcgctccatggtgttcaaggacgtgctgctgctcggcaacgactacatcgtcccccggcactgccccgagctggccgagatgagccgcgtgtccatccggatcctggacgagctcgtgctgccgttccaggagctgcagatcgacgacaacgagtacgcctacctcaaggccatcatcttcttcgaccccgacgcgaagggcctgagcgaccccgggaagatcaagcgcctgcgctcccaggtccaggtgagcctcgaggactacatcaacgaccggcagtacgactcccgcggccggttcggggagctgctgctcctgctgcccaccctccagagcatcacgtggcagatgatcgagcagatccagttcatcaagctgttcggcatggccaagatcgacaacctgctccaggagatgctgctgggcgggtccccgagcgacgcgccccacgcccaccaccccctccacccccacctgatgcaggagcacatgggcaccaacgtgatcgtcgccaacaccatgccgacccacctgtccaacgggcagatgtgcgagtggccccgcccccggggccaggccgccacgcccgagaccccgcagcccagcccgcccgggggctccggcagcgagccctacaagctgctccccggggccgtggccaccatcgtgaagcccctgtccgcgatcccccagccgaccatcacgaagcaggaggtcatctgaggactagtccctgttcccagagcccacttttttttctttttttgaaataaaatagcctgtctttcagatctcaaaggctcttttcagagccaccaaaaaaaaaaaaaaaaaaaaaaaaaaaaaaaaaaaaaaaaaaaaaaaaaaaaaaaaaaaaaaaaaaaaaaaaaaaaaaaaaaaaaaaaaaaaaaaaaaaaa

SEQ ID NO: 3849 - RNA, 1586 nt, synthetic construct
  misc_feature 1..1586: note = mRNA a-1 (hSL-A100) (opt1) from Homo sapiens__NP_000448.3__HNF4A(39-474)(S167E)
  source 1..1586: mol_type = other RNA
aggagagtcccgcagtcggcgtccagcggctctgcttgttcgtgtgtgtgtcgttgcaggccttattcaagcttaccatggacaccagcccgtccgaggggaccaacctgaacgcccccaacagcctgggcgtgtccgccctctgcgccatctgcggggaccgggcgacgggcaagcactacggggccagctcctgcgacggctgcaagggcttcttccgccggagcgtccgcaagaaccacatgtactcctgccggttcagccgccagtgcgtggtggacaaggacaagcggaaccagtgccgctactgccggctgaagaagtgcttccgcgccgggatgaagaaggaggccgtccagaacgagcgggaccgcatctccacccggcgcagctcctacgaggacagctccctgcccagcatcaacgcgctcctgcaggccgaggtgctgtcccggcagatcaccgagcccgtgagcggcatcaacggggacatccgcgccaagaagatcgcctccatcgccgacgtctgcgagagcatgaaggagcagctcctggtgctggtggagtgggcgaagtacatcccggccttctgcgagctccccctggacgaccaggtcgccctgctccgggcccacgccggcgagcacctcctgctgggggcgaccaagcgcagcatggtgttcaaggacgtgctgctgctcggcaacgactacatcgtcccccggcactgccccgagctggccgagatgtcccgcgtgagcatccggatcctggacgagctcgtgctgccgttccaggagctgcagatcgacgacaacgagtacgcctacctcaaggccatcatcttcttcgaccccgacgccaagggcctgtccgaccccgggaagatcaagcgcctgcgcagccaggtccaggtgtccctcgaggactacatcaacgaccggcagtacgacagccgcggccggttcggggagctgctgctcctgctgcccacgctccagtccatcacctggcagatgatcgagcagatccagttcatcaagctgttcggcatggcgaagatcgacaacctgctccaggagatgctgctgggcgggagcccgtccgacgcgccccacgcccaccaccccctccacccccacctgatgcaggagcacatgggcaccaacgtgatcgtcgccaacaccatgccgacgcacctgagcaacgggcagatgtgcgagtggccccgcccccggggccaggccgccacccccgagaccccgcagccctccccgcccgggggcagcggctccgagccctacaagctgctccccggggccgtggccaccatcgtgaagcccctgagcgccatcccccagccgacgatcaccaagcaggaggtcatctgaggactagtccctgttcccagagcccacttttttttctttttttgaaataaaatagcctgtctttcagatctcaaaggctcttttcagagccaccaaaaaaaaaaaaaaaaaaaaaaaaaaaaaaaaaaaaaaaaaaaaaaaaaaaaaaaaaaaaaaaaaaaaaaaaaaaaaaaaaaaaaaaaaaaaaaaaaaaaa

SEQ ID NO: 3850 - RNA, 1586 nt, synthetic construct
  misc_feature 1..1586: note = mRNA a-1 (hSL-A100) (opt1) from Homo sapiens__NP_000448.3__HNF4A(39-474)(S167A)
  source 1..1586: mol_type = other RNA
aggagagtcccgcagtcggcgtccagcggctctgcttgttcgtgtgtgtgtcgttgcaggccttattcaagcttaccatggacaccagcccgtccgaggggaccaacctgaacgcccccaacagcctgggcgtgtccgccctctgcgccatctgcggggaccgggcgacgggcaagcactacggggccagctcctgcgacggctgcaagggcttcttccgccggagcgtccgcaagaaccacatgtactcctgccggttcagccgccagtgcgtggtggacaaggacaagcggaaccagtgccgctactgccggctgaagaagtgcttccgcgccgggatgaagaaggaggccgtccagaacgagcgggaccgcatctccacccggcgcagctcctacgaggacagctccctgcccagcatcaacgcgctcctgcaggccgaggtgctgtcccggcagatcaccgcccccgtgagcggcatcaacggggacatccgcgccaagaagatcgcctccatcgcggacgtctgcgagagcatgaaggagcagctcctggtgctggtggagtgggccaagtacatcccggccttctgcgagctccccctggacgaccaggtcgccctgctccgggcccacgcgggcgagcacctcctgctgggggccaccaagcgcagcatggtgttcaaggacgtgctgctgctcggcaacgactacatcgtcccccggcactgccccgagctggccgagatgtcccgcgtgagcatccggatcctggacgagctcgtgctgccgttccaggagctgcagatcgacgacaacgagtacgcctacctcaaggccatcatcttcttcgaccccgacgcgaagggcctgtccgaccccgggaagatcaagcgcctgcgcagccaggtccaggtgtccctcgaggactacatcaacgaccggcagtacgacagccgcggccggttcggggagctgctgctcctgctgcccacgctccagtccatcacctggcagatgatcgagcagatccagttcatcaagctgttcggcatggccaagatcgacaacctgctccaggagatgctgctgggcgggagcccgtccgacgcgccccacgcccaccaccccctccacccccacctgatgcaggagcacatgggcaccaacgtgatcgtcgccaacaccatgccgacgcacctgagcaacgggcagatgtgcgagtggccccgcccccggggccaggccgccacccccgagaccccgcagccctccccgcccgggggcagcggctccgagccctacaagctgctccccggggccgtggccaccatcgtgaagcccctgagcgcgatcccccagccgacgatcaccaagcaggaggtcatctgaggactagtccctgttcccagagcccacttttttttctttttttgaaataaaatagcctgtctttcagatctcaaaggctcttttcagagccaccaaaaaaaaaaaaaaaaaaaaaaaaaaaaaaaaaaaaaaaaaaaaaaaaaaaaaaaaaaaaaaaaaaaaaaaaaaaaaaaaaaaaaaaaaaaaaaaaaaaaa

SEQ ID NO: 3851 - RNA, 1586 nt, synthetic construct
  misc_feature 1..1586: note = mRNA a-1 (hSL-A100) (opt1) from Homo sapiens__NP_000448.3__HNF4A(39-474)(S167A_S378A_T429A_T432A _S436A)
  source 1..1586: mol_type = other RNA
aggagagtcccgcagtcggcgtccagcggctctgcttgttcgtgtgtgtgtcgttgcaggccttattcaagcttaccatggacaccagcccgtccgaggggaccaacctgaacgcccccaacagcctgggcgtgtccgccctctgcgccatctgcggggaccgggcgacgggcaagcactacggggccagctcctgcgacggctgcaagggcttcttccgccggagcgtccgcaagaaccacatgtactcctgccggttcagccgccagtgcgtggtggacaaggacaagcggaaccagtgccgctactgccggctgaagaagtgcttccgcgccgggatgaagaaggaggccgtccagaacgagcgggaccgcatctccacccggcgcagctcctacgaggacagctccctgcccagcatcaacgcgctcctgcaggccgaggtgctgtcccggcagatcaccgcccccgtgagcggcatcaacggggacatccgcgccaagaagatcgcctccatcgcggacgtctgcgagagcatgaaggagcagctcctggtgctggtggagtgggccaagtacatcccggccttctgcgagctccccctggacgaccaggtcgccctgctccgggcccacgcgggcgagcacctcctgctgggggccaccaagcgcagcatggtgttcaaggacgtgctgctgctcggcaacgactacatcgtcccccggcactgccccgagctggccgagatgtcccgcgtgagcatccggatcctggacgagctcgtgctgccgttccaggagctgcagatcgacgacaacgagtacgcctacctcaaggccatcatcttcttcgaccccgacgcgaagggcctgtccgaccccgggaagatcaagcgcctgcgcagccaggtccaggtgtccctcgaggactacatcaacgaccggcagtacgacagccgcggccggttcggggagctgctgctcctgctgcccacgctccagtccatcacctggcagatgatcgagcagatccagttcatcaagctgttcggcatggccaagatcgacaacctgctccaggagatgctgctgggcggggccccgagcgacgcgccccacgcccaccaccccctccacccccacctgatgcaggagcacatgggcaccaacgtgatcgtcgccaacaccatgccgacgcacctgtccaacgggcagatgtgcgagtggccccgcccccggggccaggccgccgcccccgaggcgccgcagcccgccccgcccgggggcagcggctccgagccctacaagctgctccccggggccgtggccaccatcgtgaagcccctgagcgccatcccccagccgaccatcaccaagcaggaggtcatctgaggactagtccctgttcccagagcccacttttttttctttttttgaaataaaatagcctgtctttcagatctcaaaggctcttttcagagccaccaaaaaaaaaaaaaaaaaaaaaaaaaaaaaaaaaaaaaaaaaaaaaaaaaaaaaaaaaaaaaaaaaaaaaaaaaaaaaaaaaaaaaaaaaaaaaaaaaaaaa

SEQ ID NO: 3852 - RNA, 1586 nt, synthetic construct
  misc_feature 1..1586: note = mRNA a-1 (hSL-A100) (opt1) from Homo sapiens__NP_000448.3__HNF4A(39-474)(S167E_S378E_T429E_T432E _S436E)
  source 1..1586: mol_type = other RNA
aggagagtcccgcagtcggcgtccagcggctctgcttgttcgtgtgtgtgtcgttgcaggccttattcaagcttaccatggacaccagcccgtccgaggggaccaacctgaacgcccccaacagcctgggcgtgtccgccctctgcgccatctgcggggaccgggcgacgggcaagcactacggggccagctcctgcgacggctgcaagggcttcttccgccggagcgtccgcaagaaccacatgtactcctgccggttcagccgccagtgcgtggtggacaaggacaagcggaaccagtgccgctactgccggctgaagaagtgcttccgcgccgggatgaagaaggaggccgtccagaacgagcgggaccgcatctccacccggcgcagctcctacgaggacagctccctgcccagcatcaacgcgctcctgcaggccgaggtgctgtcccggcagatcaccgagcccgtgagcggcatcaacggggacatccgcgccaagaagatcgcctccatcgccgacgtctgcgagagcatgaaggagcagctcctggtgctggtggagtgggcgaagtacatcccggccttctgcgagctccccctggacgaccaggtcgccctgctccgggcccacgccggcgagcacctcctgctgggggcgaccaagcgcagcatggtgttcaaggacgtgctgctgctcggcaacgactacatcgtcccccggcactgccccgagctggccgagatgtcccgcgtgagcatccggatcctggacgagctcgtgctgccgttccaggagctgcagatcgacgacaacgagtacgcctacctcaaggccatcatcttcttcgaccccgacgccaagggcctgtccgaccccgggaagatcaagcgcctgcgcagccaggtccaggtgtccctcgaggactacatcaacgaccggcagtacgacagccgcggccggttcggggagctgctgctcctgctgcccacgctccagtccatcacctggcagatgatcgagcagatccagttcatcaagctgttcggcatggcgaagatcgacaacctgctccaggagatgctgctgggcggggagccgagcgacgcgccccacgcccaccaccccctccacccccacctgatgcaggagcacatgggcaccaacgtgatcgtcgccaacaccatgccgacgcacctgtccaacgggcagatgtgcgagtggccccgcccccggggccaggccgccgagcccgaggagccgcagcccgagccgcccgggggcagcggctccgagccctacaagctgctccccggggccgtggccaccatcgtgaagcccctgagcgccatcccccagccgaccatcaccaagcaggaggtcatctgaggactagtccctgttcccagagcccacttttttttctttttttgaaataaaatagcctgtctttcagatctcaaaggctcttttcagagccaccaaaaaaaaaaaaaaaaaaaaaaaaaaaaaaaaaaaaaaaaaaaaaaaaaaaaaaaaaaaaaaaaaaaaaaaaaaaaaaaaaaaaaaaaaaaaaaaaaaaaa

SEQ ID NO: 3853 - RNA, 1586 nt, synthetic construct
  misc_feature 1..1586: note = mRNA a-1 (hSL-A100) (opt1) from Homo sapiens__NP_000448.3__HNF4A(39-474)(S87A)
  source 1..1586: mol_type = other RNA
aggagagtcccgcagtcggcgtccagcggctctgcttgttcgtgtgtgtgtcgttgcaggccttattcaagcttaccatggacaccagcccgtccgaggggaccaacctgaacgcccccaacagcctgggcgtgtccgccctctgcgccatctgcggggaccgggcgacgggcaagcactacggggccagctcctgcgacggctgcaagggcttcttccgccgggccgtccgcaagaaccacatgtacagctgccggttctcccgccagtgcgtggtggacaaggacaagcggaaccagtgccgctactgccggctgaagaagtgcttccgcgccgggatgaagaaggaggcggtccagaacgagcgggaccgcatcagcacccggcgctccagctacgaggactccagcctgccctccatcaacgccctcctgcaggccgaggtgctgagccggcagatcacctcccccgtgagcggcatcaacggggacatccgcgccaagaagatcgcctccatcgcggacgtctgcgagagcatgaaggagcagctcctggtgctggtggagtgggccaagtacatcccggccttctgcgagctccccctggacgaccaggtcgccctgctccgggcccacgcgggcgagcacctcctgctgggggccaccaagcgcagcatggtgttcaaggacgtgctgctgctcggcaacgactacatcgtcccccggcactgccccgagctggccgagatgtcccgcgtgagcatccggatcctggacgagctcgtgctgccgttccaggagctgcagatcgacgacaacgagtacgcctacctcaaggccatcatcttcttcgaccccgacgcgaagggcctgtccgaccccgggaagatcaagcgcctgcgcagccaggtccaggtgtccctcgaggactacatcaacgaccggcagtacgacagccgcggccggttcggggagctgctgctcctgctgcccacgctccagtccatcacctggcagatgatcgagcagatccagttcatcaagctgttcggcatggccaagatcgacaacctgctccaggagatgctgctgggcgggagcccgtccgacgcgccccacgcccaccaccccctccacccccacctgatgcaggagcacatgggcaccaacgtgatcgtcgccaacaccatgccgacgcacctgagcaacgggcagatgtgcgagtggccccgcccccggggccaggccgccacccccgagaccccgcagccctccccgcccgggggcagcggctccgagccctacaagctgctccccggggccgtggccaccatcgtgaagcccctgagcgcgatcccccagccgacgatcaccaagcaggaggtcatctgaggactagtccctgttcccagagcccacttttttttctttttttgaaataaaatagcctgtctttcagatctcaaaggctcttttcagagccaccaaaaaaaaaaaaaaaaaaaaaaaaaaaaaaaaaaaaaaaaaaaaaaaaaaaaaaaaaaaaaaaaaaaaaaaaaaaaaaaaaaaaaaaaaaaaaaaaaaaaa

SEQ ID NO: 3854 - RNA, 1586 nt, synthetic construct
  misc_feature 1..1586: note = mRNA a-1 (hSL-A100) (opt1) from Homo sapiens__NP_000448.3__HNF4A(39-474)(S87E)
  source 1..1586: mol_type = other RNA
aggagagtcccgcagtcggcgtccagcggctctgcttgttcgtgtgtgtgtcgttgcaggccttattcaagcttaccatggacaccagcccgtccgaggggaccaacctgaacgcccccaacagcctgggcgtgtccgccctctgcgccatctgcggggaccgggcgacgggcaagcactacggggccagctcctgcgacggctgcaagggcttcttccgccgggaggtccgcaagaaccacatgtacagctgccggttctcccgccagtgcgtggtggacaaggacaagcggaaccagtgccgctactgccggctgaagaagtgcttccgcgccgggatgaagaaggaggccgtccagaacgagcgggaccgcatcagcacccggcgctccagctacgaggactccagcctgccctccatcaacgcgctcctgcaggccgaggtgctgagccggcagatcacctcccccgtgagcggcatcaacggggacatccgcgccaagaagatcgcctccatcgccgacgtctgcgagagcatgaaggagcagctcctggtgctggtggagtgggcgaagtacatcccggccttctgcgagctccccctggacgaccaggtcgccctgctccgggcccacgccggcgagcacctcctgctgggggcgaccaagcgcagcatggtgttcaaggacgtgctgctgctcggcaacgactacatcgtcccccggcactgccccgagctggccgagatgtcccgcgtgagcatccggatcctggacgagctcgtgctgccgttccaggagctgcagatcgacgacaacgagtacgcctacctcaaggccatcatcttcttcgaccccgacgccaagggcctgtccgaccccgggaagatcaagcgcctgcgcagccaggtccaggtgtccctcgaggactacatcaacgaccggcagtacgacagccgcggccggttcggggagctgctgctcctgctgcccacgctccagtccatcacctggcagatgatcgagcagatccagttcatcaagctgttcggcatggcgaagatcgacaacctgctccaggagatgctgctgggcgggagcccgtccgacgcgccccacgcccaccaccccctccacccccacctgatgcaggagcacatgggcaccaacgtgatcgtcgccaacaccatgccgacgcacctgagcaacgggcagatgtgcgagtggccccgcccccggggccaggccgccacccccgagaccccgcagccctccccgcccgggggcagcggctccgagccctacaagctgctccccggggccgtggccaccatcgtgaagcccctgagcgccatcccccagccgacgatcaccaagcaggaggtcatctgaggactagtccctgttcccagagcccacttttttttctttttttgaaataaaatagcctgtctttcagatctcaaaggctcttttcagagccaccaaaaaaaaaaaaaaaaaaaaaaaaaaaaaaaaaaaaaaaaaaaaaaaaaaaaaaaaaaaaaaaaaaaaaaaaaaaaaaaaaaaaaaaaaaaaaaaaaaaaa

SEQ ID NO: 3855 - RNA, 1586 nt, synthetic construct
  misc_feature 1..1586: note = mRNA a-1 (hSL-A100) (opt1) from Homo sapiens__NP_000448.3__HNF4A(39-474)(R2V)
  source 1..1586: mol_type = other RNA
aggagagtcccgcagtcggcgtccagcggctctgcttgttcgtgtgtgtgtcgttgcaggccttattcaagcttaccatggacaccagcccgtccgaggggaccaacctgaacgcccccaacagcctgggcgtgtccgccctctgcgccatctgcggggaccgcgcgacgggcaagcactacggggccagctcctgcgacggctgcaagggcttcttccggcgcagcgtgcggaagaaccacatgtactcctgccgcttcagccggcagtgcgtggtcgacaaggacaagcgcaaccagtgccggtactgccgcctgaagaagtgcttccgggccgggatgaagaaggaggccgtgcagaacgagcgcgaccggatctccacccgccggagctcctacgaggacagctccctgcccagcatcaacgcgctcctgcaggccgaggtgctgtcccgccagatcaccagccccgtctccggcatcaacggggacatccgggccaagaagatcgccagcatcgccgacgtgtgcgagagcatgaaggagcagctcctggtgctggtcgagtgggcgaagtacatcccggccttctgcgagctccccctggacgaccaggtggccctgctccgcgcccacgccggcgagcacctcctgctgggggcgaccaagcggtccatggtgttcaaggacgtcctgctgctcggcaacgactacatcgtgccccgccactgccccgagctggccgagatgagccgggtgtccatccgcatcctggacgagctcgtcctgccgttccaggagctgcagatcgacgacaacgagtacgcctacctcaaggccatcatcttcttcgaccccgacgccaagggcctgagcgaccccgggaagatcaagcggctgcgctcccaggtccaggtgagcctcgaggactacatcaacgaccgccagtacgactcccggggccgcttcggggagctgctgctcctgctgcccacgctccagagcatcacctggcagatgatcgagcagatccagttcatcaagctgttcggcatggcgaagatcgacaacctgctccaggagatgctgctgggcgggtccccgagcgacgcgccccacgcccaccaccccctccacccccacctgatgcaggagcacatgggcaccaacgtgatcgtggccaacaccatgccgacgcacctgtccaacgggcagatgtgcgagtggccccggccccgcggccaggccgccacccccgagaccccgcagcccagcccgcccgggggctccggcagcgagccctacaagctgctccccggggccgtggccaccatcgtcaagcccctgtccgccatcccccagccgacgatcaccaagcaggaggtgatctgaggactagtccctgttcccagagcccacttttttttctttttttgaaataaaatagcctgtctttcagatctcaaaggctcttttcagagccaccaaaaaaaaaaaaaaaaaaaaaaaaaaaaaaaaaaaaaaaaaaaaaaaaaaaaaaaaaaaaaaaaaaaaaaaaaaaaaaaaaaaaaaaaaaaaaaaaaaaaa

SEQ ID NO: 3856 - RNA, 1586 nt, synthetic construct
  misc_feature 1..1586: note = mRNA a-1 (hSL-A100) (opt1) from Homo sapiens__NP_000448.3__HNF4A(39-474)(R2V_K5V)
  source 1..1586: mol_type = other RNA
aggagagtcccgcagtcggcgtccagcggctctgcttgttcgtgtgtgtgtcgttgcaggccttattcaagcttaccatggacaccagcccgtccgaggggaccaacctgaacgcccccaacagcctgggcgtgtccgccctctgcgccatctgcggggaccgcgcgacgggcaagcactacggggccagctcctgcgacggctgcaagggcttcttccggcgcagcgtgcggaagaaccacatgtactcctgccgcttcagccggcagtgcgtcgtggacaaggacaagcgcaaccagtgccggtactgccgcctgaagaagtgcttccgggccgggatgaagaaggaggccgtgcagaacgagcgcgaccggatctccacccgccggagctcctacgaggacagctccctgcccagcatcaacgcgctcctgcaggccgaggtcctgtcccgccagatcaccagccccgtgtccggcatcaacggggacatccgggccaagaagatcgccagcatcgccgacgtgtgcgagagcatgaaggagcagctcctggtcctggtggagtgggcgaagtacatcccggccttctgcgagctccccctggacgaccaggtggccctgctccgcgcccacgccggcgagcacctcctgctgggggcgaccaagcggtccatggtcttcaaggacgtgctgctgctcggcaacgactacatcgtgccccgccactgccccgagctggccgagatgagccgggtctccatccgcatcctggacgagctcgtgctgccgttccaggagctgcagatcgacgacaacgagtacgcctacctcaaggccatcatcttcttcgaccccgacgccaagggcctgagcgaccccgggaagatcaagcggctgcgctcccaggtgcaggtcagcctcgaggactacatcaacgaccgccagtacgactcccggggccgcttcggggagctgctgctcctgctgcccacgctccagagcatcacctggcagatgatcgagcagatccagttcatcaagctgttcggcatggcgaagatcgacaacctgctccaggagatgctgctgggcgggtccccgagcgacgcgccccacgcccaccaccccctccacccccacctgatgcaggagcacatgggcaccaacgtgatcgtggccaacaccatgccgacgcacctgtccaacgggcagatgtgcgagtggccccggccccgcggccaggccgccacccccgagaccccgcagcccagcccgcccgggggctccggcagcgagccctacaagctgctccccggggccgtcgccaccatcgtgaagcccctgtccgccatcccccagccgacgatcaccaagcaggaggtcatctgaggactagtccctgttcccagagcccacttttttttctttttttgaaataaaatagcctgtctttcagatctcaaaggctcttttcagagccaccaaaaaaaaaaaaaaaaaaaaaaaaaaaaaaaaaaaaaaaaaaaaaaaaaaaaaaaaaaaaaaaaaaaaaaaaaaaaaaaaaaaaaaaaaaaaaaaaaaaaa

SEQ ID NO: 3857 - RNA, 1586 nt, synthetic construct
  misc_feature 1..1586: note = mRNA a-1 (hSL-A100) (opt1) from Homo sapiens__NP_000448.3__HNF4A(39-474)(K179R_K180R)
  source 1..1586: mol_type = other RNA
aggagagtcccgcagtcggcgtccagcggctctgcttgttcgtgtgtgtgtcgttgcaggccttattcaagcttaccatggacaccagcccgtccgaggggaccaacctgaacgcccccaacagcctgggcgtgtccgccctctgcgccatctgcggggaccgggcgacgggcaagcactacggggccagctcctgcgacggctgcaagggcttcttccgccggagcgtccgcaagaaccacatgtactcctgccggttcagccgccagtgcgtggtggacaaggacaagcggaaccagtgccgctactgccggctgaagaagtgcttccgcgccgggatgaagaaggaggccgtccagaacgagcgggaccgcatctccacccggcgcagctcctacgaggacagctccctgcccagcatcaacgcgctcctgcaggccgaggtgctgtcccggcagatcaccagccccgtgtccggcatcaacggggacatccgcgcccggcgcatcgccagcatcgccgacgtctgcgagagcatgaaggagcagctcctggtgctggtggagtgggcgaagtacatcccggccttctgcgagctccccctggacgaccaggtcgccctgctccgggcccacgccggcgagcacctcctgctgggggcgaccaagcgctccatggtgttcaaggacgtgctgctgctcggcaacgactacatcgtcccccggcactgccccgagctggccgagatgagccgcgtgtccatccgcatcctggacgagctcgtgctgccgttccaggagctgcagatcgacgacaacgagtacgcctacctcaaggccatcatcttcttcgaccccgacgccaagggcctgagcgaccccgggaagatcaagcggctgcgctcccaggtccaggtgagcctcgaggactacatcaacgaccggcagtacgactcccgcggccggttcggggagctgctgctcctgctgcccacgctccagagcatcacctggcagatgatcgagcagatccagttcatcaagctgttcggcatggcgaagatcgacaacctgctccaggagatgctgctgggcgggtccccgagcgacgcgccccacgcccaccaccccctccacccccacctgatgcaggagcacatgggcaccaacgtgatcgtcgccaacaccatgccgacgcacctgtccaacgggcagatgtgcgagtggccccgcccccggggccaggccgccacccccgagaccccgcagcccagcccgcccgggggctccggcagcgagccctacaagctgctccccggggccgtggccaccatcgtgaagcccctgtccgccatcccccagccgacgatcaccaagcaggaggtcatctgaggactagtccctgttcccagagcccacttttttttctttttttgaaataaaatagcctgtctttcagatctcaaaggctcttttcagagccaccaaaaaaaaaaaaaaaaaaaaaaaaaaaaaaaaaaaaaaaaaaaaaaaaaaaaaaaaaaaaaaaaaaaaaaaaaaaaaaaaaaaaaaaaaaaaaaaaaaaaa

SEQ ID NO: 3858 - RNA, 1586 nt, synthetic construct
  misc_feature 1..1586: note = mRNA a-1 (hSL-A100) (opt1) from Homo sapiens__NP_000448.3__HNF4A(39-474)(K234R)
  source 1..1586: mol_type = other RNA
aggagagtcccgcagtcggcgtccagcggctctgcttgttcgtgtgtgtgtcgttgcaggccttattcaagcttaccatggacaccagcccgtccgaggggaccaacctgaacgcccccaacagcctgggcgtgtccgccctctgcgccatctgcggggaccgggcgacgggcaagcactacggggccagctcctgcgacggctgcaagggcttcttccgccggagcgtccgcaagaaccacatgtactcctgccggttcagccgccagtgcgtggtggacaaggacaagcggaaccagtgccgctactgccggctgaagaagtgcttccgcgccgggatgaagaaggaggccgtccagaacgagcgggaccgcatctccacccggcgcagctcctacgaggacagctccctgcccagcatcaacgcgctcctgcaggccgaggtgctgtcccggcagatcaccagccccgtgtccggcatcaacggggacatccgcgccaagaagatcgccagcatcgccgacgtctgcgagagcatgaaggagcagctcctggtgctggtggagtgggcgaagtacatcccggccttctgcgagctccccctggacgaccaggtcgccctgctccgggcccacgccggcgagcacctcctgctgggggcgacccgccggtccatggtgttcaaggacgtgctgctgctcggcaacgactacatcgtcccccgccactgccccgagctggccgagatgagccgggtgtccatccgcatcctggacgagctcgtgctgccgttccaggagctgcagatcgacgacaacgagtacgcctacctcaaggccatcatcttcttcgaccccgacgccaagggcctgagcgaccccgggaagatcaagcgcctgcggtcccaggtccaggtgagcctcgaggactacatcaacgaccgccagtacgactcccggggccgcttcggggagctgctgctcctgctgcccacgctccagagcatcacctggcagatgatcgagcagatccagttcatcaagctgttcggcatggcgaagatcgacaacctgctccaggagatgctgctgggcgggtccccgagcgacgcgccccacgcccaccaccccctccacccccacctgatgcaggagcacatgggcaccaacgtgatcgtcgccaacaccatgccgacgcacctgtccaacgggcagatgtgcgagtggccccggccccgcggccaggccgccacccccgagaccccgcagcccagcccgcccgggggctccggcagcgagccctacaagctgctccccggggccgtggccaccatcgtgaagcccctgtccgccatcccccagccgacgatcaccaagcaggaggtcatctgaggactagtccctgttcccagagcccacttttttttctttttttgaaataaaatagcctgtctttcagatctcaaaggctcttttcagagccaccaaaaaaaaaaaaaaaaaaaaaaaaaaaaaaaaaaaaaaaaaaaaaaaaaaaaaaaaaaaaaaaaaaaaaaaaaaaaaaaaaaaaaaaaaaaaaaaaaaaaa

SEQ ID NO: 3859 - RNA, 1586 nt, synthetic construct
  misc_feature 1..1586: note = mRNA a-1 (hSL-A100) (opt1) from Homo sapiens__NP_000448.3__HNF4A(39-474)(K300R)
  source 1..1586: mol_type = other RNA
aggagagtcccgcagtcggcgtccagcggctctgcttgttcgtgtgtgtgtcgttgcaggccttattcaagcttaccatggacaccagcccgtccgaggggaccaacctgaacgcccccaacagcctgggcgtgtccgccctctgcgccatctgcggggaccgggcgacgggcaagcactacggggccagctcctgcgacggctgcaagggcttcttccgccggagcgtccgcaagaaccacatgtactcctgccggttcagccgccagtgcgtggtggacaaggacaagcggaaccagtgccgctactgccggctgaagaagtgcttccgcgccgggatgaagaaggaggccgtccagaacgagcgggaccgcatctccacccggcgcagctcctacgaggacagctccctgcccagcatcaacgcgctcctgcaggccgaggtgctgtcccggcagatcaccagccccgtgtccggcatcaacggggacatccgcgccaagaagatcgccagcatcgccgacgtctgcgagagcatgaaggagcagctcctggtgctggtggagtgggcgaagtacatcccggccttctgcgagctccccctggacgaccaggtcgccctgctccgggcccacgccggcgagcacctcctgctgggggcgaccaagcgctccatggtgttcaaggacgtgctgctgctcggcaacgactacatcgtcccccggcactgccccgagctggccgagatgagccgcgtgtccatccggatcctggacgagctcgtgctgccgttccaggagctgcagatcgacgacaacgagtacgcctacctcaaggccatcatcttcttcgaccccgacgcccgcggcctgagcgaccccgggaagatcaagcgcctgcggtcccaggtccaggtgagcctcgaggactacatcaacgaccgccagtacgactcccggggccgcttcggggagctgctgctcctgctgcccacgctccagagcatcacctggcagatgatcgagcagatccagttcatcaagctgttcggcatggcgaagatcgacaacctgctccaggagatgctgctgggcgggtccccgagcgacgcgccccacgcccaccaccccctccacccccacctgatgcaggagcacatgggcaccaacgtgatcgtcgccaacaccatgccgacgcacctgtccaacgggcagatgtgcgagtggccccggccccgcggccaggccgccacccccgagaccccgcagcccagcccgcccgggggctccggcagcgagccctacaagctgctccccggggccgtggccaccatcgtgaagcccctgtccgccatcccccagccgacgatcaccaagcaggaggtcatctgaggactagtccctgttcccagagcccacttttttttctttttttgaaataaaatagcctgtctttcagatctcaaaggctcttttcagagccaccaaaaaaaaaaaaaaaaaaaaaaaaaaaaaaaaaaaaaaaaaaaaaaaaaaaaaaaaaaaaaaaaaaaaaaaaaaaaaaaaaaaaaaaaaaaaaaaaaaaaa

SEQ ID NO: 3860 - RNA, 1586 nt, synthetic construct
  misc_feature 1..1586: note = mRNA a-1 (hSL-A100) (opt1) from Homo sapiens__NP_000448.3__HNF4A(39-474)(K300R_K307R_K309R)
  source 1..1586: mol_type = other RNA
aggagagtcccgcagtcggcgtccagcggctctgcttgttcgtgtgtgtgtcgttgcaggccttattcaagcttaccatggacaccagcccgtccgaggggaccaacctgaacgcccccaacagcctgggcgtgtccgccctctgcgccatctgcggggaccgggcgacgggcaagcactacggggccagctcctgcgacggctgcaagggcttcttccgccggagcgtccgcaagaaccacatgtactcctgccggttcagccgccagtgcgtggtggacaaggacaagcggaaccagtgccgctactgccggctgaagaagtgcttccgcgccgggatgaagaaggaggccgtccagaacgagcgggaccgcatctccacccggcgcagctcctacgaggacagctccctgcccagcatcaacgcgctcctgcaggccgaggtgctgtcccggcagatcaccagccccgtgtccggcatcaacggggacatccgcgccaagaagatcgccagcatcgccgacgtctgcgagagcatgaaggagcagctcctggtgctggtggagtgggcgaagtacatcccggccttctgcgagctccccctggacgaccaggtcgccctgctccgggcccacgccggcgagcacctcctgctgggggcgaccaagcgctccatggtgttcaaggacgtgctgctgctcggcaacgactacatcgtcccccggcactgccccgagctggccgagatgagccgcgtgtccatccggatcctggacgagctcgtgctgccgttccaggagctgcagatcgacgacaacgagtacgcctacctcaaggccatcatcttcttcgaccccgacgcccgcggcctgagcgaccccgggcgcatccggcgcctgcggtcccaggtccaggtgagcctcgaggactacatcaacgaccgccagtacgactcccggggccgcttcggggagctgctgctcctgctgcccacgctccagagcatcacctggcagatgatcgagcagatccagttcatcaagctgttcggcatggcgaagatcgacaacctgctccaggagatgctgctgggcgggtccccgagcgacgcgccccacgcccaccaccccctccacccccacctgatgcaggagcacatgggcaccaacgtgatcgtcgccaacaccatgccgacgcacctgtccaacgggcagatgtgcgagtggccccggccccgcggccaggccgccacccccgagaccccgcagcccagcccgcccgggggctccggcagcgagccctacaagctgctccccggggccgtggccaccatcgtgaagcccctgtccgccatcccccagccgacgatcaccaagcaggaggtcatctgaggactagtccctgttcccagagcccacttttttttctttttttgaaataaaatagcctgtctttcagatctcaaaggctcttttcagagccaccaaaaaaaaaaaaaaaaaaaaaaaaaaaaaaaaaaaaaaaaaaaaaaaaaaaaaaaaaaaaaaaaaaaaaaaaaaaaaaaaaaaaaaaaaaaaaaaaaaaaa

SEQ ID NO: 3861 - RNA, 1586 nt, synthetic construct
  misc_feature 1..1586: note = mRNA a-1 (hSL-A100) (opt1) from Homo sapiens__NP_000448.3__HNF4A(39-474)(K447R_K470R)
  source 1..1586: mol_type = other RNA
aggagagtcccgcagtcggcgtccagcggctctgcttgttcgtgtgtgtgtcgttgcaggccttattcaagcttaccatggacaccagcccgtccgaggggaccaacctgaacgcccccaacagcctgggcgtgtccgccctctgcgccatctgcggggaccgggcgacgggcaagcactacggggccagctcctgcgacggctgcaagggcttcttccgccggagcgtccgcaagaaccacatgtactcctgccggttcagccgccagtgcgtggtggacaaggacaagcggaaccagtgccgctactgccggctgaagaagtgcttccgcgccgggatgaagaaggaggccgtccagaacgagcgggaccgcatctccacccggcgcagctcctacgaggacagctccctgcccagcatcaacgcgctcctgcaggccgaggtgctgtcccggcagatcaccagccccgtgtccggcatcaacggggacatccgcgccaagaagatcgccagcatcgccgacgtctgcgagagcatgaaggagcagctcctggtgctggtggagtgggcgaagtacatcccggccttctgcgagctccccctggacgaccaggtcgccctgctccgggcccacgccggcgagcacctcctgctgggggcgaccaagcgctccatggtgttcaaggacgtgctgctgctcggcaacgactacatcgtcccccggcactgccccgagctggccgagatgagccgcgtgtccatccggatcctggacgagctcgtgctgccgttccaggagctgcagatcgacgacaacgagtacgcctacctcaaggccatcatcttcttcgaccccgacgccaagggcctgagcgaccccgggaagatcaagcgcctgcgctcccaggtccaggtgagcctcgaggactacatcaacgaccggcagtacgactcccgcggccggttcggggagctgctgctcctgctgcccacgctccagagcatcacctggcagatgatcgagcagatccagttcatcaagctgttcggcatggcgaagatcgacaacctgctccaggagatgctgctgggcgggtccccgagcgacgcgccccacgcccaccaccccctccacccccacctgatgcaggagcacatgggcaccaacgtgatcgtcgccaacaccatgccgacgcacctgtccaacgggcagatgtgcgagtggccccgcccccggggccaggccgccacccccgagaccccgcagcccagcccgcccgggggctccggcagcgagccctaccgcctgctccccggggccgtggccaccatcgtgaagcccctgtccgccatcccccagccgacgatcacccggcaggaggtcatctgaggactagtccctgttcccagagcccacttttttttctttttttgaaataaaatagcctgtctttcagatctcaaaggctcttttcagagccaccaaaaaaaaaaaaaaaaaaaaaaaaaaaaaaaaaaaaaaaaaaaaaaaaaaaaaaaaaaaaaaaaaaaaaaaaaaaaaaaaaaaaaaaaaaaaaaaaaaaaa

SEQ ID NO: 3862 - RNA, 1586 nt, synthetic construct
  misc_feature 1..1586: note = mRNA a-1 (hSL-A100) (opt1) from Homo sapiens__NP_000448.3__HNF4A(39-474)(K458R)
  source 1..1586: mol_type = other RNA
aggagagtcccgcagtcggcgtccagcggctctgcttgttcgtgtgtgtgtcgttgcaggccttattcaagcttaccatggacaccagcccgtccgaggggaccaacctgaacgcccccaacagcctgggcgtgtccgccctctgcgccatctgcggggaccgggcgacgggcaagcactacggggccagctcctgcgacggctgcaagggcttcttccgccggagcgtccgcaagaaccacatgtactcctgccggttcagccgccagtgcgtggtggacaaggacaagcggaaccagtgccgctactgccggctgaagaagtgcttccgcgccgggatgaagaaggaggccgtccagaacgagcgggaccgcatctccacccggcgcagctcctacgaggacagctccctgcccagcatcaacgcgctcctgcaggccgaggtgctgtcccggcagatcaccagccccgtgtccggcatcaacggggacatccgcgccaagaagatcgccagcatcgccgacgtctgcgagagcatgaaggagcagctcctggtgctggtggagtgggcgaagtacatcccggccttctgcgagctccccctggacgaccaggtcgccctgctccgggcccacgccggcgagcacctcctgctgggggcgaccaagcgctccatggtgttcaaggacgtgctgctgctcggcaacgactacatcgtcccccggcactgccccgagctggccgagatgagccgcgtgtccatccggatcctggacgagctcgtgctgccgttccaggagctgcagatcgacgacaacgagtacgcctacctcaaggccatcatcttcttcgaccccgacgccaagggcctgagcgaccccgggaagatcaagcgcctgcgctcccaggtccaggtgagcctcgaggactacatcaacgaccggcagtacgactcccgcggccggttcggggagctgctgctcctgctgcccacgctccagagcatcacctggcagatgatcgagcagatccagttcatcaagctgttcggcatggcgaagatcgacaacctgctccaggagatgctgctgggcgggtccccgagcgacgcgccccacgcccaccaccccctccacccccacctgatgcaggagcacatgggcaccaacgtgatcgtcgccaacaccatgccgacgcacctgtccaacgggcagatgtgcgagtggccccgcccccggggccaggccgccacccccgagaccccgcagcccagcccgcccgggggctccggcagcgagccctacaagctgctccccggggccgtggccaccatcgtgcgccccctgtccgccatcccccagccgacgatcaccaagcaggaggtcatctgaggactagtccctgttcccagagcccacttttttttctttttttgaaataaaatagcctgtctttcagatctcaaaggctcttttcagagccaccaaaaaaaaaaaaaaaaaaaaaaaaaaaaaaaaaaaaaaaaaaaaaaaaaaaaaaaaaaaaaaaaaaaaaaaaaaaaaaaaaaaaaaaaaaaaaaaaaaaaa

SEQ ID NO: 3863 - RNA, 1586 nt, synthetic construct
  misc_feature 1..1586: note = mRNA a-1 (hSL-A100) (opt1) from Homo sapiens__NP_000448.3__HNF4A(39-474)(K106R_K108R_K126R_K127R )
  source 1..1586: mol_type = other RNA
aggagagtcccgcagtcggcgtccagcggctctgcttgttcgtgtgtgtgtcgttgcaggccttattcaagcttaccatggacaccagcccgtccgaggggaccaacctgaacgcccccaacagcctgggcgtgtccgccctctgcgccatctgcggggaccgggcgacgggcaagcactacggggccagctcctgcgacggctgcaagggcttcttccgccggagcgtccgcaagaaccacatgtactcctgccggttcagccgccagtgcgtggtggaccgggaccgccggaaccagtgccgctactgccggctgaagaagtgcttccgcgccgggatgcggcgcgaggccgtccagaacgagcgggaccgcatctccacccggcgcagctcctacgaggacagctccctgcccagcatcaacgcgctcctgcaggccgaggtgctgtcccggcagatcaccagccccgtgtccggcatcaacggggacatccgcgccaagaagatcgccagcatcgccgacgtctgcgagagcatgaaggagcagctcctggtgctggtggagtgggcgaagtacatcccggccttctgcgagctccccctggacgaccaggtcgccctgctccgggcccacgccggcgagcacctcctgctgggggcgaccaagcgctccatggtgttcaaggacgtgctgctgctcggcaacgactacatcgtcccccgccactgccccgagctggccgagatgagccgggtgtccatccgcatcctggacgagctcgtgctgccgttccaggagctgcagatcgacgacaacgagtacgcctacctcaaggccatcatcttcttcgaccccgacgccaagggcctgagcgaccccgggaagatcaagcggctgcgctcccaggtccaggtgagcctcgaggactacatcaacgaccggcagtacgactcccgcggccggttcggggagctgctgctcctgctgcccacgctccagagcatcacctggcagatgatcgagcagatccagttcatcaagctgttcggcatggcgaagatcgacaacctgctccaggagatgctgctgggcgggtccccgagcgacgcgccccacgcccaccaccccctccacccccacctgatgcaggagcacatgggcaccaacgtgatcgtcgccaacaccatgccgacgcacctgtccaacgggcagatgtgcgagtggccccgcccccggggccaggccgccacccccgagaccccgcagcccagcccgcccgggggctccggcagcgagccctacaagctgctccccggggccgtggccaccatcgtgaagcccctgtccgccatcccccagccgacgatcaccaagcaggaggtcatctgaggactagtccctgttcccagagcccacttttttttctttttttgaaataaaatagcctgtctttcagatctcaaaggctcttttcagagccaccaaaaaaaaaaaaaaaaaaaaaaaaaaaaaaaaaaaaaaaaaaaaaaaaaaaaaaaaaaaaaaaaaaaaaaaaaaaaaaaaaaaaaaaaaaaaaaaaaaaaa

SEQ ID NO: 3864 - RNA, 1586 nt, synthetic construct; identical to SEQ ID NO: 3815
  misc_feature 1..1586: note = mRNA a-1 (hSL-A100) (opt1) from Homo sapiens__NP_000448.3__HNF4A(39-474)(E285Q)
  source 1..1586: mol_type = other RNA

SEQ ID NO: 3865 - RNA, 1586 nt, synthetic construct
  misc_feature 1..1586: note = mRNA a-1 (hSL-A100) (opt1) from Homo sapiens__NP_000448.3__HNF4A(39-474)(T166E)
  source 1..1586: mol_type = other RNA
aggagagtcccgcagtcggcgtccagcggctctgcttgttcgtgtgtgtgtcgttgcaggccttattcaagcttaccatggacaccagcccgtccgaggggaccaacctgaacgcccccaacagcctgggcgtgtccgccctctgcgccatctgcggggaccgggcgacgggcaagcactacggggccagctcctgcgacggctgcaagggcttcttccgccggagcgtccgcaagaaccacatgtactcctgccggttcagccgccagtgcgtggtggacaaggacaagcggaaccagtgccgctactgccggctgaagaagtgcttccgcgccgggatgaagaaggaggccgtccagaacgagcgggaccgcatctccacccggcgcagctcctacgaggacagctccctgcccagcatcaacgcgctcctgcaggccgaggtgctgtcccggcagatcgagagccccgtgtccggcatcaacggggacatccgcgccaagaagatcgccagcatcgccgacgtctgcgagagcatgaaggagcagctcctggtgctggtggagtgggcgaagtacatcccggccttctgcgagctccccctggacgaccaggtcgccctgctccgggcccacgccggcgagcacctcctgctgggggcgaccaagcgctccatggtgttcaaggacgtgctgctgctcggcaacgactacatcgtcccccggcactgccccgagctggccgagatgagccgcgtgtccatccggatcctggacgagctcgtgctgccgttccaggagctgcagatcgacgacaacgagtacgcctacctcaaggccatcatcttcttcgaccccgacgccaagggcctgagcgaccccgggaagatcaagcgcctgcgctcccaggtccaggtgagcctcgaggactacatcaacgaccggcagtacgactcccgcggccggttcggggagctgctgctcctgctgcccaccctccagagcatcacgtggcagatgatcgagcagatccagttcatcaagctgttcggcatggcgaagatcgacaacctgctccaggagatgctgctgggcgggtccccgagcgacgcgccccacgcccaccaccccctccacccccacctgatgcaggagcacatgggcaccaacgtgatcgtcgccaacaccatgccgacccacctgtccaacgggcagatgtgcgagtggccccgcccccggggccaggccgccacgcccgagaccccgcagcccagcccgcccgggggctccggcagcgagccctacaagctgctccccggggccgtggccaccatcgtgaagcccctgtccgccatcccccagccgaccatcacgaagcaggaggtcatctgaggactagtccctgttcccagagcccacttttttttctttttttgaaataaaatagcctgtctttcagatctcaaaggctcttttcagagccaccaaaaaaaaaaaaaaaaaaaaaaaaaaaaaaaaaaaaaaaaaaaaaaaaaaaaaaaaaaaaaaaaaaaaaaaaaaaaaaaaaaaaaaaaaaaaaaaaaaaaa

SEQ ID NO: 3866 - RNA, 1586 nt, synthetic construct
  misc_feature 1..1586: note = mRNA a-1 (hSL-A100) (opt1) from Homo sapiens__NP_000448.3__HNF4A(39-474)(S148A)
  source 1..1586: mol_type = other RNA
aggagagtcccgcagtcggcgtccagcggctctgcttgttcgtgtgtgtgtcgttgcaggccttattcaagcttaccatggacaccagcccgtccgaggggaccaacctgaacgcccccaacagcctgggcgtgtccgccctctgcgccatctgcggggaccgggcgacgggcaagcactacggggccagctcctgcgacggctgcaagggcttcttccgccggagcgtccgcaagaaccacatgtactcctgccggttcagccgccagtgcgtggtggacaaggacaagcggaaccagtgccgctactgccggctgaagaagtgcttccgcgccgggatgaagaaggaggccgtccagaacgagcgggaccgcatctccacccggcgcagctcctacgaggacagcgcgctgccctccatcaacgccctcctgcaggccgaggtgctgagccggcagatcacctcccccgtgagcggcatcaacggggacatccgcgccaagaagatcgcctccatcgcggacgtctgcgagagcatgaaggagcagctcctggtgctggtggagtgggccaagtacatcccggccttctgcgagctccccctggacgaccaggtcgccctgctccgggcccacgcgggcgagcacctcctgctgggggccaccaagcgcagcatggtgttcaaggacgtgctgctgctcggcaacgactacatcgtcccccggcactgccccgagctggccgagatgtcccgcgtgagcatccggatcctggacgagctcgtgctgccgttccaggagctgcagatcgacgacaacgagtacgcctacctcaaggccatcatcttcttcgaccccgacgcgaagggcctgtccgaccccgggaagatcaagcgcctgcgcagccaggtccaggtgtccctcgaggactacatcaacgaccggcagtacgacagccgcggccggttcggggagctgctgctcctgctgcccacgctccagtccatcacctggcagatgatcgagcagatccagttcatcaagctgttcggcatggccaagatcgacaacctgctccaggagatgctgctgggcgggagcccgtccgacgcgccccacgcccaccaccccctccacccccacctgatgcaggagcacatgggcaccaacgtgatcgtcgccaacaccatgccgacgcacctgagcaacgggcagatgtgcgagtggccccgcccccggggccaggccgccacccccgagaccccgcagccctccccgcccgggggcagcggctccgagccctacaagctgctccccggggccgtggccaccatcgtgaagcccctgagcgcgatcccccagccgacgatcaccaagcaggaggtcatctgaggactagtccctgttcccagagcccacttttttttctttttttgaaataaaatagcctgtctttcagatctcaaaggctcttttcagagccaccaaaaaaaaaaaaaaaaaaaaaaaaaaaaaaaaaaaaaaaaaaaaaaaaaaaaaaaaaaaaaaaaaaaaaaaaaaaaaaaaaaaaaaaaaaaaaaaaaaaaa

SEQ ID NO: 3867 - RNA, 1586 nt, synthetic construct
  misc_feature 1..1586: note = mRNA a-1 (hSL-A100) (opt1) from Homo sapiens__NP_000448.3__HNF4A(39-474)(S148E)
  source 1..1586: mol_type = other RNA
aggagagtcccgcagtcggcgtccagcggctctgcttgttcgtgtgtgtgtcgttgcaggccttattcaagcttaccatggacaccagcccgtccgaggggaccaacctgaacgcccccaacagcctgggcgtgtccgccctctgcgccatctgcggggaccgggcgacgggcaagcactacggggccagctcctgcgacggctgcaagggcttcttccgccggagcgtccgcaagaaccacatgtactcctgccggttcagccgccagtgcgtggtggacaaggacaagcggaaccagtgccgctactgccggctgaagaagtgcttccgcgccgggatgaagaaggaggccgtccagaacgagcgggaccgcatctccacccggcgcagctcctacgaggacagcgagctgccctccatcaacgcgctcctgcaggccgaggtgctgagccggcagatcacctcccccgtgagcggcatcaacggggacatccgcgccaagaagatcgcctccatcgccgacgtctgcgagagcatgaaggagcagctcctggtgctggtggagtgggcgaagtacatcccggccttctgcgagctccccctggacgaccaggtcgccctgctccgggcccacgccggcgagcacctcctgctgggggcgaccaagcgcagcatggtgttcaaggacgtgctgctgctcggcaacgactacatcgtcccccggcactgccccgagctggccgagatgtcccgcgtgagcatccggatcctggacgagctcgtgctgccgttccaggagctgcagatcgacgacaacgagtacgcctacctcaaggccatcatcttcttcgaccccgacgccaagggcctgtccgaccccgggaagatcaagcgcctgcgcagccaggtccaggtgtccctcgaggactacatcaacgaccggcagtacgacagccgcggccggttcggggagctgctgctcctgctgcccacgctccagtccatcacctggcagatgatcgagcagatccagttcatcaagctgttcggcatggcgaagatcgacaacctgctccaggagatgctgctgggcgggagcccgtccgacgcgccccacgcccaccaccccctccacccccacctgatgcaggagcacatgggcaccaacgtgatcgtcgccaacaccatgccgacgcacctgagcaacgggcagatgtgcgagtggccccgcccccggggccaggccgccacccccgagaccccgcagccctccccgcccgggggcagcggctccgagccctacaagctgctccccggggccgtggccaccatcgtgaagcccctgagcgccatcccccagccgacgatcaccaagcaggaggtcatctgaggactagtccctgttcccagagcccacttttttttctttttttgaaataaaatagcctgtctttcagatctcaaaggctcttttcagagccaccaaaaaaaaaaaaaaaaaaaaaaaaaaaaaaaaaaaaaaaaaaaaaaaaaaaaaaaaaaaaaaaaaaaaaaaaaaaaaaaaaaaaaaaaaaaaaaaaaaaaa

SEQ ID NO: 3868 - RNA, 1586 nt, synthetic construct
  misc_feature 1..1586: note = mRNA a-1 (hSL-A100) (opt1) from Homo sapiens__NP_000448.3__HNF4A(39-474)(S183A)
  source 1..1586: mol_type = other RNA
aggagagtcccgcagtcggcgtccagcggctctgcttgttcgtgtgtgtgtcgttgcaggccttattcaagcttaccatggacaccagcccgtccgaggggaccaacctgaacgcccccaacagcctgggcgtgtccgccctctgcgccatctgcggggaccgggcgacgggcaagcactacggggccagctcctgcgacggctgcaagggcttcttccgccggagcgtccgcaagaaccacatgtactcctgccggttcagccgccagtgcgtggtggacaaggacaagcggaaccagtgccgctactgccggctgaagaagtgcttccgcgccgggatgaagaaggaggccgtccagaacgagcgggaccgcatctccacccggcgcagctcctacgaggacagctccctgcccagcatcaacgcgctcctgcaggccgaggtgctgtcccggcagatcaccagccccgtgtccggcatcaacggggacatccgcgccaagaagatcgccgccatcgcggacgtctgcgagagcatgaaggagcagctcctggtgctggtggagtgggccaagtacatcccggccttctgcgagctccccctggacgaccaggtcgccctgctccgggcccacgcgggcgagcacctcctgctgggggccaccaagcgcagcatggtgttcaaggacgtgctgctgctcggcaacgactacatcgtcccccggcactgccccgagctggccgagatgtcccgcgtgagcatccggatcctggacgagctcgtgctgccgttccaggagctgcagatcgacgacaacgagtacgcctacctcaaggccatcatcttcttcgaccccgacgcgaagggcctgtccgaccccgggaagatcaagcgcctgcgcagccaggtccaggtgtccctcgaggactacatcaacgaccggcagtacgacagccgcggccggttcggggagctgctgctcctgctgcccacgctccagtccatcacctggcagatgatcgagcagatccagttcatcaagctgttcggcatggccaagatcgacaacctgctccaggagatgctgctgggcgggagcccgtccgacgcgccccacgcccaccaccccctccacccccacctgatgcaggagcacatgggcaccaacgtgatcgtcgccaacaccatgccgacgcacctgagcaacgggcagatgtgcgagtggccccgcccccggggccaggccgccacccccgagaccccgcagccctccccgcccgggggcagcggctccgagccctacaagctgctccccggggccgtggccaccatcgtgaagcccctgagcgcgatcccccagccgacgatcaccaagcaggaggtcatctgaggactagtccctgttcccagagcccacttttttttctttttttgaaataaaatagcctgtctttcagatctcaaaggctcttttcagagccaccaaaaaaaaaaaaaaaaaaaaaaaaaaaaaaaaaaaaaaaaaaaaaaaaaaaaaaaaaaaaaaaaaaaaaaaaaaaaaaaaaaaaaaaaaaaaaaaaaaaaa

SEQ ID NO: 3869 - RNA, 1586 nt, synthetic construct
  misc_feature 1..1586: note = mRNA a-1 (hSL-A100) (opt1) from Homo sapiens__NP_000448.3__HNF4A(39-474)(S183E)
  source 1..1586: mol_type = other RNA
aggagagtcccgcagtcggcgtccagcggctctgcttgttcgtgtgtgtgtcgttgcaggccttattcaagcttaccatggacaccagcccgtccgaggggaccaacctgaacgcccccaacagcctgggcgtgtccgccctctgcgccatctgcggggaccgggcgacgggcaagcactacggggccagctcctgcgacggctgcaagggcttcttccgccggagcgtccgcaagaaccacatgtactcctgccggttcagccgccagtgcgtggtggacaaggacaagcggaaccagtgccgctactgccggctgaagaagtgcttccgcgccgggatgaagaaggaggccgtccagaacgagcgggaccgcatctccacccggcgcagctcctacgaggacagctccctgcccagcatcaacgcgctcctgcaggccgaggtgctgtcccggcagatcaccagccccgtgtccggcatcaacggggacatccgcgccaagaagatcgccgagatcgccgacgtctgcgagagcatgaaggagcagctcctggtgctggtggagtgggcgaagtacatcccggccttctgcgagctccccctggacgaccaggtcgccctgctccgggcccacgccggcgagcacctcctgctgggggcgaccaagcgcagcatggtgttcaaggacgtgctgctgctcggcaacgactacatcgtcccccggcactgccccgagctggccgagatgtcccgcgtgagcatccggatcctggacgagctcgtgctgccgttccaggagctgcagatcgacgacaacgagtacgcctacctcaaggccatcatcttcttcgaccccgacgccaagggcctgtccgaccccgggaagatcaagcgcctgcgcagccaggtccaggtgtccctcgaggactacatcaacgaccggcagtacgacagccgcggccggttcggggagctgctgctcctgctgcccacgctccagtccatcacctggcagatgatcgagcagatccagttcatcaagctgttcggcatggcgaagatcgacaacctgctccaggagatgctgctgggcgggagcccgtccgacgcgccccacgcccaccaccccctccacccccacctgatgcaggagcacatgggcaccaacgtgatcgtcgccaacaccatgccgacgcacctgagcaacgggcagatgtgcgagtggccccgcccccggggccaggccgccacccccgagaccccgcagccctccccgcccgggggcagcggctccgagccctacaagctgctccccggggccgtggccaccatcgtgaagcccctgagcgccatcccccagccgacgatcaccaagcaggaggtcatctgaggactagtccctgttcccagagcccacttttttttctttttttgaaataaaatagcctgtctttcagatctcaaaggctcttttcagagccaccaaaaaaaaaaaaaaaaaaaaaaaaaaaaaaaaaaaaaaaaaaaaaaaaaaaaaaaaaaaaaaaaaaaaaaaaaaaaaaaaaaaaaaaaaaaaaaaaaaaaa

SEQ ID NO: 3870 - RNA, 1586 nt, synthetic construct
  misc_feature 1..1586: note = mRNA a-1 (hSL-A100) (opt1) from Homo sapiens__NP_000448.3__HNF4A(39-474)(S461A)
  source 1..1586: mol_type = other RNA
aggagagtcccgcagtcggcgtccagcggctctgcttgttcgtgtgtgtgtcgttgcaggccttattcaagcttaccatggacaccagcccgtccgaggggaccaacctgaacgcccccaacagcctgggcgtgtccgccctctgcgccatctgcggggaccgggcgacgggcaagcactacggggccagctcctgcgacggctgcaagggcttcttccgccggagcgtccgcaagaaccacatgtactcctgccggttcagccgccagtgcgtggtggacaaggacaagcggaaccagtgccgctactgccggctgaagaagtgcttccgcgccgggatgaagaaggaggccgtccagaacgagcgggaccgcatctccacccggcgcagctcctacgaggacagctccctgcccagcatcaacgcgctcctgcaggccgaggtgctgtcccggcagatcaccagccccgtgtccggcatcaacggggacatccgcgccaagaagatcgccagcatcgccgacgtctgcgagagcatgaaggagcagctcctggtgctggtggagtgggcgaagtacatcccggccttctgcgagctccccctggacgaccaggtcgccctgctccgggcccacgccggcgagcacctcctgctgggggcgaccaagcgctccatggtgttcaaggacgtgctgctgctcggcaacgactacatcgtcccccggcactgccccgagctggccgagatgagccgcgtgtccatccggatcctggacgagctcgtgctgccgttccaggagctgcagatcgacgacaacgagtacgcctacctcaaggccatcatcttcttcgaccccgacgccaagggcctgagcgaccccgggaagatcaagcgcctgcgctcccaggtccaggtgagcctcgaggactacatcaacgaccggcagtacgactcccgcggccggttcggggagctgctgctcctgctgcccacgctccagagcatcacctggcagatgatcgagcagatccagttcatcaagctgttcggcatggcgaagatcgacaacctgctccaggagatgctgctgggcgggtccccgagcgacgcgccccacgcccaccaccccctccacccccacctgatgcaggagcacatgggcaccaacgtgatcgtcgccaacaccatgccgacgcacctgtccaacgggcagatgtgcgagtggccccgcccccggggccaggccgccacccccgagaccccgcagcccagcccgcccgggggctccggcagcgagccctacaagctgctccccggggccgtggccaccatcgtgaagcccctggccgcgatcccccagccgacgatcaccaagcaggaggtcatctgaggactagtccctgttcccagagcccacttttttttctttttttgaaataaaatagcctgtctttcagatctcaaaggctcttttcagagccaccaaaaaaaaaaaaaaaaaaaaaaaaaaaaaaaaaaaaaaaaaaaaaaaaaaaaaaaaaaaaaaaaaaaaaaaaaaaaaaaaaaaaaaaaaaaaaaaaaaaaa

SEQ ID NO: 3871 - RNA, 1586 nt, synthetic construct; identical to SEQ ID NO: 3822
  misc_feature 1..1586: note = mRNA a-1 (hSL-A100) (opt1) from Homo sapiens__NP_000448.3__HNF4A(39-474)(S461E)
  source 1..1586: mol_type = other RNA

SEQ ID NO: 3872 - RNA, 1586 nt, synthetic construct
  misc_feature 1..1586: note = mRNA a-1 (hSL-A100) (opt1) from Homo sapiens__NP_000448.3__HNF4A(39-474)(S142A_S143A_S313A)
  source 1..1586: mol_type = other RNA
aggagagtcccgcagtcggcgtccagcggctctgcttgttcgtgtgtgtgtcgttgcaggccttattcaagcttaccatggacaccagcccgtccgaggggaccaacctgaacgcccccaacagcctgggcgtgtccgccctctgcgccatctgcggggaccgggcgacgggcaagcactacggggccagctcctgcgacggctgcaagggcttcttccgccggagcgtccgcaagaaccacatgtactcctgccggttcagccgccagtgcgtggtggacaaggacaagcggaaccagtgccgctactgccggctgaagaagtgcttccgcgccgggatgaagaaggaggccgtccagaacgagcgggaccgcatctccacccggcgcgcggcctacgaggacagctccctgcccagcatcaacgccctcctgcaggccgaggtgctgtcccggcagatcaccagccccgtgtccggcatcaacggggacatccgcgccaagaagatcgcgagcatcgccgacgtctgcgagtccatgaaggagcagctcctggtgctggtggagtgggccaagtacatcccggccttctgcgagctccccctggacgaccaggtcgccctgctccgggcgcacgccggcgagcacctcctgctgggggccaccaagcgcagcatggtgttcaaggacgtgctgctgctcggcaacgactacatcgtcccccggcactgccccgagctggccgagatgagccgcgtgtccatccggatcctggacgagctcgtgctgccgttccaggagctgcagatcgacgacaacgagtacgcctacctcaaggcgatcatcttcttcgaccccgacgccaagggcctgagcgaccccgggaagatcaagcgcctgcgcgcccaggtccaggtgtccctcgaggactacatcaacgaccggcagtacgacagccgcggccggttcggggagctgctgctcctgctgcccacgctccagtccatcacctggcagatgatcgagcagatccagttcatcaagctgttcggcatggccaagatcgacaacctgctccaggagatgctgctgggcgggagcccgtccgacgcgccccacgcccaccaccccctccacccccacctgatgcaggagcacatgggcaccaacgtgatcgtcgccaacaccatgccgacgcacctgagcaacgggcagatgtgcgagtggccccgcccccggggccaggccgccacccccgagaccccgcagccctccccgcccgggggcagcggctccgagccctacaagctgctccccggggcggtggccaccatcgtgaagcccctgagcgccatcccccagccgacgatcaccaagcaggaggtcatctgaggactagtccctgttcccagagcccacttttttttctttttttgaaataaaatagcctgtctttcagatctcaaaggctcttttcagagccaccaaaaaaaaaaaaaaaaaaaaaaaaaaaaaaaaaaaaaaaaaaaaaaaaaaaaaaaaaaaaaaaaaaaaaaaaaaaaaaaaaaaaaaaaaaaaaaaaaaaaa

SEQ ID NO: 3873 - RNA, 1586 nt, synthetic construct
  misc_feature 1..1586: note = mRNA a-1 (hSL-A100) (opt1) from Homo sapiens__NP_000448.3__HNF4A(39-474)(S142A_S143A_S313A_K458R )
  source 1..1586: mol_type = other RNA
aggagagtcccgcagtcggcgtccagcggctctgcttgttcgtgtgtgtgtcgttgcaggccttattcaagcttaccatggacaccagcccgtccgaggggaccaacctgaacgcccccaacagcctgggcgtgtccgccctctgcgccatctgcggggaccgggcgacgggcaagcactacggggccagctcctgcgacggctgcaagggcttcttccgccggagcgtccgcaagaaccacatgtactcctgccggttcagccgccagtgcgtggtggacaaggacaagcggaaccagtgccgctactgccggctgaagaagtgcttccgcgccgggatgaagaaggaggccgtccagaacgagcgggaccgcatctccacccggcgcgcggcctacgaggacagctccctgcccagcatcaacgccctcctgcaggccgaggtgctgtcccggcagatcaccagccccgtgtccggcatcaacggggacatccgcgccaagaagatcgcgagcatcgccgacgtctgcgagtccatgaaggagcagctcctggtgctggtggagtgggccaagtacatcccggccttctgcgagctccccctggacgaccaggtcgccctgctccgggcgcacgccggcgagcacctcctgctgggggccaccaagcgcagcatggtgttcaaggacgtgctgctgctcggcaacgactacatcgtcccccggcactgccccgagctggccgagatgagccgcgtgtccatccggatcctggacgagctcgtgctgccgttccaggagctgcagatcgacgacaacgagtacgcctacctcaaggcgatcatcttcttcgaccccgacgccaagggcctgagcgaccccgggaagatcaagcgcctgcgcgcccaggtccaggtgtccctcgaggactacatcaacgaccggcagtacgacagccgcggccggttcggggagctgctgctcctgctgcccacgctccagtccatcacctggcagatgatcgagcagatccagttcatcaagctgttcggcatggccaagatcgacaacctgctccaggagatgctgctgggcgggagcccgtccgacgcgccccacgcccaccaccccctccacccccacctgatgcaggagcacatgggcaccaacgtgatcgtcgccaacaccatgccgacgcacctgagcaacgggcagatgtgcgagtggccccgcccccggggccaggccgccacccccgagaccccgcagccctccccgcccgggggcagcggctccgagccctacaagctgctccccggggcggtggccaccatcgtgcgccccctgagcgccatcccccagccgacgatcaccaagcaggaggtcatctgaggactagtccctgttcccagagcccacttttttttctttttttgaaataaaatagcctgtctttcagatctcaaaggctcttttcagagccaccaaaaaaaaaaaaaaaaaaaaaaaaaaaaaaaaaaaaaaaaaaaaaaaaaaaaaaaaaaaaaaaaaaaaaaaaaaaaaaaaaaaaaaaaaaaaaaaaaaaaa

SEQ ID NO: 3874 - RNA, 1586 nt, synthetic construct
  misc_feature 1..1586: note = mRNA a-1 (hSL-A100) (opt1) from Homo sapiens__NP_000448.3__HNF4A(39-474)(S142A_S143A_S167A_S313A _S378A_T429A_T432A_S436A_K458R)
  source 1..1586: mol_type = other RNA
aggagagtcccgcagtcggcgtccagcggctctgcttgttcgtgtgtgtgtcgttgcaggccttattcaagcttaccatggacaccagcccgtccgaggggaccaacctgaacgcccccaacagcctgggcgtgtccgccctctgcgccatctgcggggaccgggcgacgggcaagcactacggggccagctcctgcgacggctgcaagggcttcttccgccggagcgtccgcaagaaccacatgtactcctgccggttcagccgccagtgcgtggtggacaaggacaagcggaaccagtgccgctactgccggctgaagaagtgcttccgcgccgggatgaagaaggaggccgtccagaacgagcgggaccgcatctccacccggcgcgcggcctacgaggacagctccctgcccagcatcaacgccctcctgcaggccgaggtgctgtcccggcagatcaccgcccccgtgagcggcatcaacggggacatccgcgcgaagaagatcgcctccatcgccgacgtctgcgagagcatgaaggagcagctcctggtgctggtggagtgggccaagtacatcccggccttctgcgagctccccctggacgaccaggtcgcgctgctccgggcccacgccggcgagcacctcctgctgggggccaccaagcgctccatggtgttcaaggacgtgctgctgctcggcaacgactacatcgtcccccggcactgccccgagctggccgagatgagccgcgtgagcatccggatcctggacgagctcgtgctgccgttccaggagctgcagatcgacgacaacgagtacgcgtacctcaaggccatcatcttcttcgaccccgacgccaagggcctgtccgaccccgggaagatcaagcgcctgcgcgcccaggtccaggtgagcctcgaggactacatcaacgaccggcagtacgactcccgcggccggttcggggagctgctgctcctgctgcccacgctccagagcatcacctggcagatgatcgagcagatccagttcatcaagctgttcggcatggccaagatcgacaacctgctccaggagatgctgctgggcggggcgccgtccgacgcgccccacgcccaccaccccctccacccccacctgatgcaggagcacatgggcaccaacgtgatcgtcgccaacaccatgccgacgcacctgagcaacgggcagatgtgcgagtggccccgcccccggggccaggccgccgcccccgaggccccgcagcccgccccgcccgggggctccggcagcgagccctacaagctgctccccggggcggtggccaccatcgtgcgccccctgtccgccatcccccagccgaccatcaccaagcaggaggtcatctgaggactagtccctgttcccagagcccacttttttttctttttttgaaataaaatagcctgtctttcagatctcaaaggctcttttcagagccaccaaaaaaaaaaaaaaaaaaaaaaaaaaaaaaaaaaaaaaaaaaaaaaaaaaaaaaaaaaaaaaaaaaaaaaaaaaaaaaaaaaaaaaaaaaaaaaaaaaaaa

SEQ ID NO: 3875 - RNA, 1586 nt, synthetic construct
  misc_feature 1..1586: note = mRNA a-1 (hSL-A100) (opt1) from Homo sapiens__NP_000448.3__HNF4A(39-474)(S142A_S143A_S148A_S167A _S313A_S378A_T429A_T432A_S436A_K458R)
  source 1..1586: mol_type = other RNA
aggagagtcccgcagtcggcgtccagcggctctgcttgttcgtgtgtgtgtcgttgcaggccttattcaagcttaccatggacaccagcccgtccgaggggaccaacctgaacgcccccaacagcctgggcgtgtccgccctctgcgccatctgcggggaccgggcgacgggcaagcactacggggccagctcctgcgacggctgcaagggcttcttccgccggagcgtccgcaagaaccacatgtactcctgccggttcagccgccagtgcgtggtggacaaggacaagcggaaccagtgccgctactgccggctgaagaagtgcttccgcgccgggatgaagaaggaggccgtccagaacgagcgggaccgcatctccacccggcgcgcggcctacgaggacagcgccctgccctccatcaacgccctcctgcaggccgaggtgctgagccggcagatcaccgcgcccgtgtccggcatcaacggggacatccgcgccaagaagatcgccagcatcgccgacgtctgcgagtccatgaaggagcagctcctggtgctggtggagtgggccaagtacatcccggcgttctgcgagctccccctggacgaccaggtcgccctgctccgggcccacgccggcgagcacctcctgctgggggccaccaagcgcagcatggtgttcaaggacgtgctgctgctcggcaacgactacatcgtcccccggcactgccccgagctggcggagatgtcccgcgtgagcatccggatcctggacgagctcgtgctgccgttccaggagctgcagatcgacgacaacgagtacgcctacctcaaggccatcatcttcttcgaccccgacgccaagggcctgagcgaccccgggaagatcaagcgcctgcgcgcccaggtccaggtgtccctcgaggactacatcaacgaccggcagtacgacagccgcggccggttcggggagctgctgctcctgctgcccacgctccagtccatcacctggcagatgatcgagcagatccagttcatcaagctgttcggcatggcgaagatcgacaacctgctccaggagatgctgctgggcggggccccgagcgacgcgccccacgcccaccaccccctccacccccacctgatgcaggagcacatgggcaccaacgtgatcgtcgccaacaccatgccgacgcacctgtccaacgggcagatgtgcgagtggccccgcccccggggccaggccgccgcccccgaggccccgcagcccgcgccgcccgggggcagcggctccgagccctacaagctgctccccggggccgtggccaccatcgtgcgccccctgagcgccatcccccagccgaccatcaccaagcaggaggtcatctgaggactagtccctgttcccagagcccacttttttttctttttttgaaataaaatagcctgtctttcagatctcaaaggctcttttcagagccaccaaaaaaaaaaaaaaaaaaaaaaaaaaaaaaaaaaaaaaaaaaaaaaaaaaaaaaaaaaaaaaaaaaaaaaaaaaaaaaaaaaaaaaaaaaaaaaaaaaaaa

SEQ ID NO: 3876 - RNA, 1586 nt, synthetic construct
  misc_feature 1..1586: note = mRNA a-1 (hSL-A100) (opt1) from Homo sapiens__NP_000448.3__HNF4A(39-474)(K106R_K108R_K126R_K127R _S142A_S143A_S148A_S167A_S313A_S378A_T429A_T432A_S436A_K458 R)
  source 1..1586: mol_type = other RNA
aggagagtcccgcagtcggcgtccagcggctctgcttgttcgtgtgtgtgtcgttgcaggccttattcaagcttaccatggacaccagcccgtccgaggggaccaacctgaacgcccccaacagcctgggcgtgtccgccctctgcgccatctgcggggaccgggcgacgggcaagcactacggggccagctcctgcgacggctgcaagggcttcttccgccggagcgtccgcaagaaccacatgtactcctgccggttcagccgccagtgcgtggtggaccgggaccgccggaaccagtgccgctactgccggctgaagaagtgcttccgcgccgggatgcggcgcgaggccgtccagaacgagcgggaccgcatctccacccggcgcgcggcctacgaggacagcgccctgccctccatcaacgccctcctgcaggccgaggtgctgagccggcagatcaccgcgcccgtgtccggcatcaacggggacatccgcgccaagaagatcgccagcatcgccgacgtctgcgagtccatgaaggagcagctcctggtgctggtggagtgggccaagtacatcccggcgttctgcgagctccccctggacgaccaggtcgccctgctccgggcccacgccggcgagcacctcctgctgggggccaccaagcgcagcatggtgttcaaggacgtgctgctgctcggcaacgactacatcgtcccccgccactgccccgagctggcggagatgtcccgggtgagcatccgcatcctggacgagctcgtgctgccgttccaggagctgcagatcgacgacaacgagtacgcctacctcaaggccatcatcttcttcgaccccgacgccaagggcctgagcgaccccgggaagatcaagcggctgcgcgcccaggtccaggtgtccctcgaggactacatcaacgaccggcagtacgacagccgcggccggttcggggagctgctgctcctgctgcccacgctccagtccatcacctggcagatgatcgagcagatccagttcatcaagctgttcggcatggcgaagatcgacaacctgctccaggagatgctgctgggcggggccccgagcgacgcgccccacgcccaccaccccctccacccccacctgatgcaggagcacatgggcaccaacgtgatcgtcgccaacaccatgccgacgcacctgtccaacgggcagatgtgcgagtggccccgcccccggggccaggccgccgcccccgaggccccgcagcccgcgccgcccgggggcagcggctccgagccctacaagctgctccccggggccgtggccaccatcgtgcgccccctgagcgccatcccccagccgaccatcaccaagcaggaggtcatctgaggactagtccctgttcccagagcccacttttttttctttttttgaaataaaatagcctgtctttcagatctcaaaggctcttttcagagccaccaaaaaaaaaaaaaaaaaaaaaaaaaaaaaaaaaaaaaaaaaaaaaaaaaaaaaaaaaaaaaaaaaaaaaaaaaaaaaaaaaaaaaaaaaaaaaaaaaaaaa

SEQ ID NO: 3877 - RNA, 1586 nt, synthetic construct
  misc_feature 1..1586: note = mRNA a-1 (hSL-A100) (opt1) from Homo sapiens__NP_000448.3__HNF4A(39-474)(S142A_S143A_S148A_T166A _S167A_S313A_S378A_T429A_T432A_S436A_K458R)
  source 1..1586: mol_type = other RNA
aggagagtcccgcagtcggcgtccagcggctctgcttgttcgtgtgtgtgtcgttgcaggccttattcaagcttaccatggacaccagcccgtccgaggggaccaacctgaacgcccccaacagcctgggcgtgtccgccctctgcgccatctgcggggaccgggcgacgggcaagcactacggggccagctcctgcgacggctgcaagggcttcttccgccggagcgtccgcaagaaccacatgtactcctgccggttcagccgccagtgcgtggtggacaaggacaagcggaaccagtgccgctactgccggctgaagaagtgcttccgcgccgggatgaagaaggaggccgtccagaacgagcgggaccgcatctccacccggcgcgcggcctacgaggacagcgccctgccctccatcaacgccctcctgcaggccgaggtgctgagccggcagatcgcggcccccgtgtccggcatcaacggggacatccgcgccaagaagatcgccagcatcgccgacgtctgcgagtccatgaaggagcagctcctggtgctggtggagtgggcgaagtacatcccggccttctgcgagctccccctggacgaccaggtcgccctgctccgggcccacgccggcgagcacctcctgctgggggcgaccaagcgcagcatggtgttcaaggacgtgctgctgctcggcaacgactacatcgtcccccggcactgccccgagctggccgagatgtcccgcgtgagcatccggatcctggacgagctcgtgctgccgttccaggagctgcagatcgacgacaacgagtacgcctacctcaaggccatcatcttcttcgaccccgacgccaagggcctgagcgaccccgggaagatcaagcgcctgcgcgcgcaggtccaggtgtccctcgaggactacatcaacgaccggcagtacgacagccgcggccggttcggggagctgctgctcctgctgcccaccctccagtccatcacgtggcagatgatcgagcagatccagttcatcaagctgttcggcatggccaagatcgacaacctgctccaggagatgctgctgggcggggccccgagcgacgcgccccacgcccaccaccccctccacccccacctgatgcaggagcacatgggcaccaacgtgatcgtcgccaacaccatgccgacccacctgtccaacgggcagatgtgcgagtggccccgcccccggggccaggccgccgcccccgaggcgccgcagcccgccccgcccgggggcagcggctccgagccctacaagctgctccccggggccgtggccacgatcgtgcgccccctgagcgccatcccccagccgaccatcaccaagcaggaggtcatctgaggactagtccctgttcccagagcccacttttttttctttttttgaaataaaatagcctgtctttcagatctcaaaggctcttttcagagccaccaaaaaaaaaaaaaaaaaaaaaaaaaaaaaaaaaaaaaaaaaaaaaaaaaaaaaaaaaaaaaaaaaaaaaaaaaaaaaaaaaaaaaaaaaaaaaaaaaaaaa

SEQ ID NO: 3878 - RNA, 1586 nt, synthetic construct
  misc_feature 1..1586: note = mRNA a-1 (hSL-A100) (opt1) from Homo sapiens__NP_000448.3__HNF4A(39-474)(S87A_S142A_S143A_S148A_ T166A_S167A_S313A_S378A_T429A_T432A_S436A_K458R)
  source 1..1586: mol_type = other RNA
aggagagtcccgcagtcggcgtccagcggctctgcttgttcgtgtgtgtgtcgttgcaggccttattcaagcttaccatggacaccagcccgtccgaggggaccaacctgaacgcccccaacagcctgggcgtgtccgccctctgcgccatctgcggggaccgggcgacgggcaagcactacggggccagctcctgcgacggctgcaagggcttcttccgccgggccgtccgcaagaaccacatgtacagctgccggttctcccgccagtgcgtggtggacaaggacaagcggaaccagtgccgctactgccggctgaagaagtgcttccgcgccgggatgaagaaggaggcggtccagaacgagcgggaccgcatcagcacccggcgcgccgcctacgaggactccgccctgcccagcatcaacgccctcctgcaggcggaggtgctgtcccggcagatcgccgcccccgtgagcggcatcaacggggacatccgcgccaagaagatcgcctccatcgcggacgtctgcgagagcatgaaggagcagctcctggtgctggtggagtgggccaagtacatcccggccttctgcgagctccccctggacgaccaggtcgccctgctccgggcccacgcgggcgagcacctcctgctgggggccaccaagcgctccatggtgttcaaggacgtgctgctgctcggcaacgactacatcgtcccccggcactgccccgagctggccgagatgagccgcgtgtccatccggatcctggacgagctcgtgctgccgttccaggagctgcagatcgacgacaacgagtacgcctacctcaaggccatcatcttcttcgaccccgacgcgaagggcctgagcgaccccgggaagatcaagcgcctgcgcgcccaggtccaggtgagcctcgaggactacatcaacgaccggcagtacgactcccgcggccggttcggggagctgctgctcctgctgcccaccctccagagcatcacgtggcagatgatcgagcagatccagttcatcaagctgttcggcatggccaagatcgacaacctgctccaggagatgctgctgggcggggccccgtccgacgcgccccacgcccaccaccccctccacccccacctgatgcaggagcacatgggcaccaacgtgatcgtcgccaacaccatgccgacccacctgagcaacgggcagatgtgcgagtggccccgcccccggggccaggccgccgcgcccgaggccccgcagcccgccccgcccgggggctccggcagcgagccctacaagctgctccccggggccgtggccacgatcgtgcgccccctgtccgcgatcccccagccgaccatcaccaagcaggaggtcatctgaggactagtccctgttcccagagcccacttttttttctttttttgaaataaaatagcctgtctttcagatctcaaaggctcttttcagagccaccaaaaaaaaaaaaaaaaaaaaaaaaaaaaaaaaaaaaaaaaaaaaaaaaaaaaaaaaaaaaaaaaaaaaaaaaaaaaaaaaaaaaaaaaaaaaaaaaaaaaa

SEQ ID NO: 3879 - RNA, 1586 nt, synthetic construct
  misc_feature 1..1586: note = mRNA a-1 (hSL-A100) (opt1) from Homo sapiens__NP_000448.3__HNF4A(39-474)(S87A_K106R_K108R_K126R_ K127R_S142A_S143A_S148A_T166A_S167A_S313A_S378A_T429A_T432A _S436A_K458R)
  source 1..1586: mol_type = other RNA
aggagagtcccgcagtcggcgtccagcggctctgcttgttcgtgtgtgtgtcgttgcaggccttattcaagcttaccatggacaccagcccgtccgaggggaccaacctgaacgcccccaacagcctgggcgtgtccgccctctgcgccatctgcggggaccgggcgacgggcaagcactacggggccagctcctgcgacggctgcaagggcttcttccgccgggccgtccgcaagaaccacatgtacagctgccggttctcccgccagtgcgtggtggaccgggaccgccggaaccagtgccgctactgccggctgaagaagtgcttccgcgccgggatgcggcgcgaggcggtccagaacgagcgggaccgcatcagcacccggcgcgccgcctacgaggactccgccctgcccagcatcaacgccctcctgcaggcggaggtgctgtcccggcagatcgccgcccccgtgagcggcatcaacggggacatccgcgccaagaagatcgcctccatcgcggacgtctgcgagagcatgaaggagcagctcctggtgctggtggagtgggccaagtacatcccggccttctgcgagctccccctggacgaccaggtcgccctgctccgggcccacgcgggcgagcacctcctgctgggggccaccaagcgctccatggtgttcaaggacgtgctgctgctcggcaacgactacatcgtcccccgccactgccccgagctggccgagatgagccgggtgtccatccgcatcctggacgagctcgtgctgccgttccaggagctgcagatcgacgacaacgagtacgcctacctcaaggccatcatcttcttcgaccccgacgcgaagggcctgagcgaccccgggaagatcaagcggctgcgcgcccaggtccaggtgagcctcgaggactacatcaacgaccggcagtacgactcccgcggccggttcggggagctgctgctcctgctgcccaccctccagagcatcacgtggcagatgatcgagcagatccagttcatcaagctgttcggcatggccaagatcgacaacctgctccaggagatgctgctgggcggggccccgtccgacgcgccccacgcccaccaccccctccacccccacctgatgcaggagcacatgggcaccaacgtgatcgtcgccaacaccatgccgacccacctgagcaacgggcagatgtgcgagtggccccgcccccggggccaggccgccgcgcccgaggccccgcagcccgccccgcccgggggctccggcagcgagccctacaagctgctccccggggccgtggccacgatcgtgcgccccctgtccgcgatcccccagccgaccatcaccaagcaggaggtcatctgaggactagtccctgttcccagagcccacttttttttctttttttgaaataaaatagcctgtctttcagatctcaaaggctcttttcagagccaccaaaaaaaaaaaaaaaaaaaaaaaaaaaaaaaaaaaaaaaaaaaaaaaaaaaaaaaaaaaaaaaaaaaaaaaaaaaaaaaaaaaaaaaaaaaaaaaaaaaaa

SEQ ID NO: 3880 - RNA, 1586 nt, synthetic construct
  misc_feature 1..1586: note = mRNA a-1 (hSL-A100) (opt1) from Homo sapiens__NP_000448.3__HNF4A(39-474)(S87A_K106R_K108R_K126R_ K127R)
  source 1..1586: mol_type = other RNA
aggagagtcccgcagtcggcgtccagcggctctgcttgttcgtgtgtgtgtcgttgcaggccttattcaagcttaccatggacaccagcccgtccgaggggaccaacctgaacgcccccaacagcctgggcgtgtccgccctctgcgccatctgcggggaccgggcgacgggcaagcactacggggccagctcctgcgacggctgcaagggcttcttccgccgggccgtccgcaagaaccacatgtacagctgccggttctcccgccagtgcgtggtggaccgggaccgccggaaccagtgccgctactgccggctgaagaagtgcttccgcgccgggatgcggcgcgaggcggtccagaacgagcgggaccgcatcagcacccggcgctccagctacgaggactccagcctgccctccatcaacgccctcctgcaggccgaggtgctgagccggcagatcacctcccccgtgagcggcatcaacggggacatccgcgccaagaagatcgcctccatcgcggacgtctgcgagagcatgaaggagcagctcctggtgctggtggagtgggccaagtacatcccggccttctgcgagctccccctggacgaccaggtcgccctgctccgggcccacgcgggcgagcacctcctgctgggggccaccaagcgcagcatggtgttcaaggacgtgctgctgctcggcaacgactacatcgtcccccgccactgccccgagctggccgagatgtcccgggtgagcatccgcatcctggacgagctcgtgctgccgttccaggagctgcagatcgacgacaacgagtacgcctacctcaaggccatcatcttcttcgaccccgacgcgaagggcctgtccgaccccgggaagatcaagcggctgcgcagccaggtccaggtgtccctcgaggactacatcaacgaccggcagtacgacagccgcggccggttcggggagctgctgctcctgctgcccacgctccagtccatcacctggcagatgatcgagcagatccagttcatcaagctgttcggcatggccaagatcgacaacctgctccaggagatgctgctgggcgggagcccgtccgacgcgccccacgcccaccaccccctccacccccacctgatgcaggagcacatgggcaccaacgtgatcgtcgccaacaccatgccgacgcacctgagcaacgggcagatgtgcgagtggccccgcccccggggccaggccgccacccccgagaccccgcagccctccccgcccgggggcagcggctccgagccctacaagctgctccccggggccgtggccaccatcgtgaagcccctgagcgcgatcccccagccgacgatcaccaagcaggaggtcatctgaggactagtccctgttcccagagcccacttttttttctttttttgaaataaaatagcctgtctttcagatctcaaaggctcttttcagagccaccaaaaaaaaaaaaaaaaaaaaaaaaaaaaaaaaaaaaaaaaaaaaaaaaaaaaaaaaaaaaaaaaaaaaaaaaaaaaaaaaaaaaaaaaaaaaaaaaaaaaa

SEQ ID NO: 3881 - RNA, 1586 nt, synthetic construct
  misc_feature 1..1586: note = mRNA a-1 (hSL-A100) (opt1) from Homo sapiens__NP_000448.3__HNF4A(39-474)(S87A_K106R_K108R_K126R_ K127R_S142A_S143A_S148A_T166A_S167A_S313A_S378A_T429A_T432A _S436A_K458R_S461A)
  source 1..1586: mol_type = other RNA
aggagagtcccgcagtcggcgtccagcggctctgcttgttcgtgtgtgtgtcgttgcaggccttattcaagcttaccatggacaccagcccgtccgaggggaccaacctgaacgcccccaacagcctgggcgtgtccgccctctgcgccatctgcggggaccgggcgacgggcaagcactacggggccagctcctgcgacggctgcaagggcttcttccgccgggccgtccgcaagaaccacatgtacagctgccggttctcccgccagtgcgtggtggaccgggaccgccggaaccagtgccgctactgccggctgaagaagtgcttccgcgccgggatgcggcgcgaggcggtccagaacgagcgggaccgcatcagcacccggcgcgccgcctacgaggactccgccctgcccagcatcaacgccctcctgcaggcggaggtgctgtcccggcagatcgccgcccccgtgagcggcatcaacggggacatccgcgccaagaagatcgcctccatcgcggacgtctgcgagagcatgaaggagcagctcctggtgctggtggagtgggccaagtacatcccggccttctgcgagctccccctggacgaccaggtcgccctgctccgggcccacgcgggcgagcacctcctgctgggggccaccaagcgctccatggtgttcaaggacgtgctgctgctcggcaacgactacatcgtcccccgccactgccccgagctggccgagatgagccgggtgtccatccgcatcctggacgagctcgtgctgccgttccaggagctgcagatcgacgacaacgagtacgcctacctcaaggccatcatcttcttcgaccccgacgcgaagggcctgagcgaccccgggaagatcaagcggctgcgcgcccaggtccaggtgagcctcgaggactacatcaacgaccggcagtacgactcccgcggccggttcggggagctgctgctcctgctgcccaccctccagagcatcacgtggcagatgatcgagcagatccagttcatcaagctgttcggcatggccaagatcgacaacctgctccaggagatgctgctgggcggggccccgtccgacgcgccccacgcccaccaccccctccacccccacctgatgcaggagcacatgggcaccaacgtgatcgtcgccaacaccatgccgacccacctgagcaacgggcagatgtgcgagtggccccgcccccggggccaggccgccgcgcccgaggccccgcagcccgccccgcccgggggctccggcagcgagccctacaagctgctccccggggccgtggccacgatcgtgcgccccctggcggccatcccccagccgaccatcaccaagcaggaggtcatctgaggactagtccctgttcccagagcccacttttttttctttttttgaaataaaatagcctgtctttcagatctcaaaggctcttttcagagccaccaaaaaaaaaaaaaaaaaaaaaaaaaaaaaaaaaaaaaaaaaaaaaaaaaaaaaaaaaaaaaaaaaaaaaaaaaaaaaaaaaaaaaaaaaaaaaaaaaaaaa

SEQ ID NO: 3882 - RNA, 1586 nt, synthetic construct
  misc_feature 1..1586: note = mRNA a-1 (hSL-A100) (opt1) from Homo sapiens__NP_000448.3__HNF4A(39-474)(S87A_K106R_K108R_K126R_ K127R_S142A_S143A_S148A_T166A_S167A_S313A_S378A_T429A_T432A _S436A_K458R_S461E)
  source 1..1586: mol_type = other RNA
aggagagtcccgcagtcggcgtccagcggctctgcttgttcgtgtgtgtgtcgttgcaggccttattcaagcttaccatggacaccagcccgtccgaggggaccaacctgaacgcccccaacagcctgggcgtgtccgccctctgcgccatctgcggggaccgggcgacgggcaagcactacggggccagctcctgcgacggctgcaagggcttcttccgccgggccgtccgcaagaaccacatgtacagctgccggttctcccgccagtgcgtggtggaccgggaccgccggaaccagtgccgctactgccggctgaagaagtgcttccgcgccgggatgcggcgcgaggcggtccagaacgagcgggaccgcatcagcacccggcgcgccgcctacgaggactccgccctgcccagcatcaacgccctcctgcaggcggaggtgctgtcccggcagatcgccgcccccgtgagcggcatcaacggggacatccgcgccaagaagatcgcctccatcgcggacgtctgcgagagcatgaaggagcagctcctggtgctggtggagtgggccaagtacatcccggccttctgcgagctccccctggacgaccaggtcgccctgctccgggcccacgcgggcgagcacctcctgctgggggccaccaagcgctccatggtgttcaaggacgtgctgctgctcggcaacgactacatcgtcccccgccactgccccgagctggccgagatgagccgggtgtccatccgcatcctggacgagctcgtgctgccgttccaggagctgcagatcgacgacaacgagtacgcctacctcaaggccatcatcttcttcgaccccgacgcgaagggcctgagcgaccccgggaagatcaagcggctgcgcgcccaggtccaggtgagcctcgaggactacatcaacgaccggcagtacgactcccgcggccggttcggggagctgctgctcctgctgcccaccctccagagcatcacgtggcagatgatcgagcagatccagttcatcaagctgttcggcatggccaagatcgacaacctgctccaggagatgctgctgggcggggccccgtccgacgcgccccacgcccaccaccccctccacccccacctgatgcaggagcacatgggcaccaacgtgatcgtcgccaacaccatgccgacccacctgagcaacgggcagatgtgcgagtggccccgcccccggggccaggccgccgcgcccgaggccccgcagcccgccccgcccgggggctccggcagcgagccctacaagctgctccccggggccgtggccacgatcgtgcgccccctggaggcgatcccccagccgaccatcaccaagcaggaggtcatctgaggactagtccctgttcccagagcccacttttttttctttttttgaaataaaatagcctgtctttcagatctcaaaggctcttttcagagccaccaaaaaaaaaaaaaaaaaaaaaaaaaaaaaaaaaaaaaaaaaaaaaaaaaaaaaaaaaaaaaaaaaaaaaaaaaaaaaaaaaaaaaaaaaaaaaaaaaaaaa

SEQ ID NO: 3883 - RNA, 1586 nt, synthetic construct
  misc_feature 1..1586: note = mRNA a-1 (hSL-A100) (opt1) from Homo sapiens__NP_000448.3__HNF4A(39-474)(S87A_K106R_K108R_K126R_ K127R_S142A_S143A_S148E_T166A_S167E_S313A_S378E_T429E_T432E _S436E_K458R_S461E)
  source 1..1586: mol_type = other RNA
aggagagtcccgcagtcggcgtccagcggctctgcttgttcgtgtgtgtgtcgttgcaggccttattcaagcttaccatggacaccagcccgtccgaggggaccaacctgaacgcccccaacagcctgggcgtgtccgccctctgcgccatctgcggggaccgggcgacgggcaagcactacggggccagctcctgcgacggctgcaagggcttcttccgccgggccgtccgcaagaaccacatgtacagctgccggttctcccgccagtgcgtggtggaccgggaccgccggaaccagtgccgctactgccggctgaagaagtgcttccgcgccgggatgcggcgcgaggcggtccagaacgagcgggaccgcatcagcacccggcgcgccgcctacgaggactccgagctgcccagcatcaacgccctcctgcaggccgaggtgctgtcccggcagatcgcggagcccgtgagcggcatcaacggggacatccgcgccaagaagatcgcctccatcgccgacgtctgcgagagcatgaaggagcagctcctggtgctggtggagtgggccaagtacatcccggcgttctgcgagctccccctggacgaccaggtcgccctgctccgggcccacgccggcgagcacctcctgctgggggccaccaagcgctccatggtgttcaaggacgtgctgctgctcggcaacgactacatcgtcccccgccactgccccgagctggcggagatgagccgggtgtccatccgcatcctggacgagctcgtgctgccgttccaggagctgcagatcgacgacaacgagtacgcctacctcaaggccatcatcttcttcgaccccgacgccaagggcctgagcgaccccgggaagatcaagcggctgcgcgcccaggtccaggtgagcctcgaggactacatcaacgaccggcagtacgactcccgcggccggttcggggagctgctgctcctgctgcccaccctccagagcatcacgtggcagatgatcgagcagatccagttcatcaagctgttcggcatggcgaagatcgacaacctgctccaggagatgctgctgggcggggagccgtccgacgcgccccacgcccaccaccccctccacccccacctgatgcaggagcacatgggcaccaacgtgatcgtcgccaacaccatgccgacccacctgagcaacgggcagatgtgcgagtggccccgcccccggggccaggccgccgagcccgaggagccgcagcccgagccgcccgggggctccggcagcgagccctacaagctgctccccggggccgtggccacgatcgtgcgccccctggaggccatcccccagccgaccatcaccaagcaggaggtcatctgaggactagtccctgttcccagagcccacttttttttctttttttgaaataaaatagcctgtctttcagatctcaaaggctcttttcagagccaccaaaaaaaaaaaaaaaaaaaaaaaaaaaaaaaaaaaaaaaaaaaaaaaaaaaaaaaaaaaaaaaaaaaaaaaaaaaaaaaaaaaaaaaaaaaaaaaaaaaaa

SEQ ID NO: 3884 - RNA, 1586 nt, synthetic construct
  misc_feature 1..1586: note = mRNA a-1 (hSL-A100) (opt1) from Homo sapiens__NP_000448.3__HNF4A(39-474)(S87A_K106R_K108R_K126R_ K127R_S142A_S143A_S148A_T166A_S167A_K179R_K180R_S313A_S378A _T429A_T432A_S436A_K458R_S461E)
  source 1..1586: mol_type = other RNA
aggagagtcccgcagtcggcgtccagcggctctgcttgttcgtgtgtgtgtcgttgcaggccttattcaagcttaccatggacaccagcccgtccgaggggaccaacctgaacgcccccaacagcctgggcgtgtccgccctctgcgccatctgcggggaccgggcgacgggcaagcactacggggccagctcctgcgacggctgcaagggcttcttccgccgggccgtccgcaagaaccacatgtacagctgccggttctcccgccagtgcgtggtggaccgggaccgccggaaccagtgccgctactgccggctgaagaagtgcttccgcgccgggatgcggcgcgaggcggtccagaacgagcgggaccgcatcagcacccggcgcgccgcctacgaggactccgccctgcccagcatcaacgccctcctgcaggcggaggtgctgtcccggcagatcgccgcccccgtgagcggcatcaacggggacatccgcgcccggcgcatcgcctccatcgcggacgtctgcgagagcatgaaggagcagctcctggtgctggtggagtgggccaagtacatcccggccttctgcgagctccccctggacgaccaggtcgccctgctccgcgcccacgcgggcgagcacctcctgctgggggccaccaagcggtccatggtgttcaaggacgtgctgctgctcggcaacgactacatcgtcccccgccactgccccgagctggccgagatgagccgggtgtccatccgcatcctggacgagctcgtgctgccgttccaggagctgcagatcgacgacaacgagtacgcctacctcaaggccatcatcttcttcgaccccgacgcgaagggcctgagcgaccccgggaagatcaagcggctgcgcgcccaggtccaggtgagcctcgaggactacatcaacgaccggcagtacgactcccgcggccggttcggggagctgctgctcctgctgcccaccctccagagcatcacgtggcagatgatcgagcagatccagttcatcaagctgttcggcatggccaagatcgacaacctgctccaggagatgctgctgggcggggccccgtccgacgcgccccacgcccaccaccccctccacccccacctgatgcaggagcacatgggcaccaacgtgatcgtcgccaacaccatgccgacccacctgagcaacgggcagatgtgcgagtggccccgcccccggggccaggccgccgcgcccgaggccccgcagcccgccccgcccgggggctccggcagcgagccctacaagctgctccccggggccgtggccacgatcgtgcgccccctggaggcgatcccccagccgaccatcaccaagcaggaggtcatctgaggactagtccctgttcccagagcccacttttttttctttttttgaaataaaatagcctgtctttcagatctcaaaggctcttttcagagccaccaaaaaaaaaaaaaaaaaaaaaaaaaaaaaaaaaaaaaaaaaaaaaaaaaaaaaaaaaaaaaaaaaaaaaaaaaaaaaaaaaaaaaaaaaaaaaaaaaaaaa

SEQ ID NO: 3885 - RNA, 1586 nt, synthetic construct
  misc_feature 1..1586: note = mRNA a-1 (hSL-A100) (opt1) from Homo sapiens__NP_000448.3__HNF4A(39-474)(S87A_K106R_K108R_K126R_ K127R_S142A_S143A_S148A_T166A_S167A_K300R_K307R_K309R_S313A _S378A_T429A_T432A_S436A_K458R_S461E)
  source 1..1586: mol_type = other RNA
aggagagtcccgcagtcggcgtccagcggctctgcttgttcgtgtgtgtgtcgttgcaggccttattcaagcttaccatggacaccagcccgtccgaggggaccaacctgaacgcccccaacagcctgggcgtgtccgccctctgcgccatctgcggggaccgggcgacgggcaagcactacggggccagctcctgcgacggctgcaagggcttcttccgccgggccgtccgcaagaaccacatgtacagctgccggttctcccgccagtgcgtggtggaccgggaccgccggaaccagtgccgctactgccggctgaagaagtgcttccgcgccgggatgcggcgcgaggcggtccagaacgagcgggaccgcatcagcacccggcgcgccgcctacgaggactccgccctgcccagcatcaacgccctcctgcaggcggaggtgctgtcccggcagatcgccgcccccgtgagcggcatcaacggggacatccgcgccaagaagatcgcctccatcgcggacgtctgcgagagcatgaaggagcagctcctggtgctggtggagtgggccaagtacatcccggccttctgcgagctccccctggacgaccaggtcgccctgctccgggcccacgcgggcgagcacctcctgctgggggccaccaagcgctccatggtgttcaaggacgtgctgctgctcggcaacgactacatcgtcccccgccactgccccgagctggccgagatgagccgggtgtccatccgcatcctggacgagctcgtgctgccgttccaggagctgcagatcgacgacaacgagtacgcctacctcaaggccatcatcttcttcgaccccgacgcgcggggcctgagcgaccccgggcgcatccggcgcctgcgggcccaggtccaggtgagcctcgaggactacatcaacgaccgccagtacgactcccggggccgcttcggggagctgctgctcctgctgcccaccctccagagcatcacgtggcagatgatcgagcagatccagttcatcaagctgttcggcatggccaagatcgacaacctgctccaggagatgctgctgggcggggccccgtccgacgcgccccacgcccaccaccccctccacccccacctgatgcaggagcacatgggcaccaacgtgatcgtcgccaacaccatgccgacccacctgagcaacgggcagatgtgcgagtggccccggccccgcggccaggccgccgcgcccgaggccccgcagcccgccccgcccgggggctccggcagcgagccctacaagctgctccccggggccgtggccacgatcgtgcggcccctggaggcgatcccccagccgaccatcaccaagcaggaggtcatctgaggactagtccctgttcccagagcccacttttttttctttttttgaaataaaatagcctgtctttcagatctcaaaggctcttttcagagccaccaaaaaaaaaaaaaaaaaaaaaaaaaaaaaaaaaaaaaaaaaaaaaaaaaaaaaaaaaaaaaaaaaaaaaaaaaaaaaaaaaaaaaaaaaaaaaaaaaaaaa

SEQ ID NO: 3886 - RNA, 1586 nt, synthetic construct
  misc_feature 1..1586: note = mRNA a-1 (hSL-A100) (opt1) from Homo sapiens__NP_000448.3__HNF4A(39-474)(S87A_K106R_K108R_K126R_ K127R_S142A_S143A_S148A_T166A_S167A_S313A_S378A_T429A_T432A _S436A_K447R_K458R_S461E_K470R)
  source 1..1586: mol_type = other RNA
aggagagtcccgcagtcggcgtccagcggctctgcttgttcgtgtgtgtgtcgttgcaggccttattcaagcttaccatggacaccagcccgtccgaggggaccaacctgaacgcccccaacagcctgggcgtgtccgccctctgcgccatctgcggggaccgggcgacgggcaagcactacggggccagctcctgcgacggctgcaagggcttcttccgccgggccgtccgcaagaaccacatgtacagctgccggttctcccgccagtgcgtggtggaccgggaccgccggaaccagtgccgctactgccggctgaagaagtgcttccgcgccgggatgcggcgcgaggcggtccagaacgagcgggaccgcatcagcacccggcgcgccgcctacgaggactccgccctgcccagcatcaacgccctcctgcaggcggaggtgctgtcccggcagatcgccgcccccgtgagcggcatcaacggggacatccgcgccaagaagatcgcctccatcgcggacgtctgcgagagcatgaaggagcagctcctggtgctggtggagtgggccaagtacatcccggccttctgcgagctccccctggacgaccaggtcgccctgctccgggcccacgcgggcgagcacctcctgctgggggccaccaagcgctccatggtgttcaaggacgtgctgctgctcggcaacgactacatcgtcccccgccactgccccgagctggccgagatgagccgggtgtccatccgcatcctggacgagctcgtgctgccgttccaggagctgcagatcgacgacaacgagtacgcctacctcaaggccatcatcttcttcgaccccgacgcgaagggcctgagcgaccccgggaagatcaagcggctgcgcgcccaggtccaggtgagcctcgaggactacatcaacgaccggcagtacgactcccgcggccggttcggggagctgctgctcctgctgcccaccctccagagcatcacgtggcagatgatcgagcagatccagttcatcaagctgttcggcatggccaagatcgacaacctgctccaggagatgctgctgggcggggccccgtccgacgcgccccacgcccaccaccccctccacccccacctgatgcaggagcacatgggcaccaacgtgatcgtcgccaacaccatgccgacccacctgagcaacgggcagatgtgcgagtggccccgcccccggggccaggccgccgcgcccgaggccccgcagcccgccccgcccgggggctccggcagcgagccctaccgcctgctccccggggccgtggccacgatcgtgcggcccctggaggcgatcccccagccgaccatcacccgccaggaggtcatctgaggactagtccctgttcccagagcccacttttttttctttttttgaaataaaatagcctgtctttcagatctcaaaggctcttttcagagccaccaaaaaaaaaaaaaaaaaaaaaaaaaaaaaaaaaaaaaaaaaaaaaaaaaaaaaaaaaaaaaaaaaaaaaaaaaaaaaaaaaaaaaaaaaaaaaaaaaaaaa

SEQ ID NO: 3887 - RNA, 1586 nt, synthetic construct
  misc_feature 1..1586: note = mRNA a-1 (hSL-A100) (opt1) from Homo sapiens__NP_000448.3__HNF4A(39-474)(S87A_K106R_K108R_K126R_ K127R_S142A_S143A_S148A_T166A_S167A_K179R_K180R_K234R_K300R _K307R_K309R_S313A_S378A_T429A_T432A_S436A_K447R_K458R_S461 E_K470R)
  source 1..1586: mol_type = other RNA
aggagagtcccgcagtcggcgtccagcggctctgcttgttcgtgtgtgtgtcgttgcaggccttattcaagcttaccatggacaccagcccgtccgaggggaccaacctgaacgcccccaacagcctgggcgtgtccgccctctgcgccatctgcggggaccgggcgacgggcaagcactacggggccagctcctgcgacggctgcaagggcttcttccgccgggccgtccgcaagaaccacatgtacagctgccggttctcccgccagtgcgtggtggaccgggaccgccggaaccagtgccgctactgccggctgaagaagtgcttccgcgccgggatgcggcgcgaggcggtccagaacgagcgggaccgcatcagcacccggcgcgccgcctacgaggactccgccctgcccagcatcaacgccctcctgcaggcggaggtgctgtcccggcagatcgccgcccccgtgagcggcatcaacggggacatccgcgcccggcgcatcgcctccatcgcggacgtctgcgagagcatgaaggagcagctcctggtgctggtggagtgggccaagtacatcccggccttctgcgagctccccctggacgaccaggtcgccctgctccgcgcccacgcgggcgagcacctcctgctgggggccacccggcgctccatggtgttcaaggacgtgctgctgctcggcaacgactacatcgtcccccggcactgccccgagctggccgagatgagccgcgtgtccatccggatcctggacgagctcgtgctgccgttccaggagctgcagatcgacgacaacgagtacgcctacctcaaggccatcatcttcttcgaccccgacgcgcgcggcctgagcgaccccgggcggatccgccggctgcgcgcccaggtccaggtgagcctcgaggactacatcaacgaccggcagtacgactcccgcggccggttcggggagctgctgctcctgctgcccaccctccagagcatcacgtggcagatgatcgagcagatccagttcatcaagctgttcggcatggccaagatcgacaacctgctccaggagatgctgctgggcggggccccgtccgacgcgccccacgcccaccaccccctccacccccacctgatgcaggagcacatgggcaccaacgtgatcgtcgccaacaccatgccgacccacctgagcaacgggcagatgtgcgagtggccccgcccccggggccaggccgccgcgcccgaggccccgcagcccgccccgcccgggggctccggcagcgagccctaccgcctgctccccggggccgtggccacgatcgtgcggcccctggaggcgatcccccagccgaccatcacccgccaggaggtcatctgaggactagtccctgttcccagagcccacttttttttctttttttgaaataaaatagcctgtctttcagatctcaaaggctcttttcagagccaccaaaaaaaaaaaaaaaaaaaaaaaaaaaaaaaaaaaaaaaaaaaaaaaaaaaaaaaaaaaaaaaaaaaaaaaaaaaaaaaaaaaaaaaaaaaaaaaaaaaaa

SEQ ID NO: 3888 - RNA, 1586 nt, synthetic construct
  misc_feature 1..1586: note = mRNA a-1 (hSL-A100) (opt1) from Homo sapiens__NP_000448.3__HNF4A(39-474)(S87A_S95A_S99A_K106R_K1 08R_K126R_K127R_S142A_S143A_S148A_T166A_S167A_S313A_S378A_T 429A_T432A_S436A_K458R_S461E)
  source 1..1586: mol_type = other RNA
aggagagtcccgcagtcggcgtccagcggctctgcttgttcgtgtgtgtgtcgttgcaggccttattcaagcttaccatggacaccagcccgtccgaggggaccaacctgaacgcccccaacagcctgggcgtgtccgccctctgcgccatctgcggggaccgggcgacgggcaagcactacggggccagctcctgcgacggctgcaagggcttcttccgccgggccgtccgcaagaaccacatgtacgcctgccggttcgcgcgccagtgcgtggtggaccgggaccgccggaaccagtgccgctactgccggctgaagaagtgcttccgcgccgggatgcggcgcgaggccgtccagaacgagcgggaccgcatcagcacccggcgcgccgcctacgaggactccgcgctgcccagcatcaacgccctcctgcaggccgaggtgctgtcccggcagatcgccgcccccgtgagcggcatcaacggggacatccgcgcgaagaagatcgcctccatcgccgacgtctgcgagagcatgaaggagcagctcctggtgctggtggagtgggccaagtacatcccggccttctgcgagctccccctggacgaccaggtcgcgctgctccgggcccacgccggcgagcacctcctgctgggggccaccaagcgctccatggtgttcaaggacgtgctgctgctcggcaacgactacatcgtcccccgccactgccccgagctggccgagatgagccgggtgtccatccgcatcctggacgagctcgtgctgccgttccaggagctgcagatcgacgacaacgagtacgcgtacctcaaggccatcatcttcttcgaccccgacgccaagggcctgagcgaccccgggaagatcaagcggctgcgcgcccaggtccaggtgtccctcgaggactacatcaacgaccggcagtacgacagccgcggccggttcggggagctgctgctcctgctgcccaccctccagagcatcacgtggcagatgatcgagcagatccagttcatcaagctgttcggcatggcgaagatcgacaacctgctccaggagatgctgctgggcggggccccgtccgacgcgccccacgcccaccaccccctccacccccacctgatgcaggagcacatgggcaccaacgtgatcgtcgccaacaccatgccgacccacctgagcaacgggcagatgtgcgagtggccccgcccccggggccaggccgccgcccccgaggccccgcagcccgccccgcccgggggctccggcagcgagccctacaagctgctccccggggcggtggccacgatcgtgcgccccctggaggccatcccccagccgaccatcaccaagcaggaggtcatctgaggactagtccctgttcccagagcccacttttttttctttttttgaaataaaatagcctgtctttcagatctcaaaggctcttttcagagccaccaaaaaaaaaaaaaaaaaaaaaaaaaaaaaaaaaaaaaaaaaaaaaaaaaaaaaaaaaaaaaaaaaaaaaaaaaaaaaaaaaaaaaaaaaaaaaaaaaaaaa

SEQ ID NO: 3889 - RNA, 1586 nt, synthetic construct
  misc_feature 1..1586: note = mRNA a-1 (hSL-A100) (opt1) from Homo sapiens__NP_000448.3__HNF4A(39-474)(S87A_K106R_K108R_K126R_ K127R_S138A_T139A_S142A_S143A_S148A_T166A_S167A_S313A_S378A _T429A_T432A_S436A_K458R_S461E)
  source 1..1586: mol_type = other RNA
aggagagtcccgcagtcggcgtccagcggctctgcttgttcgtgtgtgtgtcgttgcaggccttattcaagcttaccatggacaccagcccgtccgaggggaccaacctgaacgcccccaacagcctgggcgtgtccgccctctgcgccatctgcggggaccgggcgacgggcaagcactacggggccagctcctgcgacggctgcaagggcttcttccgccgggccgtccgcaagaaccacatgtacagctgccggttctcccgccagtgcgtggtggaccgggaccgccggaaccagtgccgctactgccggctgaagaagtgcttccgcgccgggatgcggcgcgaggcggtccagaacgagcgggaccgcatcgccgcccggcgcgccgcctacgaggacagcgcgctgccctccatcaacgccctcctgcaggccgaggtgctgagccggcagatcgccgcccccgtgtccggcatcaacggggacatccgcgcgaagaagatcgccagcatcgccgacgtctgcgagtccatgaaggagcagctcctggtgctggtggagtgggccaagtacatcccggccttctgcgagctccccctggacgaccaggtcgcgctgctccgggcccacgccggcgagcacctcctgctgggggccaccaagcgcagcatggtgttcaaggacgtgctgctgctcggcaacgactacatcgtcccccgccactgccccgagctggccgagatgtcccgggtgagcatccgcatcctggacgagctcgtgctgccgttccaggagctgcagatcgacgacaacgagtacgcgtacctcaaggccatcatcttcttcgaccccgacgccaagggcctgtccgaccccgggaagatcaagcggctgcgcgcccaggtccaggtgagcctcgaggactacatcaacgaccggcagtacgacagccgcggccggttcggggagctgctgctcctgctgcccaccctccagtccatcacctggcagatgatcgagcagatccagttcatcaagctgttcggcatggcgaagatcgacaacctgctccaggagatgctgctgggcggggccccgagcgacgcgccccacgcccaccaccccctccacccccacctgatgcaggagcacatgggcacgaacgtgatcgtcgccaacaccatgccgacccacctgtccaacgggcagatgtgcgagtggccccgcccccggggccaggccgccgcccccgaggccccgcagcccgccccgcccgggggcagcggctccgagccctacaagctgctccccggggcggtggccaccatcgtgcgccccctggaggccatcccccagccgacgatcaccaagcaggaggtcatctgaggactagtccctgttcccagagcccacttttttttctttttttgaaataaaatagcctgtctttcagatctcaaaggctcttttcagagccaccaaaaaaaaaaaaaaaaaaaaaaaaaaaaaaaaaaaaaaaaaaaaaaaaaaaaaaaaaaaaaaaaaaaaaaaaaaaaaaaaaaaaaaaaaaaaaaaaaaaaa

SEQ ID NO: 3890 - RNA, 1586 nt, synthetic construct
  misc_feature 1..1586: note = mRNA a-1 (hSL-A100) (opt1) from Homo sapiens__NP_000448.3__HNF4A(39-474)(S87A_S95A_S99A_K106R_K1 08R_K126R_K127R_S138A_T139A_S142A_S143A_S148A_T166A_S167A_S 313A_S378A_T429A_T432A_S436A_K458R_S461E)
  source 1..1586: mol_type = other RNA
aggagagtcccgcagtcggcgtccagcggctctgcttgttcgtgtgtgtgtcgttgcaggccttattcaagcttaccatggacaccagcccgtccgaggggaccaacctgaacgcccccaacagcctgggcgtgtccgccctctgcgccatctgcggggaccgggcgacgggcaagcactacggggccagctcctgcgacggctgcaagggcttcttccgccgggccgtccgcaagaaccacatgtacgcctgccggttcgcgcgccagtgcgtggtggaccgggaccgccggaaccagtgccgctactgccggctgaagaagtgcttccgcgccgggatgcggcgcgaggccgtccagaacgagcgggaccgcatcgccgcccggcgcgcggcctacgaggacagcgccctgccctccatcaacgccctcctgcaggccgaggtgctgagccggcagatcgcggcccccgtgtccggcatcaacggggacatccgcgccaagaagatcgccagcatcgccgacgtctgcgagtccatgaaggagcagctcctggtgctggtggagtgggcgaagtacatcccggccttctgcgagctccccctggacgaccaggtcgccctgctccgggcccacgccggcgagcacctcctgctgggggcgaccaagcgcagcatggtgttcaaggacgtgctgctgctcggcaacgactacatcgtcccccgccactgccccgagctggccgagatgtcccgggtgagcatccgcatcctggacgagctcgtgctgccgttccaggagctgcagatcgacgacaacgagtacgcctacctcaaggccatcatcttcttcgaccccgacgcgaagggcctgtccgaccccgggaagatcaagcggctgcgcgcccaggtccaggtgagcctcgaggactacatcaacgaccggcagtacgactcccgcggccggttcggggagctgctgctcctgctgcccaccctccagagcatcacctggcagatgatcgagcagatccagttcatcaagctgttcggcatggccaagatcgacaacctgctccaggagatgctgctgggcggggccccgagcgacgcgccccacgcccaccaccccctccacccccacctgatgcaggagcacatgggcacgaacgtgatcgtcgccaacaccatgccgacccacctgtccaacgggcagatgtgcgagtggccccgcccccggggccaggccgccgcccccgaggcgccgcagcccgccccgcccgggggcagcggctccgagccctacaagctgctccccggggccgtggccaccatcgtgcgccccctggaggccatcccccagccgacgatcaccaagcaggaggtcatctgaggactagtccctgttcccagagcccacttttttttctttttttgaaataaaatagcctgtctttcagatctcaaaggctcttttcagagccaccaaaaaaaaaaaaaaaaaaaaaaaaaaaaaaaaaaaaaaaaaaaaaaaaaaaaaaaaaaaaaaaaaaaaaaaaaaaaaaaaaaaaaaaaaaaaaaaaaaaaa

SEQ ID NO: 3891 - RNA, 1586 nt, synthetic construct
  misc_feature 1..1586: note = mRNA a-1 (hSL-A100) (opt2) from Homo sapiens__NP_000448.3__HNF4A(39-474)
  source 1..1586: mol_type = other RNA
aggagagtcccgcagtcggcgtccagcggctctgcttgttcgtgtgtgtgtcgttgcaggccttattcaagcttaccatggacacctccccctccgagggcaccaacctcaacgcccccaactccctcggcgtctccgccctctgcgccatctgcggcgaccgcgccaccggcaagcactacggcgcctcctcctgcgacggctgcaagggcttcttccgccgctccgtccgcaagaaccacatgtactcctgccgcttctcccgccagtgcgtcgtcgacaaggacaagcgcaaccagtgccgctactgccgcctcaagaagtgcttccgcgccggcatgaagaaggaggccgtccagaacgagcgcgaccgcatctccacccgccgctcctcctacgaggactcctccctcccctccatcaacgccctcctccaggccgaggtcctctcccgccagatcacctcccccgtctccggcatcaacggcgacatccgcgccaagaagatcgcctccatcgccgacgtctgcgagtccatgaaggagcagctcctcgtcctcgtcgagtgggccaagtacatccccgccttctgcgagctccccctcgacgaccaggtcgccctcctccgcgcccacgccggcgagcacctcctcctcggcgccaccaagcgctccatggtcttcaaggacgtcctcctcctcggcaacgactacatcgtcccccgccactgccccgagctcgccgagatgtcccgcgtctccatccgcatcctcgacgagctcgtcctccccttccaggagctccagatcgacgacaacgagtacgcctacctcaaggccatcatcttcttcgaccccgacgccaagggcctctccgaccccggcaagatcaagcgcctccgctcccaggtccaggtctccctcgaggactacatcaacgaccgccagtacgactcgcgcgggcgcttcggcgagctcctcctcctcctccccaccctccagtccatcacctggcagatgatcgagcagatccagttcatcaagctgttcggcatggccaagatcgacaacctcctccaggagatgctcctcggcggctccccctccgacgccccccacgcccaccaccccctccacccccacctcatgcaggagcacatgggcaccaacgtcatcgtcgccaacaccatgcccacccacctctccaacggccagatgtgcgagtggccccgcccgcgcggccaggccgccacccccgagaccccccagccctccccccccggcggctccggctccgagccctacaagctcctccccggcgccgtcgccaccatcgtcaagcccctctccgccatcccccagcccaccatcaccaagcaggaggtcatctgaggactagtccctgttcccagagcccacttttttttctttttttgaaataaaatagcctgtctttcagatctcaaaggctcttttcagagccaccaaaaaaaaaaaaaaaaaaaaaaaaaaaaaaaaaaaaaaaaaaaaaaaaaaaaaaaaaaaaaaaaaaaaaaaaaaaaaaaaaaaaaaaaaaaaaaaaaaaaa

SEQ ID NO: 3892 - RNA, 1586 nt, synthetic construct
  misc_feature 1..1586: note = mRNA a-1 (hSL-A100) (opt2) from Homo sapiens__NP_000448.3__HNF4A(39-474)(S313A)
  source 1..1586: mol_type = other RNA
aggagagtcccgcagtcggcgtccagcggctctgcttgttcgtgtgtgtgtcgttgcaggccttattcaagcttaccatggacacctccccctccgagggcaccaacctcaacgcccccaactccctcggcgtctccgccctctgcgccatctgcggcgaccgcgccaccggcaagcactacggcgcctcctcctgcgacggctgcaagggcttcttccgccgctccgtccgcaagaaccacatgtactcctgccgcttctcccgccagtgcgtcgtcgacaaggacaagcgcaaccagtgccgctactgccgcctcaagaagtgcttccgcgccggcatgaagaaggaggccgtccagaacgagcgcgaccgcatctccacccgccgctcctcctacgaggactcctccctcccctccatcaacgccctcctccaggccgaggtcctctcccgccagatcacctcccccgtctccggcatcaacggcgacatccgcgccaagaagatcgcctccatcgccgacgtctgcgagtccatgaaggagcagctcctcgtcctcgtcgagtgggccaagtacatccccgccttctgcgagctccccctcgacgaccaggtcgccctcctccgcgcccacgccggcgagcacctcctcctcggcgccaccaagcgctccatggtcttcaaggacgtcctcctcctcggcaacgactacatcgtcccccgccactgccccgagctcgccgagatgtcccgcgtctccatccgcatcctcgacgagctcgtcctccccttccaggagctccagatcgacgacaacgagtacgcctacctcaaggccatcatcttcttcgaccccgacgccaagggcctctccgaccccggcaagatcaagcgcctccgcgcccaggtccaggtctccctcgaggactacatcaacgaccgccagtacgactcccgcggccgcttcggcgagctcctcctcctcctccccaccctccagtccatcacctggcagatgatcgagcagatccagttcatcaagctcttcggcatggccaagatcgacaacctcctccaggagatgctcctcggcggctccccctccgacgccccccacgcccaccaccccctccacccccacctcatgcaggagcacatgggcaccaacgtcatcgtcgccaacaccatgcccacccacctctccaacggccagatgtgcgagtggccccgcccccgcggccaggccgccacccccgagaccccccagccctccccccccggcggctccggctccgagccctacaagctcctccccggcgccgtcgccaccatcgtcaagcccctctccgccatcccccagcccaccatcaccaagcaggaggtcatctgaggactagtccctgttcccagagcccacttttttttctttttttgaaataaaatagcctgtctttcagatctcaaaggctcttttcagagccaccaaaaaaaaaaaaaaaaaaaaaaaaaaaaaaaaaaaaaaaaaaaaaaaaaaaaaaaaaaaaaaaaaaaaaaaaaaaaaaaaaaaaaaaaaaaaaaaaaaaaa

SEQ ID NO: 3893 - RNA, 1586 nt, synthetic construct
  misc_feature 1..1586: note = mRNA a-1 (hSL-A100) (opt2) from Homo sapiens__NP_000448.3__HNF4A(39-474)(S313E)
  source 1..1586: mol_type = other RNA
aggagagtcccgcagtcggcgtccagcggctctgcttgttcgtgtgtgtgtcgttgcaggccttattcaagcttaccatggacacctccccctccgagggcaccaacctcaacgcccccaactccctcggcgtctccgccctctgcgccatctgcggcgaccgcgccaccggcaagcactacggcgcctcctcctgcgacggctgcaagggcttcttccgccgctccgtccgcaagaaccacatgtactcctgccgcttctcccgccagtgcgtcgtcgacaaggacaagcgcaaccagtgccgctactgccgcctcaagaagtgcttccgcgccggcatgaagaaggaggccgtccagaacgagcgcgaccgcatctccacccgccgctcctcctacgaggactcctccctcccctccatcaacgccctcctccaggccgaggtcctctcccgccagatcacctcccccgtctccggcatcaacggcgacatccgcgccaagaagatcgcctccatcgccgacgtctgcgagtccatgaaggagcagctcctcgtcctcgtcgagtgggccaagtacatccccgccttctgcgagctccccctcgacgaccaggtcgccctcctccgcgcccacgccggcgagcacctcctcctcggcgccaccaagcgctccatggtcttcaaggacgtcctcctcctcggcaacgactacatcgtcccccgccactgccccgagctcgccgagatgtcccgcgtctccatccgcatcctcgacgagctcgtcctccccttccaggagctccagatcgacgacaacgagtacgcctacctcaaggccatcatcttcttcgaccccgacgccaagggcctctccgaccccggcaagatcaagcgcctccgcgagcaggtccaggtctccctcgaggactacatcaacgaccgccagtacgactcccgcggccgcttcggcgagctcctcctcctcctccccaccctccagtccatcacctggcagatgatcgagcagatccagttcatcaagctcttcggcatggccaagatcgacaacctcctccaggagatgctcctcggcggctccccctccgacgccccccacgcccaccaccccctccacccccacctcatgcaggagcacatgggcaccaacgtcatcgtcgccaacaccatgcccacccacctctccaacggccagatgtgcgagtggccccgcccccgcggccaggccgccacccccgagaccccccagccctccccccccggcggctccggctccgagccctacaagctcctccccggcgccgtcgccaccatcgtcaagcccctctccgccatcccccagcccaccatcaccaagcaggaggtcatctgaggactagtccctgttcccagagcccacttttttttctttttttgaaataaaatagcctgtctttcagatctcaaaggctcttttcagagccaccaaaaaaaaaaaaaaaaaaaaaaaaaaaaaaaaaaaaaaaaaaaaaaaaaaaaaaaaaaaaaaaaaaaaaaaaaaaaaaaaaaaaaaaaaaaaaaaaaaaaa

SEQ ID NO: 3894 - RNA, 1586 nt, synthetic construct
  misc_feature 1..1586: note = mRNA a-1 (hSL-A100) (opt2) from Homo sapiens__NP_000448.3__HNF4A(39-474)(S142A_S143A)
  source 1..1586: mol_type = other RNA
aggagagtcccgcagtcggcgtccagcggctctgcttgttcgtgtgtgtgtcgttgcaggccttattcaagcttaccatggacacctccccctccgagggcaccaacctcaacgcccccaactccctcggcgtctccgccctctgcgccatctgcggcgaccgcgccaccggcaagcactacggcgcctcctcctgcgacggctgcaagggcttcttccgccgctccgtccgcaagaaccacatgtactcctgccgcttctcccgccagtgcgtcgtcgacaaggacaagcgcaaccagtgccgctactgccgcctcaagaagtgcttccgcgccggcatgaagaaggaggccgtccagaacgagcgcgaccgcatctccacccgccgcgccgcctacgaggactcctccctcccctccatcaacgccctcctccaggccgaggtcctctcccgccagatcacctcccccgtctccggcatcaacggcgacatccgcgccaagaagatcgcctccatcgccgacgtctgcgagtccatgaaggagcagctcctcgtcctcgtcgagtgggccaagtacatccccgccttctgcgagctccccctcgacgaccaggtcgccctcctccgcgcccacgccggcgagcacctcctcctcggcgccaccaagcgctccatggtcttcaaggacgtcctcctcctcggcaacgactacatcgtcccccgccactgccccgagctcgccgagatgtcccgcgtctccatccgcatcctcgacgagctcgtcctccccttccaggagctccagatcgacgacaacgagtacgcctacctcaaggccatcatcttcttcgaccccgacgccaagggcctctccgaccccggcaagatcaagcgcctccgctcccaggtccaggtctccctcgaggactacatcaacgaccgccagtacgactcccgcggccgcttcggcgagctcctcctcctcctccccaccctccagtccatcacctggcagatgatcgagcagatccagttcatcaagctcttcggcatggccaagatcgacaacctcctccaggagatgctcctcggcggctccccctccgacgccccccacgcccaccaccccctccacccccacctcatgcaggagcacatgggcaccaacgtcatcgtcgccaacaccatgcccacccacctctccaacggccagatgtgcgagtggccccgcccccgcggccaggccgccacccccgagaccccccagccctccccccccggcggctccggctccgagccctacaagctcctccccggcgccgtcgccaccatcgtcaagcccctctccgccatcccccagcccaccatcaccaagcaggaggtcatctgaggactagtccctgttcccagagcccacttttttttctttttttgaaataaaatagcctgtctttcagatctcaaaggctcttttcagagccaccaaaaaaaaaaaaaaaaaaaaaaaaaaaaaaaaaaaaaaaaaaaaaaaaaaaaaaaaaaaaaaaaaaaaaaaaaaaaaaaaaaaaaaaaaaaaaaaaaaaaa

SEQ ID NO: 3895 - RNA, 1586 nt, synthetic construct
  misc_feature 1..1586: note = mRNA a-1 (hSL-A100) (opt2) from Homo sapiens__NP_000448.3__HNF4A(39-474)(S142E_S143E)
  source 1..1586: mol_type = other RNA
aggagagtcccgcagtcggcgtccagcggctctgcttgttcgtgtgtgtgtcgttgcaggccttattcaagcttaccatggacacctccccctccgagggcaccaacctcaacgcccccaactccctcggcgtctccgccctctgcgccatctgcggcgaccgcgccaccggcaagcactacggcgcctcctcctgcgacggctgcaagggcttcttccgccgctccgtccgcaagaaccacatgtactcctgccgcttctcccgccagtgcgtcgtcgacaaggacaagcgcaaccagtgccgctactgccgcctcaagaagtgcttccgcgccggcatgaagaaggaggccgtccagaacgagcgcgaccgcatctccacccgccgcgaggagtacgaggactcctccctcccctccatcaacgccctcctccaggccgaggtcctctcccgccagatcacctcccccgtctccggcatcaacggcgacatccgcgccaagaagatcgcctccatcgccgacgtctgcgagtccatgaaggagcagctcctcgtcctcgtcgagtgggccaagtacatccccgccttctgcgagctccccctcgacgaccaggtcgccctcctccgcgcccacgccggcgagcacctcctcctcggcgccaccaagcgctccatggtcttcaaggacgtcctcctcctcggcaacgactacatcgtcccccgccactgccccgagctcgccgagatgtcccgcgtctccatccgcatcctcgacgagctcgtcctccccttccaggagctccagatcgacgacaacgagtacgcctacctcaaggccatcatcttcttcgaccccgacgccaagggcctctccgaccccggcaagatcaagcgcctccgctcccaggtccaggtctccctcgaggactacatcaacgaccgccagtacgactcccgcggccgcttcggcgagctcctcctcctcctccccaccctccagtccatcacctggcagatgatcgagcagatccagttcatcaagctcttcggcatggccaagatcgacaacctcctccaggagatgctcctcggcggctccccctccgacgccccccacgcccaccaccccctccacccccacctcatgcaggagcacatgggcaccaacgtcatcgtcgccaacaccatgcccacccacctctccaacggccagatgtgcgagtggccccgcccccgcggccaggccgccacccccgagaccccccagccctccccccccggcggctccggctccgagccctacaagctcctccccggcgccgtcgccaccatcgtcaagcccctctccgccatcccccagcccaccatcaccaagcaggaggtcatctgaggactagtccctgttcccagagcccacttttttttctttttttgaaataaaatagcctgtctttcagatctcaaaggctcttttcagagccaccaaaaaaaaaaaaaaaaaaaaaaaaaaaaaaaaaaaaaaaaaaaaaaaaaaaaaaaaaaaaaaaaaaaaaaaaaaaaaaaaaaaaaaaaaaaaaaaaaaaaa

SEQ ID NO: 3896 - RNA, 1586 nt, synthetic construct
  misc_feature 1..1586: note = mRNA a-1 (hSL-A100) (opt2) from Homo sapiens__NP_000448.3__HNF4A(39-474)(S143A)
  source 1..1586: mol_type = other RNA
aggagagtcccgcagtcggcgtccagcggctctgcttgttcgtgtgtgtgtcgttgcaggccttattcaagcttaccatggacacctccccctccgagggcaccaacctcaacgcccccaactccctcggcgtctccgccctctgcgccatctgcggcgaccgcgccaccggcaagcactacggcgcctcctcctgcgacggctgcaagggcttcttccgccgctccgtccgcaagaaccacatgtactcctgccgcttctcccgccagtgcgtcgtcgacaaggacaagcgcaaccagtgccgctactgccgcctcaagaagtgcttccgcgccggcatgaagaaggaggccgtccagaacgagcgcgaccgcatctccacccgccgctccgcctacgaggactcctccctcccctccatcaacgccctcctccaggccgaggtcctctcccgccagatcacctcccccgtctccggcatcaacggcgacatccgcgccaagaagatcgcctccatcgccgacgtctgcgagtccatgaaggagcagctcctcgtcctcgtcgagtgggccaagtacatccccgccttctgcgagctccccctcgacgaccaggtcgccctcctccgcgcccacgccggcgagcacctcctcctcggcgccaccaagcgctccatggtcttcaaggacgtcctcctcctcggcaacgactacatcgtcccccgccactgccccgagctcgccgagatgtcccgcgtctccatccgcatcctcgacgagctcgtcctccccttccaggagctccagatcgacgacaacgagtacgcctacctcaaggccatcatcttcttcgaccccgacgccaagggcctctccgaccccggcaagatcaagcgcctccgctcccaggtccaggtctccctcgaggactacatcaacgaccgccagtacgactcccgcggccgcttcggcgagctcctcctcctcctccccaccctccagtccatcacctggcagatgatcgagcagatccagttcatcaagctcttcggcatggccaagatcgacaacctcctccaggagatgctcctcggcggctccccctccgacgccccccacgcccaccaccccctccacccccacctcatgcaggagcacatgggcaccaacgtcatcgtcgccaacaccatgcccacccacctctccaacggccagatgtgcgagtggccccgcccccgcggccaggccgccacccccgagaccccccagccctccccccccggcggctccggctccgagccctacaagctcctccccggcgccgtcgccaccatcgtcaagcccctctccgccatcccccagcccaccatcaccaagcaggaggtcatctgaggactagtccctgttcccagagcccacttttttttctttttttgaaataaaatagcctgtctttcagatctcaaaggctcttttcagagccaccaaaaaaaaaaaaaaaaaaaaaaaaaaaaaaaaaaaaaaaaaaaaaaaaaaaaaaaaaaaaaaaaaaaaaaaaaaaaaaaaaaaaaaaaaaaaaaaaaaaaa

SEQ ID NO: 3897 - RNA, 1586 nt, synthetic construct
  misc_feature 1..1586: note = mRNA a-1 (hSL-A100) (opt2) from Homo sapiens__NP_000448.3__HNF4A(39-474)(T166A)
  source 1..1586: mol_type = other RNA
aggagagtcccgcagtcggcgtccagcggctctgcttgttcgtgtgtgtgtcgttgcaggccttattcaagcttaccatggacacctccccctccgagggcaccaacctcaacgcccccaactccctcggcgtctccgccctctgcgccatctgcggcgaccgcgccaccggcaagcactacggcgcctcctcctgcgacggctgcaagggcttcttccgccgctccgtccgcaagaaccacatgtactcctgccgcttctcccgccagtgcgtcgtcgacaaggacaagcgcaaccagtgccgctactgccgcctcaagaagtgcttccgcgccggcatgaagaaggaggccgtccagaacgagcgcgaccgcatctccacccgccgctcctcctacgaggactcctccctcccctccatcaacgccctcctccaggccgaggtcctctcccgccagatcgcctcccccgtctccggcatcaacggcgacatccgcgccaagaagatcgcctccatcgccgacgtctgcgagtccatgaaggagcagctcctcgtcctcgtcgagtgggccaagtacatccccgccttctgcgagctccccctcgacgaccaggtcgccctcctccgcgcccacgccggcgagcacctcctcctcggcgccaccaagcgctccatggtcttcaaggacgtcctcctcctcggcaacgactacatcgtcccccgccactgccccgagctcgccgagatgtcccgcgtctccatccgcatcctcgacgagctcgtcctccccttccaggagctccagatcgacgacaacgagtacgcctacctcaaggccatcatcttcttcgaccccgacgccaagggcctctccgaccccggcaagatcaagcgcctccgctcccaggtccaggtctccctcgaggactacatcaacgaccgccagtacgactcccgcggccgcttcggcgagctcctcctcctcctccccaccctccagtccatcacctggcagatgatcgagcagatccagttcatcaagctcttcggcatggccaagatcgacaacctcctccaggagatgctcctcggcggctccccctccgacgccccccacgcccaccaccccctccacccccacctcatgcaggagcacatgggcaccaacgtcatcgtcgccaacaccatgcccacccacctctccaacggccagatgtgcgagtggccccgcccccgcggccaggccgccacccccgagaccccccagccctccccccccggcggctccggctccgagccctacaagctcctccccggcgccgtcgccaccatcgtcaagcccctctccgccatcccccagcccaccatcaccaagcaggaggtcatctgaggactagtccctgttcccagagcccacttttttttctttttttgaaataaaatagcctgtctttcagatctcaaaggctcttttcagagccaccaaaaaaaaaaaaaaaaaaaaaaaaaaaaaaaaaaaaaaaaaaaaaaaaaaaaaaaaaaaaaaaaaaaaaaaaaaaaaaaaaaaaaaaaaaaaaaaaaaaaa

SEQ ID NO: 3898 - RNA, 1586 nt, synthetic construct
  misc_feature 1..1586: note = mRNA a-1 (hSL-A100) (opt2) from Homo sapiens__NP_000448.3__HNF4A(39-474)(S167E)
  source 1..1586: mol_type = other RNA
aggagagtcccgcagtcggcgtccagcggctctgcttgttcgtgtgtgtgtcgttgcaggccttattcaagcttaccatggacacctccccctccgagggcaccaacctcaacgcccccaactccctcggcgtctccgccctctgcgccatctgcggcgaccgcgccaccggcaagcactacggcgcctcctcctgcgacggctgcaagggcttcttccgccgctccgtccgcaagaaccacatgtactcctgccgcttctcccgccagtgcgtcgtcgacaaggacaagcgcaaccagtgccgctactgccgcctcaagaagtgcttccgcgccggcatgaagaaggaggccgtccagaacgagcgcgaccgcatctccacccgccgctcctcctacgaggactcctccctcccctccatcaacgccctcctccaggccgaggtcctctcccgccagatcaccgagcccgtctccggcatcaacggcgacatccgcgccaagaagatcgcctccatcgccgacgtctgcgagtccatgaaggagcagctcctcgtcctcgtcgagtgggccaagtacatccccgccttctgcgagctccccctcgacgaccaggtcgccctcctccgcgcccacgccggcgagcacctcctcctcggcgccaccaagcgctccatggtcttcaaggacgtcctcctcctcggcaacgactacatcgtcccccgccactgccccgagctcgccgagatgtcccgcgtctccatccgcatcctcgacgagctcgtcctccccttccaggagctccagatcgacgacaacgagtacgcctacctcaaggccatcatcttcttcgaccccgacgccaagggcctctccgaccccggcaagatcaagcgcctccgctcccaggtccaggtctccctcgaggactacatcaacgaccgccagtacgactcccgcggccgcttcggcgagctcctcctcctcctccccaccctccagtccatcacctggcagatgatcgagcagatccagttcatcaagctcttcggcatggccaagatcgacaacctcctccaggagatgctcctcggcggctccccctccgacgccccccacgcccaccaccccctccacccccacctcatgcaggagcacatgggcaccaacgtcatcgtcgccaacaccatgcccacccacctctccaacggccagatgtgcgagtggccccgcccccgcggccaggccgccacccccgagaccccccagccctccccccccggcggctccggctccgagccctacaagctcctccccggcgccgtcgccaccatcgtcaagcccctctccgccatcccccagcccaccatcaccaagcaggaggtcatctgaggactagtccctgttcccagagcccacttttttttctttttttgaaataaaatagcctgtctttcagatctcaaaggctcttttcagagccaccaaaaaaaaaaaaaaaaaaaaaaaaaaaaaaaaaaaaaaaaaaaaaaaaaaaaaaaaaaaaaaaaaaaaaaaaaaaaaaaaaaaaaaaaaaaaaaaaaaaaa

SEQ ID NO: 3899 - RNA, 1586 nt, synthetic construct
  misc_feature 1..1586: note = mRNA a-1 (hSL-A100) (opt2) from Homo sapiens__NP_000448.3__HNF4A(39-474)(S167A)
  source 1..1586: mol_type = other RNA
aggagagtcccgcagtcggcgtccagcggctctgcttgttcgtgtgtgtgtcgttgcaggccttattcaagcttaccatggacacctccccctccgagggcaccaacctcaacgcccccaactccctcggcgtctccgccctctgcgccatctgcggcgaccgcgccaccggcaagcactacggcgcctcctcctgcgacggctgcaagggcttcttccgccgctccgtccgcaagaaccacatgtactcctgccgcttctcccgccagtgcgtcgtcgacaaggacaagcgcaaccagtgccgctactgccgcctcaagaagtgcttccgcgccggcatgaagaaggaggccgtccagaacgagcgcgaccgcatctccacccgccgctcctcctacgaggactcctccctcccctccatcaacgccctcctccaggccgaggtcctctcccgccagatcaccgcccccgtctccggcatcaacggcgacatccgcgccaagaagatcgcctccatcgccgacgtctgcgagtccatgaaggagcagctcctcgtcctcgtcgagtgggccaagtacatccccgccttctgcgagctccccctcgacgaccaggtcgccctcctccgcgcccacgccggcgagcacctcctcctcggcgccaccaagcgctccatggtcttcaaggacgtcctcctcctcggcaacgactacatcgtcccccgccactgccccgagctcgccgagatgtcccgcgtctccatccgcatcctcgacgagctcgtcctccccttccaggagctccagatcgacgacaacgagtacgcctacctcaaggccatcatcttcttcgaccccgacgccaagggcctctccgaccccggcaagatcaagcgcctccgctcccaggtccaggtctccctcgaggactacatcaacgaccgccagtacgactcccgcggccgcttcggcgagctcctcctcctcctccccaccctccagtccatcacctggcagatgatcgagcagatccagttcatcaagctcttcggcatggccaagatcgacaacctcctccaggagatgctcctcggcggctccccctccgacgccccccacgcccaccaccccctccacccccacctcatgcaggagcacatgggcaccaacgtcatcgtcgccaacaccatgcccacccacctctccaacggccagatgtgcgagtggccccgcccccgcggccaggccgccacccccgagaccccccagccctccccccccggcggctccggctccgagccctacaagctcctccccggcgccgtcgccaccatcgtcaagcccctctccgccatcccccagcccaccatcaccaagcaggaggtcatctgaggactagtccctgttcccagagcccacttttttttctttttttgaaataaaatagcctgtctttcagatctcaaaggctcttttcagagccaccaaaaaaaaaaaaaaaaaaaaaaaaaaaaaaaaaaaaaaaaaaaaaaaaaaaaaaaaaaaaaaaaaaaaaaaaaaaaaaaaaaaaaaaaaaaaaaaaaaaaa

SEQ ID NO: 3900 - RNA, 1586 nt, synthetic construct
  misc_feature 1..1586: note = mRNA a-1 (hSL-A100) (opt2) from Homo sapiens__NP_000448.3__HNF4A(39-474)(S167A_S378A_T429A_T432A _S436A)
  source 1..1586: mol_type = other RNA
aggagagtcccgcagtcggcgtccagcggctctgcttgttcgtgtgtgtgtcgttgcaggccttattcaagcttaccatggacacctccccctccgagggcaccaacctcaacgcccccaactccctcggcgtctccgccctctgcgccatctgcggcgaccgcgccaccggcaagcactacggcgcctcctcctgcgacggctgcaagggcttcttccgccgctccgtccgcaagaaccacatgtactcctgccgcttctcccgccagtgcgtcgtcgacaaggacaagcgcaaccagtgccgctactgccgcctcaagaagtgcttccgcgccggcatgaagaaggaggccgtccagaacgagcgcgaccgcatctccacccgccgctcctcctacgaggactcctccctcccctccatcaacgccctcctccaggccgaggtcctctcccgccagatcaccgcccccgtctccggcatcaacggcgacatccgcgccaagaagatcgcctccatcgccgacgtctgcgagtccatgaaggagcagctcctcgtcctcgtcgagtgggccaagtacatccccgccttctgcgagctccccctcgacgaccaggtcgccctcctccgcgcccacgccggcgagcacctcctcctcggcgccaccaagcgctccatggtcttcaaggacgtcctcctcctcggcaacgactacatcgtcccccgccactgccccgagctcgccgagatgtcccgcgtctccatccgcatcctcgacgagctcgtcctccccttccaggagctccagatcgacgacaacgagtacgcctacctcaaggccatcatcttcttcgaccccgacgccaagggcctctccgaccccggcaagatcaagcgcctccgctcccaggtccaggtctccctcgaggactacatcaacgaccgccagtacgactcccgcggccgcttcggcgagctcctcctcctcctccccaccctccagtccatcacctggcagatgatcgagcagatccagttcatcaagctcttcggcatggccaagatcgacaacctcctccaggagatgctcctcggcggcgccccctccgacgccccccacgcccaccaccccctccacccccacctcatgcaggagcacatgggcaccaacgtcatcgtcgccaacaccatgcccacccacctctccaacggccagatgtgcgagtggccccgcccccgcggccaggccgccgcccccgaggccccccagcccgccccccccggcggctccggctccgagccctacaagctcctccccggcgccgtcgccaccatcgtcaagcccctctccgccatcccccagcccaccatcaccaagcaggaggtcatctgaggactagtccctgttcccagagcccacttttttttctttttttgaaataaaatagcctgtctttcagatctcaaaggctcttttcagagccaccaaaaaaaaaaaaaaaaaaaaaaaaaaaaaaaaaaaaaaaaaaaaaaaaaaaaaaaaaaaaaaaaaaaaaaaaaaaaaaaaaaaaaaaaaaaaaaaaaaaaa

SEQ ID NO: 3901 - RNA, 1586 nt, synthetic construct
  misc_feature 1..1586: note = mRNA a-1 (hSL-A100) (opt2) from Homo sapiens__NP_000448.3__HNF4A(39-474)(S167E_S378E_T429E_T432E _S436E)
  source 1..1586: mol_type = other RNA
aggagagtcccgcagtcggcgtccagcggctctgcttgttcgtgtgtgtgtcgttgcaggccttattcaagcttaccatggacacctccccctccgagggcaccaacctcaacgcccccaactccctcggcgtctccgccctctgcgccatctgcggcgaccgcgccaccggcaagcactacggcgcctcctcctgcgacggctgcaagggcttcttccgccgctccgtccgcaagaaccacatgtactcctgccgcttctcccgccagtgcgtcgtcgacaaggacaagcgcaaccagtgccgctactgccgcctcaagaagtgcttccgcgccggcatgaagaaggaggccgtccagaacgagcgcgaccgcatctccacccgccgctcctcctacgaggactcctccctcccctccatcaacgccctcctccaggccgaggtcctctcccgccagatcaccgagcccgtctccggcatcaacggcgacatccgcgccaagaagatcgcctccatcgccgacgtctgcgagtccatgaaggagcagctcctcgtcctcgtcgagtgggccaagtacatccccgccttctgcgagctccccctcgacgaccaggtcgccctcctccgcgcccacgccggcgagcacctcctcctcggcgccaccaagcgctccatggtcttcaaggacgtcctcctcctcggcaacgactacatcgtcccccgccactgccccgagctcgccgagatgtcccgcgtctccatccgcatcctcgacgagctcgtcctccccttccaggagctccagatcgacgacaacgagtacgcctacctcaaggccatcatcttcttcgaccccgacgccaagggcctctccgaccccggcaagatcaagcgcctccgctcccaggtccaggtctccctcgaggactacatcaacgaccgccagtacgactcccgcggccgcttcggcgagctcctcctcctcctccccaccctccagtccatcacctggcagatgatcgagcagatccagttcatcaagctcttcggcatggccaagatcgacaacctcctccaggagatgctcctcggcggcgagccctccgacgccccccacgcccaccaccccctccacccccacctcatgcaggagcacatgggcaccaacgtcatcgtcgccaacaccatgcccacccacctctccaacggccagatgtgcgagtggccccgcccccgcggccaggccgccgagcccgaggagccccagcccgagccccccggcggctccggctccgagccctacaagctcctccccggcgccgtcgccaccatcgtcaagcccctctccgccatcccccagcccaccatcaccaagcaggaggtcatctgaggactagtccctgttcccagagcccacttttttttctttttttgaaataaaatagcctgtctttcagatctcaaaggctcttttcagagccaccaaaaaaaaaaaaaaaaaaaaaaaaaaaaaaaaaaaaaaaaaaaaaaaaaaaaaaaaaaaaaaaaaaaaaaaaaaaaaaaaaaaaaaaaaaaaaaaaaaaaa

SEQ ID NO: 3902 - RNA, 1586 nt, synthetic construct
  misc_feature 1..1586: note = mRNA a-1 (hSL-A100) (opt2) from Homo sapiens__NP_000448.3__HNF4A(39-474)(S87A)
  source 1..1586: mol_type = other RNA
aggagagtcccgcagtcggcgtccagcggctctgcttgttcgtgtgtgtgtcgttgcaggccttattcaagcttaccatggacacctccccctccgagggcaccaacctcaacgcccccaactccctcggcgtctccgccctctgcgccatctgcggcgaccgcgccaccggcaagcactacggcgcctcctcctgcgacggctgcaagggcttcttccgccgcgccgtccgcaagaaccacatgtactcctgccgcttctcccgccagtgcgtcgtcgacaaggacaagcgcaaccagtgccgctactgccgcctcaagaagtgcttccgcgccggcatgaagaaggaggccgtccagaacgagcgcgaccgcatctccacccgccgctcctcctacgaggactcctccctcccctccatcaacgccctcctccaggccgaggtcctctcccgccagatcacctcccccgtctccggcatcaacggcgacatccgcgccaagaagatcgcctccatcgccgacgtctgcgagtccatgaaggagcagctcctcgtcctcgtcgagtgggccaagtacatccccgccttctgcgagctccccctcgacgaccaggtcgccctcctccgcgcccacgccggcgagcacctcctcctcggcgccaccaagcgctccatggtcttcaaggacgtcctcctcctcggcaacgactacatcgtcccccgccactgccccgagctcgccgagatgtcccgcgtctccatccgcatcctcgacgagctcgtcctccccttccaggagctccagatcgacgacaacgagtacgcctacctcaaggccatcatcttcttcgaccccgacgccaagggcctctccgaccccggcaagatcaagcgcctccgctcccaggtccaggtctccctcgaggactacatcaacgaccgccagtacgactcccgcggccgcttcggcgagctcctcctcctcctccccaccctccagtccatcacctggcagatgatcgagcagatccagttcatcaagctcttcggcatggccaagatcgacaacctcctccaggagatgctcctcggcggctccccctccgacgccccccacgcccaccaccccctccacccccacctcatgcaggagcacatgggcaccaacgtcatcgtcgccaacaccatgcccacccacctctccaacggccagatgtgcgagtggccccgcccccgcggccaggccgccacccccgagaccccccagccctccccccccggcggctccggctccgagccctacaagctcctccccggcgccgtcgccaccatcgtcaagcccctctccgccatcccccagcccaccatcaccaagcaggaggtcatctgaggactagtccctgttcccagagcccacttttttttctttttttgaaataaaatagcctgtctttcagatctcaaaggctcttttcagagccaccaaaaaaaaaaaaaaaaaaaaaaaaaaaaaaaaaaaaaaaaaaaaaaaaaaaaaaaaaaaaaaaaaaaaaaaaaaaaaaaaaaaaaaaaaaaaaaaaaaaaa

SEQ ID NO: 3903 - RNA, 1586 nt, synthetic construct
  misc_feature 1..1586: note = mRNA a-1 (hSL-A100) (opt2) from Homo sapiens__NP_000448.3__HNF4A(39-474)(S87E)
  source 1..1586: mol_type = other RNA
aggagagtcccgcagtcggcgtccagcggctctgcttgttcgtgtgtgtgtcgttgcaggccttattcaagcttaccatggacacctccccctccgagggcaccaacctcaacgcccccaactccctcggcgtctccgccctctgcgccatctgcggcgaccgcgccaccggcaagcactacggcgcctcctcctgcgacggctgcaagggcttcttccgccgcgaggtccgcaagaaccacatgtactcctgccgcttctcccgccagtgcgtcgtcgacaaggacaagcgcaaccagtgccgctactgccgcctcaagaagtgcttccgcgccggcatgaagaaggaggccgtccagaacgagcgcgaccgcatctccacccgccgctcctcctacgaggactcctccctcccctccatcaacgccctcctccaggccgaggtcctctcccgccagatcacctcccccgtctccggcatcaacggcgacatccgcgccaagaagatcgcctccatcgccgacgtctgcgagtccatgaaggagcagctcctcgtcctcgtcgagtgggccaagtacatccccgccttctgcgagctccccctcgacgaccaggtcgccctcctccgcgcccacgccggcgagcacctcctcctcggcgccaccaagcgctccatggtcttcaaggacgtcctcctcctcggcaacgactacatcgtcccccgccactgccccgagctcgccgagatgtcccgcgtctccatccgcatcctcgacgagctcgtcctccccttccaggagctccagatcgacgacaacgagtacgcctacctcaaggccatcatcttcttcgaccccgacgccaagggcctctccgaccccggcaagatcaagcgcctccgctcccaggtccaggtctccctcgaggactacatcaacgaccgccagtacgactcccgcggccgcttcggcgagctcctcctcctcctccccaccctccagtccatcacctggcagatgatcgagcagatccagttcatcaagctcttcggcatggccaagatcgacaacctcctccaggagatgctcctcggcggctccccctccgacgccccccacgcccaccaccccctccacccccacctcatgcaggagcacatgggcaccaacgtcatcgtcgccaacaccatgcccacccacctctccaacggccagatgtgcgagtggccccgcccccgcggccaggccgccacccccgagaccccccagccctccccccccggcggctccggctccgagccctacaagctcctccccggcgccgtcgccaccatcgtcaagcccctctccgccatcccccagcccaccatcaccaagcaggaggtcatctgaggactagtccctgttcccagagcccacttttttttctttttttgaaataaaatagcctgtctttcagatctcaaaggctcttttcagagccaccaaaaaaaaaaaaaaaaaaaaaaaaaaaaaaaaaaaaaaaaaaaaaaaaaaaaaaaaaaaaaaaaaaaaaaaaaaaaaaaaaaaaaaaaaaaaaaaaaaaaa

SEQ ID NO: 3904 - RNA, 1586 nt, synthetic construct
  misc_feature 1..1586: note = mRNA a-1 (hSL-A100) (opt2) from Homo sapiens__NP_000448.3__HNF4A(39-474)(R2V)
  source 1..1586: mol_type = other RNA
aggagagtcccgcagtcggcgtccagcggctctgcttgttcgtgtgtgtgtcgttgcaggccttattcaagcttaccatggacacctccccctccgagggcaccaacctcaacgcccccaactccctcggcgtctccgccctctgcgccatctgcggcgaccgcgccaccggcaagcactacggcgcctcctcctgcgacggctgcaagggcttcttccgccgctccgtccgcaagaaccacatgtactcctgccgcttctcccgccagtgcgtcgtcgacaaggacaagcgcaaccagtgccgctactgccgcctcaagaagtgcttccgcgccggcatgaagaaggaggccgtccagaacgagcgcgaccgcatctccacccgccgctcctcctacgaggactcctccctcccctccatcaacgccctcctccaggccgaggtcctctcccgccagatcacctcccccgtctccggcatcaacggcgacatccgcgccaagaagatcgcctccatcgccgacgtctgcgagtccatgaaggagcagctcctcgtcctcgtcgagtgggccaagtacatccccgccttctgcgagctccccctcgacgaccaggtcgccctcctccgcgcccacgccggcgagcacctcctcctcggcgccaccaagcgctccatggtcttcaaggacgtcctcctcctcggcaacgactacatcgtcccccgccactgccccgagctcgccgagatgtcccgcgtctccatccgcatcctcgacgagctcgtcctccccttccaggagctccagatcgacgacaacgagtacgcctacctcaaggccatcatcttcttcgaccccgacgccaagggcctctccgaccccggcaagatcaagcgcctccgctcccaggtccaggtctccctcgaggactacatcaacgaccgccagtacgactcccgcggccgcttcggcgagctcctcctcctcctccccaccctccagtccatcacctggcagatgatcgagcagatccagttcatcaagctcttcggcatggccaagatcgacaacctcctccaggagatgctcctcggcggctccccctccgacgccccccacgcccaccaccccctccacccccacctcatgcaggagcacatgggcaccaacgtcatcgtcgccaacaccatgcccacccacctctccaacggccagatgtgcgagtggccccgcccccgcggccaggccgccacccccgagaccccccagccctccccccccggcggctccggctccgagccctacaagctcctccccggcgccgtcgccaccatcgtcaagcccctctccgccatcccccagcccaccatcaccaagcaggaggtcatctgaggactagtccctgttcccagagcccacttttttttctttttttgaaataaaatagcctgtctttcagatctcaaaggctcttttcagagccaccaaaaaaaaaaaaaaaaaaaaaaaaaaaaaaaaaaaaaaaaaaaaaaaaaaaaaaaaaaaaaaaaaaaaaaaaaaaaaaaaaaaaaaaaaaaaaaaaaaaaa

SEQ ID NO: 3905 - RNA, 1586 nt, synthetic construct; identical to SEQ ID NO: 3904
  misc_feature 1..1586: note = mRNA a-1 (hSL-A100) (opt2) from Homo sapiens__NP_000448.3__HNF4A(39-474)(R2V_K5V)
  source 1..1586: mol_type = other RNA

SEQ ID NO: 3906 - RNA, 1586 nt, synthetic construct
  misc_feature 1..1586: note = mRNA a-1 (hSL-A100) (opt2) from Homo sapiens__NP_000448.3__HNF4A(39-474)(K179R_K180R)
  source 1..1586: mol_type = other RNA
aggagagtcccgcagtcggcgtccagcggctctgcttgttcgtgtgtgtgtcgttgcaggccttattcaagcttaccatggacacctccccctccgagggcaccaacctcaacgcccccaactccctcggcgtctccgccctctgcgccatctgcggcgaccgcgccaccggcaagcactacggcgcctcctcctgcgacggctgcaagggcttcttccgccgctccgtccgcaagaaccacatgtactcctgccgcttctcccgccagtgcgtcgtcgacaaggacaagcgcaaccagtgccgctactgccgcctcaagaagtgcttccgcgccggcatgaagaaggaggccgtccagaacgagcgcgaccgcatctccacccgccgctcctcctacgaggactcctccctcccctccatcaacgccctcctccaggccgaggtcctctcccgccagatcacctcccccgtctccggcatcaacggcgacatccgcgcccgccgcatcgcctccatcgccgacgtctgcgagtccatgaaggagcagctcctcgtcctcgtcgagtgggccaagtacatccccgccttctgcgagctccccctcgacgaccaggtcgccctcctccgcgcccacgccggcgagcacctcctcctcggcgccaccaagcgctccatggtcttcaaggacgtcctcctcctcggcaacgactacatcgtcccccgccactgccccgagctcgccgagatgtcccgcgtctccatccgcatcctcgacgagctcgtcctccccttccaggagctccagatcgacgacaacgagtacgcctacctcaaggccatcatcttcttcgaccccgacgccaagggcctctccgaccccggcaagatcaagcgcctccgctcccaggtccaggtctccctcgaggactacatcaacgaccgccagtacgactcccgcggccgcttcggcgagctcctcctcctcctccccaccctccagtccatcacctggcagatgatcgagcagatccagttcatcaagctcttcggcatggccaagatcgacaacctcctccaggagatgctcctcggcggctccccctccgacgccccccacgcccaccaccccctccacccccacctcatgcaggagcacatgggcaccaacgtcatcgtcgccaacaccatgcccacccacctctccaacggccagatgtgcgagtggccccgcccccgcggccaggccgccacccccgagaccccccagccctccccccccggcggctccggctccgagccctacaagctcctccccggcgccgtcgccaccatcgtcaagcccctctccgccatcccccagcccaccatcaccaagcaggaggtcatctgaggactagtccctgttcccagagcccacttttttttctttttttgaaataaaatagcctgtctttcagatctcaaaggctcttttcagagccaccaaaaaaaaaaaaaaaaaaaaaaaaaaaaaaaaaaaaaaaaaaaaaaaaaaaaaaaaaaaaaaaaaaaaaaaaaaaaaaaaaaaaaaaaaaaaaaaaaaaaa

SEQ ID NO: 3907 - RNA, 1586 nt, synthetic construct
  misc_feature 1..1586: note = mRNA a-1 (hSL-A100) (opt2) from Homo sapiens__NP_000448.3__HNF4A(39-474)(K234R)
  source 1..1586: mol_type = other RNA
aggagagtcccgcagtcggcgtccagcggctctgcttgttcgtgtgtgtgtcgttgcaggccttattcaagcttaccatggacacctccccctccgagggcaccaacctcaacgcccccaactccctcggcgtctccgccctctgcgccatctgcggcgaccgcgccaccggcaagcactacggcgcctcctcctgcgacggctgcaagggcttcttccgccgctccgtccgcaagaaccacatgtactcctgccgcttctcccgccagtgcgtcgtcgacaaggacaagcgcaaccagtgccgctactgccgcctcaagaagtgcttccgcgccggcatgaagaaggaggccgtccagaacgagcgcgaccgcatctccacccgccgctcctcctacgaggactcctccctcccctccatcaacgccctcctccaggccgaggtcctctcccgccagatcacctcccccgtctccggcatcaacggcgacatccgcgccaagaagatcgcctccatcgccgacgtctgcgagtccatgaaggagcagctcctcgtcctcgtcgagtgggccaagtacatccccgccttctgcgagctccccctcgacgaccaggtcgccctcctccgcgcccacgccggcgagcacctcctcctcggcgccacccgccgctccatggtcttcaaggacgtcctcctcctcggcaacgactacatcgtcccccgccactgccccgagctcgccgagatgtcccgcgtctccatccgcatcctcgacgagctcgtcctccccttccaggagctccagatcgacgacaacgagtacgcctacctcaaggccatcatcttcttcgaccccgacgccaagggcctctccgaccccggcaagatcaagcgcctccgctcccaggtccaggtctccctcgaggactacatcaacgaccgccagtacgactcccgcggccgcttcggcgagctcctcctcctcctccccaccctccagtccatcacctggcagatgatcgagcagatccagttcatcaagctcttcggcatggccaagatcgacaacctcctccaggagatgctcctcggcggctccccctccgacgccccccacgcccaccaccccctccacccccacctcatgcaggagcacatgggcaccaacgtcatcgtcgccaacaccatgcccacccacctctccaacggccagatgtgcgagtggccccgcccccgcggccaggccgccacccccgagaccccccagccctccccccccggcggctccggctccgagccctacaagctcctccccggcgccgtcgccaccatcgtcaagcccctctccgccatcccccagcccaccatcaccaagcaggaggtcatctgaggactagtccctgttcccagagcccacttttttttctttttttgaaataaaatagcctgtctttcagatctcaaaggctcttttcagagccaccaaaaaaaaaaaaaaaaaaaaaaaaaaaaaaaaaaaaaaaaaaaaaaaaaaaaaaaaaaaaaaaaaaaaaaaaaaaaaaaaaaaaaaaaaaaaaaaaaaaaa

SEQ ID NO: 3908 - RNA, 1586 nt, synthetic construct
  misc_feature 1..1586: note = mRNA a-1 (hSL-A100) (opt2) from Homo sapiens__NP_000448.3__HNF4A(39-474)(K300R)
  source 1..1586: mol_type = other RNA
aggagagtcccgcagtcggcgtccagcggctctgcttgttcgtgtgtgtgtcgttgcaggccttattcaagcttaccatggacacctccccctccgagggcaccaacctcaacgcccccaactccctcggcgtctccgccctctgcgccatctgcggcgaccgcgccaccggcaagcactacggcgcctcctcctgcgacggctgcaagggcttcttccgccgctccgtccgcaagaaccacatgtactcctgccgcttctcccgccagtgcgtcgtcgacaaggacaagcgcaaccagtgccgctactgccgcctcaagaagtgcttccgcgccggcatgaagaaggaggccgtccagaacgagcgcgaccgcatctccacccgccgctcctcctacgaggactcctccctcccctccatcaacgccctcctccaggccgaggtcctctcccgccagatcacctcccccgtctccggcatcaacggcgacatccgcgccaagaagatcgcctccatcgccgacgtctgcgagtccatgaaggagcagctcctcgtcctcgtcgagtgggccaagtacatccccgccttctgcgagctccccctcgacgaccaggtcgccctcctccgcgcccacgccggcgagcacctcctcctcggcgccaccaagcgctccatggtcttcaaggacgtcctcctcctcggcaacgactacatcgtcccccgccactgccccgagctcgccgagatgtcccgcgtctccatccgcatcctcgacgagctcgtcctccccttccaggagctccagatcgacgacaacgagtacgcctacctcaaggccatcatcttcttcgaccccgacgcccgcggcctctccgaccccggcaagatcaagcgcctccgctcccaggtccaggtctccctcgaggactacatcaacgaccgccagtacgactcccgcggccgcttcggcgagctcctcctcctcctccccaccctccagtccatcacctggcagatgatcgagcagatccagttcatcaagctcttcggcatggccaagatcgacaacctcctccaggagatgctcctcggcggctccccctccgacgccccccacgcccaccaccccctccacccccacctcatgcaggagcacatgggcaccaacgtcatcgtcgccaacaccatgcccacccacctctccaacggccagatgtgcgagtggccccgcccccgcggccaggccgccacccccgagaccccccagccctccccccccggcggctccggctccgagccctacaagctcctccccggcgccgtcgccaccatcgtcaagcccctctccgccatcccccagcccaccatcaccaagcaggaggtcatctgaggactagtccctgttcccagagcccacttttttttctttttttgaaataaaatagcctgtctttcagatctcaaaggctcttttcagagccaccaaaaaaaaaaaaaaaaaaaaaaaaaaaaaaaaaaaaaaaaaaaaaaaaaaaaaaaaaaaaaaaaaaaaaaaaaaaaaaaaaaaaaaaaaaaaaaaaaaaaa

SEQ ID NO: 3909 - RNA, 1586 nt, synthetic construct
  misc_feature 1..1586: note = mRNA a-1 (hSL-A100) (opt2) from Homo sapiens__NP_000448.3__HNF4A(39-474)(K300R_K307R_K309R)
  source 1..1586: mol_type = other RNA
aggagagtcccgcagtcggcgtccagcggctctgcttgttcgtgtgtgtgtcgttgcaggccttattcaagcttaccatggacacctccccctccgagggcaccaacctcaacgcccccaactccctcggcgtctccgccctctgcgccatctgcggcgaccgcgccaccggcaagcactacggcgcctcctcctgcgacggctgcaagggcttcttccgccgctccgtccgcaagaaccacatgtactcctgccgcttctcccgccagtgcgtcgtcgacaaggacaagcgcaaccagtgccgctactgccgcctcaagaagtgcttccgcgccggcatgaagaaggaggccgtccagaacgagcgcgaccgcatctccacccgccgctcctcctacgaggactcctccctcccctccatcaacgccctcctccaggccgaggtcctctcccgccagatcacctcccccgtctccggcatcaacggcgacatccgcgccaagaagatcgcctccatcgccgacgtctgcgagtccatgaaggagcagctcctcgtcctcgtcgagtgggccaagtacatccccgccttctgcgagctccccctcgacgaccaggtcgccctcctccgcgcccacgccggcgagcacctcctcctcggcgccaccaagcgctccatggtcttcaaggacgtcctcctcctcggcaacgactacatcgtcccccgccactgccccgagctcgccgagatgtcccgcgtctccatccgcatcctcgacgagctcgtcctccccttccaggagctccagatcgacgacaacgagtacgcctacctcaaggccatcatcttcttcgaccccgacgcccgcggcctctccgaccccggccgcatccgccgcctccgctcccaggtccaggtctccctcgaggactacatcaacgaccgccagtacgactcccgcggccgcttcggcgagctcctcctcctcctccccaccctccagtccatcacctggcagatgatcgagcagatccagttcatcaagctcttcggcatggccaagatcgacaacctcctccaggagatgctcctcggcggctccccctccgacgccccccacgcccaccaccccctccacccccacctcatgcaggagcacatgggcaccaacgtcatcgtcgccaacaccatgcccacccacctctccaacggccagatgtgcgagtggccccgcccccgcggccaggccgccacccccgagaccccccagccctccccccccggcggctccggctccgagccctacaagctcctccccggcgccgtcgccaccatcgtcaagcccctctccgccatcccccagcccaccatcaccaagcaggaggtcatctgaggactagtccctgttcccagagcccacttttttttctttttttgaaataaaatagcctgtctttcagatctcaaaggctcttttcagagccaccaaaaaaaaaaaaaaaaaaaaaaaaaaaaaaaaaaaaaaaaaaaaaaaaaaaaaaaaaaaaaaaaaaaaaaaaaaaaaaaaaaaaaaaaaaaaaaaaaaaaa

SEQ ID NO: 3910 - RNA, 1586 nt, synthetic construct
  misc_feature 1..1586: note = mRNA a-1 (hSL-A100) (opt2) from Homo sapiens__NP_000448.3__HNF4A(39-474)(K447R_K470R)
  source 1..1586: mol_type = other RNA
aggagagtcccgcagtcggcgtccagcggctctgcttgttcgtgtgtgtgtcgttgcaggccttattcaagcttaccatggacacctccccctccgagggcaccaacctcaacgcccccaactccctcggcgtctccgccctctgcgccatctgcggcgaccgcgccaccggcaagcactacggcgcctcctcctgcgacggctgcaagggcttcttccgccgctccgtccgcaagaaccacatgtactcctgccgcttctcccgccagtgcgtcgtcgacaaggacaagcgcaaccagtgccgctactgccgcctcaagaagtgcttccgcgccggcatgaagaaggaggccgtccagaacgagcgcgaccgcatctccacccgccgctcctcctacgaggactcctccctcccctccatcaacgccctcctccaggccgaggtcctctcccgccagatcacctcccccgtctccggcatcaacggcgacatccgcgccaagaagatcgcctccatcgccgacgtctgcgagtccatgaaggagcagctcctcgtcctcgtcgagtgggccaagtacatccccgccttctgcgagctccccctcgacgaccaggtcgccctcctccgcgcccacgccggcgagcacctcctcctcggcgccaccaagcgctccatggtcttcaaggacgtcctcctcctcggcaacgactacatcgtcccccgccactgccccgagctcgccgagatgtcccgcgtctccatccgcatcctcgacgagctcgtcctccccttccaggagctccagatcgacgacaacgagtacgcctacctcaaggccatcatcttcttcgaccccgacgccaagggcctctccgaccccggcaagatcaagcgcctccgctcccaggtccaggtctccctcgaggactacatcaacgaccgccagtacgactcccgcggccgcttcggcgagctcctcctcctcctccccaccctccagtccatcacctggcagatgatcgagcagatccagttcatcaagctcttcggcatggccaagatcgacaacctcctccaggagatgctcctcggcggctccccctccgacgccccccacgcccaccaccccctccacccccacctcatgcaggagcacatgggcaccaacgtcatcgtcgccaacaccatgcccacccacctctccaacggccagatgtgcgagtggccccgcccccgcggccaggccgccacccccgagaccccccagccctccccccccggcggctccggctccgagccctaccgcctcctccccggcgccgtcgccaccatcgtcaagcccctctccgccatcccccagcccaccatcacccgccaggaggtcatctgaggactagtccctgttcccagagcccacttttttttctttttttgaaataaaatagcctgtctttcagatctcaaaggctcttttcagagccaccaaaaaaaaaaaaaaaaaaaaaaaaaaaaaaaaaaaaaaaaaaaaaaaaaaaaaaaaaaaaaaaaaaaaaaaaaaaaaaaaaaaaaaaaaaaaaaaaaaaaa

SEQ ID NO: 3911 - RNA, 1586 nt, synthetic construct
  misc_feature 1..1586: note = mRNA a-1 (hSL-A100) (opt2) from Homo sapiens__NP_000448.3__HNF4A(39-474)(K458R)
  source 1..1586: mol_type = other RNA
aggagagtcccgcagtcggcgtccagcggctctgcttgttcgtgtgtgtgtcgttgcaggccttattcaagcttaccatggacacctccccctccgagggcaccaacctcaacgcccccaactccctcggcgtctccgccctctgcgccatctgcggcgaccgcgccaccggcaagcactacggcgcctcctcctgcgacggctgcaagggcttcttccgccgctccgtccgcaagaaccacatgtactcctgccgcttctcccgccagtgcgtcgtcgacaaggacaagcgcaaccagtgccgctactgccgcctcaagaagtgcttccgcgccggcatgaagaaggaggccgtccagaacgagcgcgaccgcatctccacccgccgctcctcctacgaggactcctccctcccctccatcaacgccctcctccaggccgaggtcctctcccgccagatcacctcccccgtctccggcatcaacggcgacatccgcgccaagaagatcgcctccatcgccgacgtctgcgagtccatgaaggagcagctcctcgtcctcgtcgagtgggccaagtacatccccgccttctgcgagctccccctcgacgaccaggtcgccctcctccgcgcccacgccggcgagcacctcctcctcggcgccaccaagcgctccatggtcttcaaggacgtcctcctcctcggcaacgactacatcgtcccccgccactgccccgagctcgccgagatgtcccgcgtctccatccgcatcctcgacgagctcgtcctccccttccaggagctccagatcgacgacaacgagtacgcctacctcaaggccatcatcttcttcgaccccgacgccaagggcctctccgaccccggcaagatcaagcgcctccgctcccaggtccaggtctccctcgaggactacatcaacgaccgccagtacgactcccgcggccgcttcggcgagctcctcctcctcctccccaccctccagtccatcacctggcagatgatcgagcagatccagttcatcaagctcttcggcatggccaagatcgacaacctcctccaggagatgctcctcggcggctccccctccgacgccccccacgcccaccaccccctccacccccacctcatgcaggagcacatgggcaccaacgtcatcgtcgccaacaccatgcccacccacctctccaacggccagatgtgcgagtggccccgcccccgcggccaggccgccacccccgagaccccccagccctccccccccggcggctccggctccgagccctacaagctcctccccggcgccgtcgccaccatcgtccgccccctctccgccatcccccagcccaccatcaccaagcaggaggtcatctgaggactagtccctgttcccagagcccacttttttttctttttttgaaataaaatagcctgtctttcagatctcaaaggctcttttcagagccaccaaaaaaaaaaaaaaaaaaaaaaaaaaaaaaaaaaaaaaaaaaaaaaaaaaaaaaaaaaaaaaaaaaaaaaaaaaaaaaaaaaaaaaaaaaaaaaaaaaaaa

SEQ ID NO: 3912 - RNA, 1586 nt, synthetic construct
  misc_feature 1..1586: note = mRNA a-1 (hSL-A100) (opt2) from Homo sapiens__NP_000448.3__HNF4A(39-474)(K106R_K108R_K126R_K127R )
  source 1..1586: mol_type = other RNA
aggagagtcccgcagtcggcgtccagcggctctgcttgttcgtgtgtgtgtcgttgcaggccttattcaagcttaccatggacacctccccctccgagggcaccaacctcaacgcccccaactccctcggcgtctccgccctctgcgccatctgcggcgaccgcgccaccggcaagcactacggcgcctcctcctgcgacggctgcaagggcttcttccgccgctccgtccgcaagaaccacatgtactcctgccgcttctcccgccagtgcgtcgtcgaccgcgaccgccgcaaccagtgccgctactgccgcctcaagaagtgcttccgcgccggcatgcgccgcgaggccgtccagaacgagcgcgaccgcatctccacccgccgctcctcctacgaggactcctccctcccctccatcaacgccctcctccaggccgaggtcctctcccgccagatcacctcccccgtctccggcatcaacggcgacatccgcgccaagaagatcgcctccatcgccgacgtctgcgagtccatgaaggagcagctcctcgtcctcgtcgagtgggccaagtacatccccgccttctgcgagctccccctcgacgaccaggtcgccctcctccgcgcccacgccggcgagcacctcctcctcggcgccaccaagcgctccatggtcttcaaggacgtcctcctcctcggcaacgactacatcgtcccccgccactgccccgagctcgccgagatgtcccgcgtctccatccgcatcctcgacgagctcgtcctccccttccaggagctccagatcgacgacaacgagtacgcctacctcaaggccatcatcttcttcgaccccgacgccaagggcctctccgaccccggcaagatcaagcgcctccgctcccaggtccaggtctccctcgaggactacatcaacgaccgccagtacgactcccgcggccgcttcggcgagctcctcctcctcctccccaccctccagtccatcacctggcagatgatcgagcagatccagttcatcaagctcttcggcatggccaagatcgacaacctcctccaggagatgctcctcggcggctccccctccgacgccccccacgcccaccaccccctccacccccacctcatgcaggagcacatgggcaccaacgtcatcgtcgccaacaccatgcccacccacctctccaacggccagatgtgcgagtggccccgcccccgcggccaggccgccacccccgagaccccccagccctccccccccggcggctccggctccgagccctacaagctcctccccggcgccgtcgccaccatcgtcaagcccctctccgccatcccccagcccaccatcaccaagcaggaggtcatctgaggactagtccctgttcccagagcccacttttttttctttttttgaaataaaatagcctgtctttcagatctcaaaggctcttttcagagccaccaaaaaaaaaaaaaaaaaaaaaaaaaaaaaaaaaaaaaaaaaaaaaaaaaaaaaaaaaaaaaaaaaaaaaaaaaaaaaaaaaaaaaaaaaaaaaaaaaaaaa

SEQ ID NO: 3913 - RNA, 1586 nt, synthetic construct
  misc_feature 1..1586: note = mRNA a-1 (hSL-A100) (opt2) from Homo sapiens__NP_000448.3__HNF4A(39-474)(E285Q)
  source 1..1586: mol_type = other RNA
aggagagtcccgcagtcggcgtccagcggctctgcttgttcgtgtgtgtgtcgttgcaggccttattcaagcttaccatggacacctccccctccgagggcaccaacctcaacgcccccaactccctcggcgtctccgccctctgcgccatctgcggcgaccgcgccaccggcaagcactacggcgcctcctcctgcgacggctgcaagggcttcttccgccgctccgtccgcaagaaccacatgtactcctgccgcttctcccgccagtgcgtcgtcgacaaggacaagcgcaaccagtgccgctactgccgcctcaagaagtgcttccgcgccggcatgaagaaggaggccgtccagaacgagcgcgaccgcatctccacccgccgctcctcctacgaggactcctccctcccctccatcaacgccctcctccaggccgaggtcctctcccgccagatcacctcccccgtctccggcatcaacggcgacatccgcgccaagaagatcgcctccatcgccgacgtctgcgagtccatgaaggagcagctcctcgtcctcgtcgagtgggccaagtacatccccgccttctgcgagctccccctcgacgaccaggtcgccctcctccgcgcccacgccggcgagcacctcctcctcggcgccaccaagcgctccatggtcttcaaggacgtcctcctcctcggcaacgactacatcgtcccccgccactgccccgagctcgccgagatgtcccgcgtctccatccgcatcctcgacgagctcgtcctccccttccaggagctccagatcgacgacaaccagtacgcctacctcaaggccatcatcttcttcgaccccgacgccaagggcctctccgaccccggcaagatcaagcgcctccgctcccaggtccaggtctccctcgaggactacatcaacgaccgccagtacgactcccgcggccgcttcggcgagctcctcctcctcctccccaccctccagtccatcacctggcagatgatcgagcagatccagttcatcaagctcttcggcatggccaagatcgacaacctcctccaggagatgctcctcggcggctccccctccgacgccccccacgcccaccaccccctccacccccacctcatgcaggagcacatgggcaccaacgtcatcgtcgccaacaccatgcccacccacctctccaacggccagatgtgcgagtggccccgcccccgcggccaggccgccacccccgagaccccccagccctccccccccggcggctccggctccgagccctacaagctcctccccggcgccgtcgccaccatcgtcaagcccctctccgccatcccccagcccaccatcaccaagcaggaggtcatctgaggactagtccctgttcccagagcccacttttttttctttttttgaaataaaatagcctgtctttcagatctcaaaggctcttttcagagccaccaaaaaaaaaaaaaaaaaaaaaaaaaaaaaaaaaaaaaaaaaaaaaaaaaaaaaaaaaaaaaaaaaaaaaaaaaaaaaaaaaaaaaaaaaaaaaaaaaaaaa

SEQ ID NO: 3914 - RNA, 1586 nt, synthetic construct
  misc_feature 1..1586: note = mRNA a-1 (hSL-A100) (opt2) from Homo sapiens__NP_000448.3__HNF4A(39-474)(T166E)
  source 1..1586: mol_type = other RNA
aggagagtcccgcagtcggcgtccagcggctctgcttgttcgtgtgtgtgtcgttgcaggccttattcaagcttaccatggacacctccccctccgagggcaccaacctcaacgcccccaactccctcggcgtctccgccctctgcgccatctgcggcgaccgcgccaccggcaagcactacggcgcctcctcctgcgacggctgcaagggcttcttccgccgctccgtccgcaagaaccacatgtactcctgccgcttctcccgccagtgcgtcgtcgacaaggacaagcgcaaccagtgccgctactgccgcctcaagaagtgcttccgcgccggcatgaagaaggaggccgtccagaacgagcgcgaccgcatctccacccgccgctcctcctacgaggactcctccctcccctccatcaacgccctcctccaggccgaggtcctctcccgccagatcgagtcccccgtctccggcatcaacggcgacatccgcgccaagaagatcgcctccatcgccgacgtctgcgagtccatgaaggagcagctcctcgtcctcgtcgagtgggccaagtacatccccgccttctgcgagctccccctcgacgaccaggtcgccctcctccgcgcccacgccggcgagcacctcctcctcggcgccaccaagcgctccatggtcttcaaggacgtcctcctcctcggcaacgactacatcgtcccccgccactgccccgagctcgccgagatgtcccgcgtctccatccgcatcctcgacgagctcgtcctccccttccaggagctccagatcgacgacaacgagtacgcctacctcaaggccatcatcttcttcgaccccgacgccaagggcctctccgaccccggcaagatcaagcgcctccgctcccaggtccaggtctccctcgaggactacatcaacgaccgccagtacgactcccgcggccgcttcggcgagctcctcctcctcctccccaccctccagtccatcacctggcagatgatcgagcagatccagttcatcaagctcttcggcatggccaagatcgacaacctcctccaggagatgctcctcggcggctccccctccgacgccccccacgcccaccaccccctccacccccacctcatgcaggagcacatgggcaccaacgtcatcgtcgccaacaccatgcccacccacctctccaacggccagatgtgcgagtggccccgcccccgcggccaggccgccacccccgagaccccccagccctccccccccggcggctccggctccgagccctacaagctcctccccggcgccgtcgccaccatcgtcaagcccctctccgccatcccccagcccaccatcaccaagcaggaggtcatctgaggactagtccctgttcccagagcccacttttttttctttttttgaaataaaatagcctgtctttcagatctcaaaggctcttttcagagccaccaaaaaaaaaaaaaaaaaaaaaaaaaaaaaaaaaaaaaaaaaaaaaaaaaaaaaaaaaaaaaaaaaaaaaaaaaaaaaaaaaaaaaaaaaaaaaaaaaaaaa

SEQ ID NO: 3915 - RNA, 1586 nt, synthetic construct
  misc_feature 1..1586: note = mRNA a-1 (hSL-A100) (opt2) from Homo sapiens__NP_000448.3__HNF4A(39-474)(S148A)
  source 1..1586: mol_type = other RNA
aggagagtcccgcagtcggcgtccagcggctctgcttgttcgtgtgtgtgtcgttgcaggccttattcaagcttaccatggacacctccccctccgagggcaccaacctcaacgcccccaactccctcggcgtctccgccctctgcgccatctgcggcgaccgcgccaccggcaagcactacggcgcctcctcctgcgacggctgcaagggcttcttccgccgctccgtccgcaagaaccacatgtactcctgccgcttctcccgccagtgcgtcgtcgacaaggacaagcgcaaccagtgccgctactgccgcctcaagaagtgcttccgcgccggcatgaagaaggaggccgtccagaacgagcgcgaccgcatctccacccgccgctcctcctacgaggactccgccctcccctccatcaacgccctcctccaggccgaggtcctctcccgccagatcacctcccccgtctccggcatcaacggcgacatccgcgccaagaagatcgcctccatcgccgacgtctgcgagtccatgaaggagcagctcctcgtcctcgtcgagtgggccaagtacatccccgccttctgcgagctccccctcgacgaccaggtcgccctcctccgcgcccacgccggcgagcacctcctcctcggcgccaccaagcgctccatggtcttcaaggacgtcctcctcctcggcaacgactacatcgtcccccgccactgccccgagctcgccgagatgtcccgcgtctccatccgcatcctcgacgagctcgtcctccccttccaggagctccagatcgacgacaacgagtacgcctacctcaaggccatcatcttcttcgaccccgacgccaagggcctctccgaccccggcaagatcaagcgcctccgctcccaggtccaggtctccctcgaggactacatcaacgaccgccagtacgactcccgcggccgcttcggcgagctcctcctcctcctccccaccctccagtccatcacctggcagatgatcgagcagatccagttcatcaagctcttcggcatggccaagatcgacaacctcctccaggagatgctcctcggcggctccccctccgacgccccccacgcccaccaccccctccacccccacctcatgcaggagcacatgggcaccaacgtcatcgtcgccaacaccatgcccacccacctctccaacggccagatgtgcgagtggccccgcccccgcggccaggccgccacccccgagaccccccagccctccccccccggcggctccggctccgagccctacaagctcctccccggcgccgtcgccaccatcgtcaagcccctctccgccatcccccagcccaccatcaccaagcaggaggtcatctgaggactagtccctgttcccagagcccacttttttttctttttttgaaataaaatagcctgtctttcagatctcaaaggctcttttcagagccaccaaaaaaaaaaaaaaaaaaaaaaaaaaaaaaaaaaaaaaaaaaaaaaaaaaaaaaaaaaaaaaaaaaaaaaaaaaaaaaaaaaaaaaaaaaaaaaaaaaaaa

SEQ ID NO: 3916 - RNA, 1586 nt, synthetic construct
  misc_feature 1..1586: note = mRNA a-1 (hSL-A100) (opt2) from Homo sapiens__NP_000448.3__HNF4A(39-474)(S148E)
  source 1..1586: mol_type = other RNA
aggagagtcccgcagtcggcgtccagcggctctgcttgttcgtgtgtgtgtcgttgcaggccttattcaagcttaccatggacacctccccctccgagggcaccaacctcaacgcccccaactccctcggcgtctccgccctctgcgccatctgcggcgaccgcgccaccggcaagcactacggcgcctcctcctgcgacggctgcaagggcttcttccgccgctccgtccgcaagaaccacatgtactcctgccgcttctcccgccagtgcgtcgtcgacaaggacaagcgcaaccagtgccgctactgccgcctcaagaagtgcttccgcgccggcatgaagaaggaggccgtccagaacgagcgcgaccgcatctccacccgccgctcctcctacgaggactccgagctcccctccatcaacgccctcctccaggccgaggtcctctcccgccagatcacctcccccgtctccggcatcaacggcgacatccgcgccaagaagatcgcctccatcgccgacgtctgcgagtccatgaaggagcagctcctcgtcctcgtcgagtgggccaagtacatccccgccttctgcgagctccccctcgacgaccaggtcgccctcctccgcgcccacgccggcgagcacctcctcctcggcgccaccaagcgctccatggtcttcaaggacgtcctcctcctcggcaacgactacatcgtcccccgccactgccccgagctcgccgagatgtcccgcgtctccatccgcatcctcgacgagctcgtcctccccttccaggagctccagatcgacgacaacgagtacgcctacctcaaggccatcatcttcttcgaccccgacgccaagggcctctccgaccccggcaagatcaagcgcctccgctcccaggtccaggtctccctcgaggactacatcaacgaccgccagtacgactcccgcggccgcttcggcgagctcctcctcctcctccccaccctccagtccatcacctggcagatgatcgagcagatccagttcatcaagctcttcggcatggccaagatcgacaacctcctccaggagatgctcctcggcggctccccctccgacgccccccacgcccaccaccccctccacccccacctcatgcaggagcacatgggcaccaacgtcatcgtcgccaacaccatgcccacccacctctccaacggccagatgtgcgagtggccccgcccccgcggccaggccgccacccccgagaccccccagccctccccccccggcggctccggctccgagccctacaagctcctccccggcgccgtcgccaccatcgtcaagcccctctccgccatcccccagcccaccatcaccaagcaggaggtcatctgaggactagtccctgttcccagagcccacttttttttctttttttgaaataaaatagcctgtctttcagatctcaaaggctcttttcagagccaccaaaaaaaaaaaaaaaaaaaaaaaaaaaaaaaaaaaaaaaaaaaaaaaaaaaaaaaaaaaaaaaaaaaaaaaaaaaaaaaaaaaaaaaaaaaaaaaaaaaaa

SEQ ID NO: 3917 - RNA, 1586 nt, synthetic construct
  misc_feature 1..1586: note = mRNA a-1 (hSL-A100) (opt2) from Homo sapiens__NP_000448.3__HNF4A(39-474)(S183A)
  source 1..1586: mol_type = other RNA
aggagagtcccgcagtcggcgtccagcggctctgcttgttcgtgtgtgtgtcgttgcaggccttattcaagcttaccatggacacctccccctccgagggcaccaacctcaacgcccccaactccctcggcgtctccgccctctgcgccatctgcggcgaccgcgccaccggcaagcactacggcgcctcctcctgcgacggctgcaagggcttcttccgccgctccgtccgcaagaaccacatgtactcctgccgcttctcccgccagtgcgtcgtcgacaaggacaagcgcaaccagtgccgctactgccgcctcaagaagtgcttccgcgccggcatgaagaaggaggccgtccagaacgagcgcgaccgcatctccacccgccgctcctcctacgaggactcctccctcccctccatcaacgccctcctccaggccgaggtcctctcccgccagatcacctcccccgtctccggcatcaacggcgacatccgcgccaagaagatcgccgccatcgccgacgtctgcgagtccatgaaggagcagctcctcgtcctcgtcgagtgggccaagtacatccccgccttctgcgagctccccctcgacgaccaggtcgccctcctccgcgcccacgccggcgagcacctcctcctcggcgccaccaagcgctccatggtcttcaaggacgtcctcctcctcggcaacgactacatcgtcccccgccactgccccgagctcgccgagatgtcccgcgtctccatccgcatcctcgacgagctcgtcctccccttccaggagctccagatcgacgacaacgagtacgcctacctcaaggccatcatcttcttcgaccccgacgccaagggcctctccgaccccggcaagatcaagcgcctccgctcccaggtccaggtctccctcgaggactacatcaacgaccgccagtacgactcccgcggccgcttcggcgagctcctcctcctcctccccaccctccagtccatcacctggcagatgatcgagcagatccagttcatcaagctcttcggcatggccaagatcgacaacctcctccaggagatgctcctcggcggctccccctccgacgccccccacgcccaccaccccctccacccccacctcatgcaggagcacatgggcaccaacgtcatcgtcgccaacaccatgcccacccacctctccaacggccagatgtgcgagtggccccgcccccgcggccaggccgccacccccgagaccccccagccctccccccccggcggctccggctccgagccctacaagctcctccccggcgccgtcgccaccatcgtcaagcccctctccgccatcccccagcccaccatcaccaagcaggaggtcatctgaggactagtccctgttcccagagcccacttttttttctttttttgaaataaaatagcctgtctttcagatctcaaaggctcttttcagagccaccaaaaaaaaaaaaaaaaaaaaaaaaaaaaaaaaaaaaaaaaaaaaaaaaaaaaaaaaaaaaaaaaaaaaaaaaaaaaaaaaaaaaaaaaaaaaaaaaaaaaa

SEQ ID NO: 3918 - RNA, 1586 nt, synthetic construct
  misc_feature 1..1586: note = mRNA a-1 (hSL-A100) (opt2) from Homo sapiens__NP_000448.3__HNF4A(39-474)(S183E)
  source 1..1586: mol_type = other RNA
aggagagtcccgcagtcggcgtccagcggctctgcttgttcgtgtgtgtgtcgttgcaggccttattcaagcttaccatggacacctccccctccgagggcaccaacctcaacgcccccaactccctcggcgtctccgccctctgcgccatctgcggcgaccgcgccaccggcaagcactacggcgcctcctcctgcgacggctgcaagggcttcttccgccgctccgtccgcaagaaccacatgtactcctgccgcttctcccgccagtgcgtcgtcgacaaggacaagcgcaaccagtgccgctactgccgcctcaagaagtgcttccgcgccggcatgaagaaggaggccgtccagaacgagcgcgaccgcatctccacccgccgctcctcctacgaggactcctccctcccctccatcaacgccctcctccaggccgaggtcctctcccgccagatcacctcccccgtctccggcatcaacggcgacatccgcgccaagaagatcgccgagatcgccgacgtctgcgagtccatgaaggagcagctcctcgtcctcgtcgagtgggccaagtacatccccgccttctgcgagctccccctcgacgaccaggtcgccctcctccgcgcccacgccggcgagcacctcctcctcggcgccaccaagcgctccatggtcttcaaggacgtcctcctcctcggcaacgactacatcgtcccccgccactgccccgagctcgccgagatgtcccgcgtctccatccgcatcctcgacgagctcgtcctccccttccaggagctccagatcgacgacaacgagtacgcctacctcaaggccatcatcttcttcgaccccgacgccaagggcctctccgaccccggcaagatcaagcgcctccgctcccaggtccaggtctccctcgaggactacatcaacgaccgccagtacgactcccgcggccgcttcggcgagctcctcctcctcctccccaccctccagtccatcacctggcagatgatcgagcagatccagttcatcaagctcttcggcatggccaagatcgacaacctcctccaggagatgctcctcggcggctccccctccgacgccccccacgcccaccaccccctccacccccacctcatgcaggagcacatgggcaccaacgtcatcgtcgccaacaccatgcccacccacctctccaacggccagatgtgcgagtggccccgcccccgcggccaggccgccacccccgagaccccccagccctccccccccggcggctccggctccgagccctacaagctcctccccggcgccgtcgccaccatcgtcaagcccctctccgccatcccccagcccaccatcaccaagcaggaggtcatctgaggactagtccctgttcccagagcccacttttttttctttttttgaaataaaatagcctgtctttcagatctcaaaggctcttttcagagccaccaaaaaaaaaaaaaaaaaaaaaaaaaaaaaaaaaaaaaaaaaaaaaaaaaaaaaaaaaaaaaaaaaaaaaaaaaaaaaaaaaaaaaaaaaaaaaaaaaaaaa

SEQ ID NO: 3919 - RNA, 1586 nt, synthetic construct
  misc_feature 1..1586: note = mRNA a-1 (hSL-A100) (opt2) from Homo sapiens__NP_000448.3__HNF4A(39-474)(S461A)
  source 1..1586: mol_type = other RNA
aggagagtcccgcagtcggcgtccagcggctctgcttgttcgtgtgtgtgtcgttgcaggccttattcaagcttaccatggacacctccccctccgagggcaccaacctcaacgcccccaactccctcggcgtctccgccctctgcgccatctgcggcgaccgcgccaccggcaagcactacggcgcctcctcctgcgacggctgcaagggcttcttccgccgctccgtccgcaagaaccacatgtactcctgccgcttctcccgccagtgcgtcgtcgacaaggacaagcgcaaccagtgccgctactgccgcctcaagaagtgcttccgcgccggcatgaagaaggaggccgtccagaacgagcgcgaccgcatctccacccgccgctcctcctacgaggactcctccctcccctccatcaacgccctcctccaggccgaggtcctctcccgccagatcacctcccccgtctccggcatcaacggcgacatccgcgccaagaagatcgcctccatcgccgacgtctgcgagtccatgaaggagcagctcctcgtcctcgtcgagtgggccaagtacatccccgccttctgcgagctccccctcgacgaccaggtcgccctcctccgcgcccacgccggcgagcacctcctcctcggcgccaccaagcgctccatggtcttcaaggacgtcctcctcctcggcaacgactacatcgtcccccgccactgccccgagctcgccgagatgtcccgcgtctccatccgcatcctcgacgagctcgtcctccccttccaggagctccagatcgacgacaacgagtacgcctacctcaaggccatcatcttcttcgaccccgacgccaagggcctctccgaccccggcaagatcaagcgcctccgctcccaggtccaggtctccctcgaggactacatcaacgaccgccagtacgactcccgcggccgcttcggcgagctcctcctcctcctccccaccctccagtccatcacctggcagatgatcgagcagatccagttcatcaagctcttcggcatggccaagatcgacaacctcctccaggagatgctcctcggcggctccccctccgacgccccccacgcccaccaccccctccacccccacctcatgcaggagcacatgggcaccaacgtcatcgtcgccaacaccatgcccacccacctctccaacggccagatgtgcgagtggccccgcccccgcggccaggccgccacccccgagaccccccagccctccccccccggcggctccggctccgagccctacaagctcctccccggcgccgtcgccaccatcgtcaagcccctcgccgccatcccccagcccaccatcaccaagcaggaggtcatctgaggactagtccctgttcccagagcccacttttttttctttttttgaaataaaatagcctgtctttcagatctcaaaggctcttttcagagccaccaaaaaaaaaaaaaaaaaaaaaaaaaaaaaaaaaaaaaaaaaaaaaaaaaaaaaaaaaaaaaaaaaaaaaaaaaaaaaaaaaaaaaaaaaaaaaaaaaaaaa

SEQ ID NO: 3920 - RNA, 1586 nt, synthetic construct
  misc_feature 1..1586: note = mRNA a-1 (hSL-A100) (opt2) from Homo sapiens__NP_000448.3__HNF4A(39-474)(S461E)
  source 1..1586: mol_type = other RNA
aggagagtcccgcagtcggcgtccagcggctctgcttgttcgtgtgtgtgtcgttgcaggccttattcaagcttaccatggacacctccccctccgagggcaccaacctcaacgcccccaactccctcggcgtctccgccctctgcgccatctgcggcgaccgcgccaccggcaagcactacggcgcctcctcctgcgacggctgcaagggcttcttccgccgctccgtccgcaagaaccacatgtactcctgccgcttctcccgccagtgcgtcgtcgacaaggacaagcgcaaccagtgccgctactgccgcctcaagaagtgcttccgcgccggcatgaagaaggaggccgtccagaacgagcgcgaccgcatctccacccgccgctcctcctacgaggactcctccctcccctccatcaacgccctcctccaggccgaggtcctctcccgccagatcacctcccccgtctccggcatcaacggcgacatccgcgccaagaagatcgcctccatcgccgacgtctgcgagtccatgaaggagcagctcctcgtcctcgtcgagtgggccaagtacatccccgccttctgcgagctccccctcgacgaccaggtcgccctcctccgcgcccacgccggcgagcacctcctcctcggcgccaccaagcgctccatggtcttcaaggacgtcctcctcctcggcaacgactacatcgtcccccgccactgccccgagctcgccgagatgtcccgcgtctccatccgcatcctcgacgagctcgtcctccccttccaggagctccagatcgacgacaacgagtacgcctacctcaaggccatcatcttcttcgaccccgacgccaagggcctctccgaccccggcaagatcaagcgcctccgctcccaggtccaggtctccctcgaggactacatcaacgaccgccagtacgactcccgcggccgcttcggcgagctcctcctcctcctccccaccctccagtccatcacctggcagatgatcgagcagatccagttcatcaagctcttcggcatggccaagatcgacaacctcctccaggagatgctcctcggcggctccccctccgacgccccccacgcccaccaccccctccacccccacctcatgcaggagcacatgggcaccaacgtcatcgtcgccaacaccatgcccacccacctctccaacggccagatgtgcgagtggccccgcccccgcggccaggccgccacccccgagaccccccagccctccccccccggcggctccggctccgagccctacaagctcctccccggcgccgtcgccaccatcgtcaagcccctcgaggccatcccccagcccaccatcaccaagcaggaggtcatctgaggactagtccctgttcccagagcccacttttttttctttttttgaaataaaatagcctgtctttcagatctcaaaggctcttttcagagccaccaaaaaaaaaaaaaaaaaaaaaaaaaaaaaaaaaaaaaaaaaaaaaaaaaaaaaaaaaaaaaaaaaaaaaaaaaaaaaaaaaaaaaaaaaaaaaaaaaaaaa

SEQ ID NO: 3921 - RNA, 1586 nt, synthetic construct
  misc_feature 1..1586: note = mRNA a-1 (hSL-A100) (opt2) from Homo sapiens__NP_000448.3__HNF4A(39-474)(S142A_S143A_S313A)
  source 1..1586: mol_type = other RNA
aggagagtcccgcagtcggcgtccagcggctctgcttgttcgtgtgtgtgtcgttgcaggccttattcaagcttaccatggacacctccccctccgagggcaccaacctcaacgcccccaactccctcggcgtctccgccctctgcgccatctgcggcgaccgcgccaccggcaagcactacggcgcctcctcctgcgacggctgcaagggcttcttccgccgctccgtccgcaagaaccacatgtactcctgccgcttctcccgccagtgcgtcgtcgacaaggacaagcgcaaccagtgccgctactgccgcctcaagaagtgcttccgcgccggcatgaagaaggaggccgtccagaacgagcgcgaccgcatctccacccgccgcgccgcctacgaggactcctccctcccctccatcaacgccctcctccaggccgaggtcctctcccgccagatcacctcccccgtctccggcatcaacggcgacatccgcgccaagaagatcgcctccatcgccgacgtctgcgagtccatgaaggagcagctcctcgtcctcgtcgagtgggccaagtacatccccgccttctgcgagctccccctcgacgaccaggtcgccctcctccgcgcccacgccggcgagcacctcctcctcggcgccaccaagcgctccatggtcttcaaggacgtcctcctcctcggcaacgactacatcgtcccccgccactgccccgagctcgccgagatgtcccgcgtctccatccgcatcctcgacgagctcgtcctccccttccaggagctccagatcgacgacaacgagtacgcctacctcaaggccatcatcttcttcgaccccgacgccaagggcctctccgaccccggcaagatcaagcgcctccgcgcccaggtccaggtctccctcgaggactacatcaacgaccgccagtacgactcccgcggccgcttcggcgagctcctcctcctcctccccaccctccagtccatcacctggcagatgatcgagcagatccagttcatcaagctcttcggcatggccaagatcgacaacctcctccaggagatgctcctcggcggctccccctccgacgccccccacgcccaccaccccctccacccccacctcatgcaggagcacatgggcaccaacgtcatcgtcgccaacaccatgcccacccacctctccaacggccagatgtgcgagtggccccgcccccgcggccaggccgccacccccgagaccccccagccctccccccccggcggctccggctccgagccctacaagctcctccccggcgccgtcgccaccatcgtcaagcccctctccgccatcccccagcccaccatcaccaagcaggaggtcatctgaggactagtccctgttcccagagcccacttttttttctttttttgaaataaaatagcctgtctttcagatctcaaaggctcttttcagagccaccaaaaaaaaaaaaaaaaaaaaaaaaaaaaaaaaaaaaaaaaaaaaaaaaaaaaaaaaaaaaaaaaaaaaaaaaaaaaaaaaaaaaaaaaaaaaaaaaaaaaa

SEQ ID NO: 3922 - RNA, 1586 nt, synthetic construct
  misc_feature 1..1586: note = mRNA a-1 (hSL-A100) (opt2) from Homo sapiens__NP_000448.3__HNF4A(39-474)(S142A_S143A_S313A_K458R )
  source 1..1586: mol_type = other RNA
aggagagtcccgcagtcggcgtccagcggctctgcttgttcgtgtgtgtgtcgttgcaggccttattcaagcttaccatggacacctccccctccgagggcaccaacctcaacgcccccaactccctcggcgtctccgccctctgcgccatctgcggcgaccgcgccaccggcaagcactacggcgcctcctcctgcgacggctgcaagggcttcttccgccgctccgtccgcaagaaccacatgtactcctgccgcttctcccgccagtgcgtcgtcgacaaggacaagcgcaaccagtgccgctactgccgcctcaagaagtgcttccgcgccggcatgaagaaggaggccgtccagaacgagcgcgaccgcatctccacccgccgcgccgcctacgaggactcctccctcccctccatcaacgccctcctccaggccgaggtcctctcccgccagatcacctcccccgtctccggcatcaacggcgacatccgcgccaagaagatcgcctccatcgccgacgtctgcgagtccatgaaggagcagctcctcgtcctcgtcgagtgggccaagtacatccccgccttctgcgagctccccctcgacgaccaggtcgccctcctccgcgcccacgccggcgagcacctcctcctcggcgccaccaagcgctccatggtcttcaaggacgtcctcctcctcggcaacgactacatcgtcccccgccactgccccgagctcgccgagatgtcccgcgtctccatccgcatcctcgacgagctcgtcctccccttccaggagctccagatcgacgacaacgagtacgcctacctcaaggccatcatcttcttcgaccccgacgccaagggcctctccgaccccggcaagatcaagcgcctccgcgcccaggtccaggtctccctcgaggactacatcaacgaccgccagtacgactcccgcggccgcttcggcgagctcctcctcctcctccccaccctccagtccatcacctggcagatgatcgagcagatccagttcatcaagctcttcggcatggccaagatcgacaacctcctccaggagatgctcctcggcggctccccctccgacgccccccacgcccaccaccccctccacccccacctcatgcaggagcacatgggcaccaacgtcatcgtcgccaacaccatgcccacccacctctccaacggccagatgtgcgagtggccccgcccccgcggccaggccgccacccccgagaccccccagccctccccccccggcggctccggctccgagccctacaagctcctccccggcgccgtcgccaccatcgtccgccccctctccgccatcccccagcccaccatcaccaagcaggaggtcatctgaggactagtccctgttcccagagcccacttttttttctttttttgaaataaaatagcctgtctttcagatctcaaaggctcttttcagagccaccaaaaaaaaaaaaaaaaaaaaaaaaaaaaaaaaaaaaaaaaaaaaaaaaaaaaaaaaaaaaaaaaaaaaaaaaaaaaaaaaaaaaaaaaaaaaaaaaaaaaa

SEQ ID NO: 3923 - RNA, 1586 nt, synthetic construct
  misc_feature 1..1586: note = mRNA a-1 (hSL-A100) (opt2) from Homo sapiens__NP_000448.3__HNF4A(39-474)(S142A_S143A_S167A_S313A _S378A_T429A_T432A_S436A_K458R)
  source 1..1586: mol_type = other RNA
aggagagtcccgcagtcggcgtccagcggctctgcttgttcgtgtgtgtgtcgttgcaggccttattcaagcttaccatggacacctccccctccgagggcaccaacctcaacgcccccaactccctcggcgtctccgccctctgcgccatctgcggcgaccgcgccaccggcaagcactacggcgcctcctcctgcgacggctgcaagggcttcttccgccgctccgtccgcaagaaccacatgtactcctgccgcttctcccgccagtgcgtcgtcgacaaggacaagcgcaaccagtgccgctactgccgcctcaagaagtgcttccgcgccggcatgaagaaggaggccgtccagaacgagcgcgaccgcatctccacccgccgcgccgcctacgaggactcctccctcccctccatcaacgccctcctccaggccgaggtcctctcccgccagatcaccgcccccgtctccggcatcaacggcgacatccgcgccaagaagatcgcctccatcgccgacgtctgcgagtccatgaaggagcagctcctcgtcctcgtcgagtgggccaagtacatccccgccttctgcgagctccccctcgacgaccaggtcgccctcctccgcgcccacgccggcgagcacctcctcctcggcgccaccaagcgctccatggtcttcaaggacgtcctcctcctcggcaacgactacatcgtcccccgccactgccccgagctcgccgagatgtcccgcgtctccatccgcatcctcgacgagctcgtcctccccttccaggagctccagatcgacgacaacgagtacgcctacctcaaggccatcatcttcttcgaccccgacgccaagggcctctccgaccccggcaagatcaagcgcctccgcgcccaggtccaggtctccctcgaggactacatcaacgaccgccagtacgactcccgcggccgcttcggcgagctcctcctcctcctccccaccctccagtccatcacctggcagatgatcgagcagatccagttcatcaagctcttcggcatggccaagatcgacaacctcctccaggagatgctcctcggcggcgccccctccgacgccccccacgcccaccaccccctccacccccacctcatgcaggagcacatgggcaccaacgtcatcgtcgccaacaccatgcccacccacctctccaacggccagatgtgcgagtggccccgcccccgcggccaggccgccgcccccgaggccccccagcccgccccccccggcggctccggctccgagccctacaagctcctccccggcgccgtcgccaccatcgtccgccccctctccgccatcccccagcccaccatcaccaagcaggaggtcatctgaggactagtccctgttcccagagcccacttttttttctttttttgaaataaaatagcctgtctttcagatctcaaaggctcttttcagagccaccaaaaaaaaaaaaaaaaaaaaaaaaaaaaaaaaaaaaaaaaaaaaaaaaaaaaaaaaaaaaaaaaaaaaaaaaaaaaaaaaaaaaaaaaaaaaaaaaaaaaa

SEQ ID NO: 3924 - RNA, 1586 nt, synthetic construct
  misc_feature 1..1586: note = mRNA a-1 (hSL-A100) (opt2) from Homo sapiens__NP_000448.3__HNF4A(39-474)(S142A_S143A_S148A_S167A _S313A_S378A_T429A_T432A_S436A_K458R)
  source 1..1586: mol_type = other RNA
aggagagtcccgcagtcggcgtccagcggctctgcttgttcgtgtgtgtgtcgttgcaggccttattcaagcttaccatggacacctccccctccgagggcaccaacctcaacgcccccaactccctcggcgtctccgccctctgcgccatctgcggcgaccgcgccaccggcaagcactacggcgcctcctcctgcgacggctgcaagggcttcttccgccgctccgtccgcaagaaccacatgtactcctgccgcttctcccgccagtgcgtcgtcgacaaggacaagcgcaaccagtgccgctactgccgcctcaagaagtgcttccgcgccggcatgaagaaggaggccgtccagaacgagcgcgaccgcatctccacccgccgcgccgcctacgaggactccgccctcccctccatcaacgccctcctccaggccgaggtcctctcccgccagatcaccgcccccgtctccggcatcaacggcgacatccgcgccaagaagatcgcctccatcgccgacgtctgcgagtccatgaaggagcagctcctcgtcctcgtcgagtgggccaagtacatccccgccttctgcgagctccccctcgacgaccaggtcgccctcctccgcgcccacgccggcgagcacctcctcctcggcgccaccaagcgctccatggtcttcaaggacgtcctcctcctcggcaacgactacatcgtcccccgccactgccccgagctcgccgagatgtcccgcgtctccatccgcatcctcgacgagctcgtcctccccttccaggagctccagatcgacgacaacgagtacgcctacctcaaggccatcatcttcttcgaccccgacgccaagggcctctccgaccccggcaagatcaagcgcctccgcgcccaggtccaggtctccctcgaggactacatcaacgaccgccagtacgactcccgcggccgcttcggcgagctcctcctcctcctccccaccctccagtccatcacctggcagatgatcgagcagatccagttcatcaagctcttcggcatggccaagatcgacaacctcctccaggagatgctcctcggcggcgccccctccgacgccccccacgcccaccaccccctccacccccacctcatgcaggagcacatgggcaccaacgtcatcgtcgccaacaccatgcccacccacctctccaacggccagatgtgcgagtggccccgcccccgcggccaggccgccgcccccgaggccccccagcccgccccccccggcggctccggctccgagccctacaagctcctccccggcgccgtcgccaccatcgtccgccccctctccgccatcccccagcccaccatcaccaagcaggaggtcatctgaggactagtccctgttcccagagcccacttttttttctttttttgaaataaaatagcctgtctttcagatctcaaaggctcttttcagagccaccaaaaaaaaaaaaaaaaaaaaaaaaaaaaaaaaaaaaaaaaaaaaaaaaaaaaaaaaaaaaaaaaaaaaaaaaaaaaaaaaaaaaaaaaaaaaaaaaaaaaa

SEQ ID NO: 3925 - RNA, 1586 nt, synthetic construct
  misc_feature 1..1586: note = mRNA a-1 (hSL-A100) (opt2) from Homo sapiens__NP_000448.3__HNF4A(39-474)(K106R_K108R_K126R_K127R _S142A_S143A_S148A_S167A_S313A_S378A_T429A_T432A_S436A_K458 R)
  source 1..1586: mol_type = other RNA
aggagagtcccgcagtcggcgtccagcggctctgcttgttcgtgtgtgtgtcgttgcaggccttattcaagcttaccatggacacctccccctccgagggcaccaacctcaacgcccccaactccctcggcgtctccgccctctgcgccatctgcggcgaccgcgccaccggcaagcactacggcgcctcctcctgcgacggctgcaagggcttcttccgccgctccgtccgcaagaaccacatgtactcctgccgcttctcccgccagtgcgtcgtcgaccgcgaccgccgcaaccagtgccgctactgccgcctcaagaagtgcttccgcgccggcatgcgccgcgaggccgtccagaacgagcgcgaccgcatctccacccgccgcgccgcctacgaggactccgccctcccctccatcaacgccctcctccaggccgaggtcctctcccgccagatcaccgcccccgtctccggcatcaacggcgacatccgcgccaagaagatcgcctccatcgccgacgtctgcgagtccatgaaggagcagctcctcgtcctcgtcgagtgggccaagtacatccccgccttctgcgagctccccctcgacgaccaggtcgccctcctccgcgcccacgccggcgagcacctcctcctcggcgccaccaagcgctccatggtcttcaaggacgtcctcctcctcggcaacgactacatcgtcccccgccactgccccgagctcgccgagatgtcccgcgtctccatccgcatcctcgacgagctcgtcctccccttccaggagctccagatcgacgacaacgagtacgcctacctcaaggccatcatcttcttcgaccccgacgccaagggcctctccgaccccggcaagatcaagcgcctccgcgcccaggtccaggtctccctcgaggactacatcaacgaccgccagtacgactcccgcggccgcttcggcgagctcctcctcctcctccccaccctccagtccatcacctggcagatgatcgagcagatccagttcatcaagctcttcggcatggccaagatcgacaacctcctccaggagatgctcctcggcggcgccccctccgacgccccccacgcccaccaccccctccacccccacctcatgcaggagcacatgggcaccaacgtcatcgtcgccaacaccatgcccacccacctctccaacggccagatgtgcgagtggccccgcccccgcggccaggccgccgcccccgaggccccccagcccgccccccccggcggctccggctccgagccctacaagctcctccccggcgccgtcgccaccatcgtccgccccctctccgccatcccccagcccaccatcaccaagcaggaggtcatctgaggactagtccctgttcccagagcccacttttttttctttttttgaaataaaatagcctgtctttcagatctcaaaggctcttttcagagccaccaaaaaaaaaaaaaaaaaaaaaaaaaaaaaaaaaaaaaaaaaaaaaaaaaaaaaaaaaaaaaaaaaaaaaaaaaaaaaaaaaaaaaaaaaaaaaaaaaaaaa

SEQ ID NO: 3926 - RNA, 1586 nt, synthetic construct
  misc_feature 1..1586: note = mRNA a-1 (hSL-A100) (opt2) from Homo sapiens__NP_000448.3__HNF4A(39-474)(S142A_S143A_S148A_T166A _S167A_S313A_S378A_T429A_T432A_S436A_K458R)
  source 1..1586: mol_type = other RNA
aggagagtcccgcagtcggcgtccagcggctctgcttgttcgtgtgtgtgtcgttgcaggccttattcaagcttaccatggacacctccccctccgagggcaccaacctcaacgcccccaactccctcggcgtctccgccctctgcgccatctgcggcgaccgcgccaccggcaagcactacggcgcctcctcctgcgacggctgcaagggcttcttccgccgctccgtccgcaagaaccacatgtactcctgccgcttctcccgccagtgcgtcgtcgacaaggacaagcgcaaccagtgccgctactgccgcctcaagaagtgcttccgcgccggcatgaagaaggaggccgtccagaacgagcgcgaccgcatctccacccgccgcgccgcctacgaggactccgccctcccctccatcaacgccctcctccaggccgaggtcctctcccgccagatcgccgcccccgtctccggcatcaacggcgacatccgcgccaagaagatcgcctccatcgccgacgtctgcgagtccatgaaggagcagctcctcgtcctcgtcgagtgggccaagtacatccccgccttctgcgagctccccctcgacgaccaggtcgccctcctccgcgcccacgccggcgagcacctcctcctcggcgccaccaagcgctccatggtcttcaaggacgtcctcctcctcggcaacgactacatcgtcccccgccactgccccgagctcgccgagatgtcccgcgtctccatccgcatcctcgacgagctcgtcctccccttccaggagctccagatcgacgacaacgagtacgcctacctcaaggccatcatcttcttcgaccccgacgccaagggcctctccgaccccggcaagatcaagcgcctccgcgcccaggtccaggtctccctcgaggactacatcaacgaccgccagtacgactcccgcggccgcttcggcgagctcctcctcctcctccccaccctccagtccatcacctggcagatgatcgagcagatccagttcatcaagctcttcggcatggccaagatcgacaacctcctccaggagatgctcctcggcggcgccccctccgacgccccccacgcccaccaccccctccacccccacctcatgcaggagcacatgggcaccaacgtcatcgtcgccaacaccatgcccacccacctctccaacggccagatgtgcgagtggccccgcccccgcggccaggccgccgcccccgaggccccccagcccgccccccccggcggctccggctccgagccctacaagctcctccccggcgccgtcgccaccatcgtccgccccctctccgccatcccccagcccaccatcaccaagcaggaggtcatctgaggactagtccctgttcccagagcccacttttttttctttttttgaaataaaatagcctgtctttcagatctcaaaggctcttttcagagccaccaaaaaaaaaaaaaaaaaaaaaaaaaaaaaaaaaaaaaaaaaaaaaaaaaaaaaaaaaaaaaaaaaaaaaaaaaaaaaaaaaaaaaaaaaaaaaaaaaaaaa

SEQ ID NO: 3927 - RNA, 1586 nt, synthetic construct
  misc_feature 1..1586: note = mRNA a-1 (hSL-A100) (opt2) from Homo sapiens__NP_000448.3__HNF4A(39-474)(S87A_S142A_S143A_S148A_ T166A_S167A_S313A_S378A_T429A_T432A_S436A_K458R)
  source 1..1586: mol_type = other RNA
aggagagtcccgcagtcggcgtccagcggctctgcttgttcgtgtgtgtgtcgttgcaggccttattcaagcttaccatggacacctccccctccgagggcaccaacctcaacgcccccaactccctcggcgtctccgccctctgcgccatctgcggcgaccgcgccaccggcaagcactacggcgcctcctcctgcgacggctgcaagggcttcttccgccgcgccgtccgcaagaaccacatgtactcctgccgcttctcccgccagtgcgtcgtcgacaaggacaagcgcaaccagtgccgctactgccgcctcaagaagtgcttccgcgccggcatgaagaaggaggccgtccagaacgagcgcgaccgcatctccacccgccgcgccgcctacgaggactccgccctcccctccatcaacgccctcctccaggccgaggtcctctcccgccagatcgccgcccccgtctccggcatcaacggcgacatccgcgccaagaagatcgcctccatcgccgacgtctgcgagtccatgaaggagcagctcctcgtcctcgtcgagtgggccaagtacatccccgccttctgcgagctccccctcgacgaccaggtcgccctcctccgcgcccacgccggcgagcacctcctcctcggcgccaccaagcgctccatggtcttcaaggacgtcctcctcctcggcaacgactacatcgtcccccgccactgccccgagctcgccgagatgtcccgcgtctccatccgcatcctcgacgagctcgtcctccccttccaggagctccagatcgacgacaacgagtacgcctacctcaaggccatcatcttcttcgaccccgacgccaagggcctctccgaccccggcaagatcaagcgcctccgcgcccaggtccaggtctccctcgaggactacatcaacgaccgccagtacgactcccgcggccgcttcggcgagctcctcctcctcctccccaccctccagtccatcacctggcagatgatcgagcagatccagttcatcaagctcttcggcatggccaagatcgacaacctcctccaggagatgctcctcggcggcgccccctccgacgccccccacgcccaccaccccctccacccccacctcatgcaggagcacatgggcaccaacgtcatcgtcgccaacaccatgcccacccacctctccaacggccagatgtgcgagtggccccgcccccgcggccaggccgccgcccccgaggccccccagcccgccccccccggcggctccggctccgagccctacaagctcctccccggcgccgtcgccaccatcgtccgccccctctccgccatcccccagcccaccatcaccaagcaggaggtcatctgaggactagtccctgttcccagagcccacttttttttctttttttgaaataaaatagcctgtctttcagatctcaaaggctcttttcagagccaccaaaaaaaaaaaaaaaaaaaaaaaaaaaaaaaaaaaaaaaaaaaaaaaaaaaaaaaaaaaaaaaaaaaaaaaaaaaaaaaaaaaaaaaaaaaaaaaaaaaaa

SEQ ID NO: 3928 - RNA, 1586 nt, synthetic construct
  misc_feature 1..1586: note = mRNA a-1 (hSL-A100) (opt2) from Homo sapiens__NP_000448.3__HNF4A(39-474)(S87A_K106R_K108R_K126R_ K127R_S142A_S143A_S148A_T166A_S167A_S313A_S378A_T429A_T432A _S436A_K458R)
  source 1..1586: mol_type = other RNA
aggagagtcccgcagtcggcgtccagcggctctgcttgttcgtgtgtgtgtcgttgcaggccttattcaagcttaccatggacacctccccctccgagggcaccaacctcaacgcccccaactccctcggcgtctccgccctctgcgccatctgcggcgaccgcgccaccggcaagcactacggcgcctcctcctgcgacggctgcaagggcttcttccgccgcgccgtccgcaagaaccacatgtactcctgccgcttctcccgccagtgcgtcgtcgaccgcgaccgccgcaaccagtgccgctactgccgcctcaagaagtgcttccgcgccggcatgcgccgcgaggccgtccagaacgagcgcgaccgcatctccacccgccgcgccgcctacgaggactccgccctcccctccatcaacgccctcctccaggccgaggtcctctcccgccagatcgccgcccccgtctccggcatcaacggcgacatccgcgccaagaagatcgcctccatcgccgacgtctgcgagtccatgaaggagcagctcctcgtcctcgtcgagtgggccaagtacatccccgccttctgcgagctccccctcgacgaccaggtcgccctcctccgcgcccacgccggcgagcacctcctcctcggcgccaccaagcgctccatggtcttcaaggacgtcctcctcctcggcaacgactacatcgtcccccgccactgccccgagctcgccgagatgtcccgcgtctccatccgcatcctcgacgagctcgtcctccccttccaggagctccagatcgacgacaacgagtacgcctacctcaaggccatcatcttcttcgaccccgacgccaagggcctctccgaccccggcaagatcaagcgcctccgcgcccaggtccaggtctccctcgaggactacatcaacgaccgccagtacgactcccgcggccgcttcggcgagctcctcctcctcctccccaccctccagtccatcacctggcagatgatcgagcagatccagttcatcaagctcttcggcatggccaagatcgacaacctcctccaggagatgctcctcggcggcgccccctccgacgccccccacgcccaccaccccctccacccccacctcatgcaggagcacatgggcaccaacgtcatcgtcgccaacaccatgcccacccacctctccaacggccagatgtgcgagtggccccgcccccgcggccaggccgccgcccccgaggccccccagcccgccccccccggcggctccggctccgagccctacaagctcctccccggcgccgtcgccaccatcgtccgccccctctccgccatcccccagcccaccatcaccaagcaggaggtcatctgaggactagtccctgttcccagagcccacttttttttctttttttgaaataaaatagcctgtctttcagatctcaaaggctcttttcagagccaccaaaaaaaaaaaaaaaaaaaaaaaaaaaaaaaaaaaaaaaaaaaaaaaaaaaaaaaaaaaaaaaaaaaaaaaaaaaaaaaaaaaaaaaaaaaaaaaaaaaaa

SEQ ID NO: 3929 - RNA, 1586 nt, synthetic construct
  misc_feature 1..1586: note = mRNA a-1 (hSL-A100) (opt2) from Homo sapiens__NP_000448.3__HNF4A(39-474)(S87A_K106R_K108R_K126R_ K127R)
  source 1..1586: mol_type = other RNA
aggagagtcccgcagtcggcgtccagcggctctgcttgttcgtgtgtgtgtcgttgcaggccttattcaagcttaccatggacacctccccctccgagggcaccaacctcaacgcccccaactccctcggcgtctccgccctctgcgccatctgcggcgaccgcgccaccggcaagcactacggcgcctcctcctgcgacggctgcaagggcttcttccgccgcgccgtccgcaagaaccacatgtactcctgccgcttctcccgccagtgcgtcgtcgaccgcgaccgccgcaaccagtgccgctactgccgcctcaagaagtgcttccgcgccggcatgcgccgcgaggccgtccagaacgagcgcgaccgcatctccacccgccgctcctcctacgaggactcctccctcccctccatcaacgccctcctccaggccgaggtcctctcccgccagatcacctcccccgtctccggcatcaacggcgacatccgcgccaagaagatcgcctccatcgccgacgtctgcgagtccatgaaggagcagctcctcgtcctcgtcgagtgggccaagtacatccccgccttctgcgagctccccctcgacgaccaggtcgccctcctccgcgcccacgccggcgagcacctcctcctcggcgccaccaagcgctccatggtcttcaaggacgtcctcctcctcggcaacgactacatcgtcccccgccactgccccgagctcgccgagatgtcccgcgtctccatccgcatcctcgacgagctcgtcctccccttccaggagctccagatcgacgacaacgagtacgcctacctcaaggccatcatcttcttcgaccccgacgccaagggcctctccgaccccggcaagatcaagcgcctccgctcccaggtccaggtctccctcgaggactacatcaacgaccgccagtacgactcccgcggccgcttcggcgagctcctcctcctcctccccaccctccagtccatcacctggcagatgatcgagcagatccagttcatcaagctcttcggcatggccaagatcgacaacctcctccaggagatgctcctcggcggctccccctccgacgccccccacgcccaccaccccctccacccccacctcatgcaggagcacatgggcaccaacgtcatcgtcgccaacaccatgcccacccacctctccaacggccagatgtgcgagtggccccgcccccgcggccaggccgccacccccgagaccccccagccctccccccccggcggctccggctccgagccctacaagctcctccccggcgccgtcgccaccatcgtcaagcccctctccgccatcccccagcccaccatcaccaagcaggaggtcatctgaggactagtccctgttcccagagcccacttttttttctttttttgaaataaaatagcctgtctttcagatctcaaaggctcttttcagagccaccaaaaaaaaaaaaaaaaaaaaaaaaaaaaaaaaaaaaaaaaaaaaaaaaaaaaaaaaaaaaaaaaaaaaaaaaaaaaaaaaaaaaaaaaaaaaaaaaaaaaa

SEQ ID NO: 3930 - RNA, 1586 nt, synthetic construct
  misc_feature 1..1586: note = mRNA a-1 (hSL-A100) (opt2) from Homo sapiens__NP_000448.3__HNF4A(39-474)(S87A_K106R_K108R_K126R_ K127R_S142A_S143A_S148A_T166A_S167A_S313A_S378A_T429A_T432A _S436A_K458R_S461A)
  source 1..1586: mol_type = other RNA
aggagagtcccgcagtcggcgtccagcggctctgcttgttcgtgtgtgtgtcgttgcaggccttattcaagcttaccatggacacctccccctccgagggcaccaacctcaacgcccccaactccctcggcgtctccgccctctgcgccatctgcggcgaccgcgccaccggcaagcactacggcgcctcctcctgcgacggctgcaagggcttcttccgccgcgccgtccgcaagaaccacatgtactcctgccgcttctcccgccagtgcgtcgtcgaccgcgaccgccgcaaccagtgccgctactgccgcctcaagaagtgcttccgcgccggcatgcgccgcgaggccgtccagaacgagcgcgaccgcatctccacccgccgcgccgcctacgaggactccgccctcccctccatcaacgccctcctccaggccgaggtcctctcccgccagatcgccgcccccgtctccggcatcaacggcgacatccgcgccaagaagatcgcctccatcgccgacgtctgcgagtccatgaaggagcagctcctcgtcctcgtcgagtgggccaagtacatccccgccttctgcgagctccccctcgacgaccaggtcgccctcctccgcgcccacgccggcgagcacctcctcctcggcgccaccaagcgctccatggtcttcaaggacgtcctcctcctcggcaacgactacatcgtcccccgccactgccccgagctcgccgagatgtcccgcgtctccatccgcatcctcgacgagctcgtcctccccttccaggagctccagatcgacgacaacgagtacgcctacctcaaggccatcatcttcttcgaccccgacgccaagggcctctccgaccccggcaagatcaagcgcctccgcgcccaggtccaggtctccctcgaggactacatcaacgaccgccagtacgactcccgcggccgcttcggcgagctcctcctcctcctccccaccctccagtccatcacctggcagatgatcgagcagatccagttcatcaagctcttcggcatggccaagatcgacaacctcctccaggagatgctcctcggcggcgccccctccgacgccccccacgcccaccaccccctccacccccacctcatgcaggagcacatgggcaccaacgtcatcgtcgccaacaccatgcccacccacctctccaacggccagatgtgcgagtggccccgcccccgcggccaggccgccgcccccgaggccccccagcccgccccccccggcggctccggctccgagccctacaagctcctccccggcgccgtcgccaccatcgtccgccccctcgccgccatcccccagcccaccatcaccaagcaggaggtcatctgaggactagtccctgttcccagagcccacttttttttctttttttgaaataaaatagcctgtctttcagatctcaaaggctcttttcagagccaccaaaaaaaaaaaaaaaaaaaaaaaaaaaaaaaaaaaaaaaaaaaaaaaaaaaaaaaaaaaaaaaaaaaaaaaaaaaaaaaaaaaaaaaaaaaaaaaaaaaaa

SEQ ID NO: 3931 - RNA, 1586 nt, synthetic construct
  misc_feature 1..1586: note = mRNA a-1 (hSL-A100) (opt2) from Homo sapiens__NP_000448.3__HNF4A(39-474)(S87A_K106R_K108R_K126R_ K127R_S142A_S143A_S148A_T166A_S167A_S313A_S378A_T429A_T432A _S436A_K458R_S461E)
  source 1..1586: mol_type = other RNA
aggagagtcccgcagtcggcgtccagcggctctgcttgttcgtgtgtgtgtcgttgcaggccttattcaagcttaccatggacacctccccctccgagggcaccaacctcaacgcccccaactccctcggcgtctccgccctctgcgccatctgcggcgaccgcgccaccggcaagcactacggcgcctcctcctgcgacggctgcaagggcttcttccgccgcgccgtccgcaagaaccacatgtactcctgccgcttctcccgccagtgcgtcgtcgaccgcgaccgccgcaaccagtgccgctactgccgcctcaagaagtgcttccgcgccggcatgcgccgcgaggccgtccagaacgagcgcgaccgcatctccacccgccgcgccgcctacgaggactccgccctcccctccatcaacgccctcctccaggccgaggtcctctcccgccagatcgccgcccccgtctccggcatcaacggcgacatccgcgccaagaagatcgcctccatcgccgacgtctgcgagtccatgaaggagcagctcctcgtcctcgtcgagtgggccaagtacatccccgccttctgcgagctccccctcgacgaccaggtcgccctcctccgcgcccacgccggcgagcacctcctcctcggcgccaccaagcgctccatggtcttcaaggacgtcctcctcctcggcaacgactacatcgtcccccgccactgccccgagctcgccgagatgtcccgcgtctccatccgcatcctcgacgagctcgtcctccccttccaggagctccagatcgacgacaacgagtacgcctacctcaaggccatcatcttcttcgaccccgacgccaagggcctctccgaccccggcaagatcaagcgcctccgcgcccaggtccaggtctccctcgaggactacatcaacgaccgccagtacgactcccgcggccgcttcggcgagctcctcctcctcctccccaccctccagtccatcacctggcagatgatcgagcagatccagttcatcaagctcttcggcatggccaagatcgacaacctcctccaggagatgctcctcggcggcgccccctccgacgccccccacgcccaccaccccctccacccccacctcatgcaggagcacatgggcaccaacgtcatcgtcgccaacaccatgcccacccacctctccaacggccagatgtgcgagtggccccgcccccgcggccaggccgccgcccccgaggccccccagcccgccccccccggcggctccggctccgagccctacaagctcctccccggcgccgtcgccaccatcgtccgccccctcgaggccatcccccagcccaccatcaccaagcaggaggtcatctgaggactagtccctgttcccagagcccacttttttttctttttttgaaataaaatagcctgtctttcagatctcaaaggctcttttcagagccaccaaaaaaaaaaaaaaaaaaaaaaaaaaaaaaaaaaaaaaaaaaaaaaaaaaaaaaaaaaaaaaaaaaaaaaaaaaaaaaaaaaaaaaaaaaaaaaaaaaaaa

SEQ ID NO: 3932 - RNA, 1586 nt, synthetic construct
  misc_feature 1..1586: note = mRNA a-1 (hSL-A100) (opt2) from Homo sapiens__NP_000448.3__HNF4A(39-474)(S87A_K106R_K108R_K126R_ K127R_S142A_S143A_S148E_T166A_S167E_S313A_S378E_T429E_T432E _S436E_K458R_S461E)
  source 1..1586: mol_type = other RNA
aggagagtcccgcagtcggcgtccagcggctctgcttgttcgtgtgtgtgtcgttgcaggccttattcaagcttaccatggacacctccccctccgagggcaccaacctcaacgcccccaactccctcggcgtctccgccctctgcgccatctgcggcgaccgcgccaccggcaagcactacggcgcctcctcctgcgacggctgcaagggcttcttccgccgcgccgtccgcaagaaccacatgtactcctgccgcttctcccgccagtgcgtcgtcgaccgcgaccgccgcaaccagtgccgctactgccgcctcaagaagtgcttccgcgccggcatgcgccgcgaggccgtccagaacgagcgcgaccgcatctccacccgccgcgccgcctacgaggactccgagctcccctccatcaacgccctcctccaggccgaggtcctctcccgccagatcgccgagcccgtctccggcatcaacggcgacatccgcgccaagaagatcgcctccatcgccgacgtctgcgagtccatgaaggagcagctcctcgtcctcgtcgagtgggccaagtacatccccgccttctgcgagctccccctcgacgaccaggtcgccctcctccgcgcccacgccggcgagcacctcctcctcggcgccaccaagcgctccatggtcttcaaggacgtcctcctcctcggcaacgactacatcgtcccccgccactgccccgagctcgccgagatgtcccgcgtctccatccgcatcctcgacgagctcgtcctccccttccaggagctccagatcgacgacaacgagtacgcctacctcaaggccatcatcttcttcgaccccgacgccaagggcctctccgaccccggcaagatcaagcgcctccgcgcccaggtccaggtctccctcgaggactacatcaacgaccgccagtacgactcccgcggccgcttcggcgagctcctcctcctcctccccaccctccagtccatcacctggcagatgatcgagcagatccagttcatcaagctcttcggcatggccaagatcgacaacctcctccaggagatgctcctcggcggcgagccctccgacgccccccacgcccaccaccccctccacccccacctcatgcaggagcacatgggcaccaacgtcatcgtcgccaacaccatgcccacccacctctccaacggccagatgtgcgagtggccccgcccccgcggccaggccgccgagcccgaggagccccagcccgagccccccggcggctccggctccgagccctacaagctcctccccggcgccgtcgccaccatcgtccgccccctcgaggccatcccccagcccaccatcaccaagcaggaggtcatctgaggactagtccctgttcccagagcccacttttttttctttttttgaaataaaatagcctgtctttcagatctcaaaggctcttttcagagccaccaaaaaaaaaaaaaaaaaaaaaaaaaaaaaaaaaaaaaaaaaaaaaaaaaaaaaaaaaaaaaaaaaaaaaaaaaaaaaaaaaaaaaaaaaaaaaaaaaaaaa

SEQ ID NO: 3933 - RNA, 1586 nt, synthetic construct
  misc_feature 1..1586: note = mRNA a-1 (hSL-A100) (opt2) from Homo sapiens__NP_000448.3__HNF4A(39-474)(S87A_K106R_K108R_K126R_ K127R_S142A_S143A_S148A_T166A_S167A_K179R_K180R_S313A_S378A _T429A_T432A_S436A_K458R_S461E)
  source 1..1586: mol_type = other RNA
aggagagtcccgcagtcggcgtccagcggctctgcttgttcgtgtgtgtgtcgttgcaggccttattcaagcttaccatggacacctccccctccgagggcaccaacctcaacgcccccaactccctcggcgtctccgccctctgcgccatctgcggcgaccgcgccaccggcaagcactacggcgcctcctcctgcgacggctgcaagggcttcttccgccgcgccgtccgcaagaaccacatgtactcctgccgcttctcccgccagtgcgtcgtcgaccgcgaccgccgcaaccagtgccgctactgccgcctcaagaagtgcttccgcgccggcatgcgccgcgaggccgtccagaacgagcgcgaccgcatctccacccgccgcgccgcctacgaggactccgccctcccctccatcaacgccctcctccaggccgaggtcctctcccgccagatcgccgcccccgtctccggcatcaacggcgacatccgcgcccgccgcatcgcctccatcgccgacgtctgcgagtccatgaaggagcagctcctcgtcctcgtcgagtgggccaagtacatccccgccttctgcgagctccccctcgacgaccaggtcgccctcctccgcgcccacgccggcgagcacctcctcctcggcgccaccaagcgctccatggtcttcaaggacgtcctcctcctcggcaacgactacatcgtcccccgccactgccccgagctcgccgagatgtcccgcgtctccatccgcatcctcgacgagctcgtcctccccttccaggagctccagatcgacgacaacgagtacgcctacctcaaggccatcatcttcttcgaccccgacgccaagggcctctccgaccccggcaagatcaagcgcctccgcgcccaggtccaggtctccctcgaggactacatcaacgaccgccagtacgactcccgcggccgcttcggcgagctcctcctcctcctccccaccctccagtccatcacctggcagatgatcgagcagatccagttcatcaagctcttcggcatggccaagatcgacaacctcctccaggagatgctcctcggcggcgccccctccgacgccccccacgcccaccaccccctccacccccacctcatgcaggagcacatgggcaccaacgtcatcgtcgccaacaccatgcccacccacctctccaacggccagatgtgcgagtggccccgcccccgcggccaggccgccgcccccgaggccccccagcccgccccccccggcggctccggctccgagccctacaagctcctccccggcgccgtcgccaccatcgtccgccccctcgaggccatcccccagcccaccatcaccaagcaggaggtcatctgaggactagtccctgttcccagagcccacttttttttctttttttgaaataaaatagcctgtctttcagatctcaaaggctcttttcagagccaccaaaaaaaaaaaaaaaaaaaaaaaaaaaaaaaaaaaaaaaaaaaaaaaaaaaaaaaaaaaaaaaaaaaaaaaaaaaaaaaaaaaaaaaaaaaaaaaaaaaaa

SEQ ID NO: 3934 - RNA, 1586 nt, synthetic construct
  misc_feature 1..1586: note = mRNA a-1 (hSL-A100) (opt2) from Homo sapiens__NP_000448.3__HNF4A(39-474)(S87A_K106R_K108R_K126R_ K127R_S142A_S143A_S148A_T166A_S167A_K300R_K307R_K309R_S313A _S378A_T429A_T432A_S436A_K458R_S461E)
  source 1..1586: mol_type = other RNA
aggagagtcccgcagtcggcgtccagcggctctgcttgttcgtgtgtgtgtcgttgcaggccttattcaagcttaccatggacacctccccctccgagggcaccaacctcaacgcccccaactccctcggcgtctccgccctctgcgccatctgcggcgaccgcgccaccggcaagcactacggcgcctcctcctgcgacggctgcaagggcttcttccgccgcgccgtccgcaagaaccacatgtactcctgccgcttctcccgccagtgcgtcgtcgaccgcgaccgccgcaaccagtgccgctactgccgcctcaagaagtgcttccgcgccggcatgcgccgcgaggccgtccagaacgagcgcgaccgcatctccacccgccgcgccgcctacgaggactccgccctcccctccatcaacgccctcctccaggccgaggtcctctcccgccagatcgccgcccccgtctccggcatcaacggcgacatccgcgccaagaagatcgcctccatcgccgacgtctgcgagtccatgaaggagcagctcctcgtcctcgtcgagtgggccaagtacatccccgccttctgcgagctccccctcgacgaccaggtcgccctcctccgcgcccacgccggcgagcacctcctcctcggcgccaccaagcgctccatggtcttcaaggacgtcctcctcctcggcaacgactacatcgtcccccgccactgccccgagctcgccgagatgtcccgcgtctccatccgcatcctcgacgagctcgtcctccccttccaggagctccagatcgacgacaacgagtacgcctacctcaaggccatcatcttcttcgaccccgacgcccgcggcctctccgaccccggccgcatccgccgcctccgcgcccaggtccaggtctccctcgaggactacatcaacgaccgccagtacgactcccgcggccgcttcggcgagctcctcctcctcctccccaccctccagtccatcacctggcagatgatcgagcagatccagttcatcaagctcttcggcatggccaagatcgacaacctcctccaggagatgctcctcggcggcgccccctccgacgccccccacgcccaccaccccctccacccccacctcatgcaggagcacatgggcaccaacgtcatcgtcgccaacaccatgcccacccacctctccaacggccagatgtgcgagtggccccgcccccgcggccaggccgccgcccccgaggccccccagcccgccccccccggcggctccggctccgagccctacaagctcctccccggcgccgtcgccaccatcgtccgccccctcgaggccatcccccagcccaccatcaccaagcaggaggtcatctgaggactagtccctgttcccagagcccacttttttttctttttttgaaataaaatagcctgtctttcagatctcaaaggctcttttcagagccaccaaaaaaaaaaaaaaaaaaaaaaaaaaaaaaaaaaaaaaaaaaaaaaaaaaaaaaaaaaaaaaaaaaaaaaaaaaaaaaaaaaaaaaaaaaaaaaaaaaaaa

SEQ ID NO: 3935 - RNA, 1586 nt, synthetic construct
  misc_feature 1..1586: note = mRNA a-1 (hSL-A100) (opt2) from Homo sapiens__NP_000448.3__HNF4A(39-474)(S87A_K106R_K108R_K126R_ K127R_S142A_S143A_S148A_T166A_S167A_S313A_S378A_T429A_T432A _S436A_K447R_K458R_S461E_K470R)
  source 1..1586: mol_type = other RNA
aggagagtcccgcagtcggcgtccagcggctctgcttgttcgtgtgtgtgtcgttgcaggccttattcaagcttaccatggacacctccccctccgagggcaccaacctcaacgcccccaactccctcggcgtctccgccctctgcgccatctgcggcgaccgcgccaccggcaagcactacggcgcctcctcctgcgacggctgcaagggcttcttccgccgcgccgtccgcaagaaccacatgtactcctgccgcttctcccgccagtgcgtcgtcgaccgcgaccgccgcaaccagtgccgctactgccgcctcaagaagtgcttccgcgccggcatgcgccgcgaggccgtccagaacgagcgcgaccgcatctccacccgccgcgccgcctacgaggactccgccctcccctccatcaacgccctcctccaggccgaggtcctctcccgccagatcgccgcccccgtctccggcatcaacggcgacatccgcgccaagaagatcgcctccatcgccgacgtctgcgagtccatgaaggagcagctcctcgtcctcgtcgagtgggccaagtacatccccgccttctgcgagctccccctcgacgaccaggtcgccctcctccgcgcccacgccggcgagcacctcctcctcggcgccaccaagcgctccatggtcttcaaggacgtcctcctcctcggcaacgactacatcgtcccccgccactgccccgagctcgccgagatgtcccgcgtctccatccgcatcctcgacgagctcgtcctccccttccaggagctccagatcgacgacaacgagtacgcctacctcaaggccatcatcttcttcgaccccgacgccaagggcctctccgaccccggcaagatcaagcgcctccgcgcccaggtccaggtctccctcgaggactacatcaacgaccgccagtacgactcccgcggccgcttcggcgagctcctcctcctcctccccaccctccagtccatcacctggcagatgatcgagcagatccagttcatcaagctcttcggcatggccaagatcgacaacctcctccaggagatgctcctcggcggcgccccctccgacgccccccacgcccaccaccccctccacccccacctcatgcaggagcacatgggcaccaacgtcatcgtcgccaacaccatgcccacccacctctccaacggccagatgtgcgagtggccccgcccccgcggccaggccgccgcccccgaggccccccagcccgccccccccggcggctccggctccgagccctaccgcctcctccccggcgccgtcgccaccatcgtccgccccctcgaggccatcccccagcccaccatcacccgccaggaggtcatctgaggactagtccctgttcccagagcccacttttttttctttttttgaaataaaatagcctgtctttcagatctcaaaggctcttttcagagccaccaaaaaaaaaaaaaaaaaaaaaaaaaaaaaaaaaaaaaaaaaaaaaaaaaaaaaaaaaaaaaaaaaaaaaaaaaaaaaaaaaaaaaaaaaaaaaaaaaaaaa

SEQ ID NO: 3936 - RNA, 1586 nt, synthetic construct
  misc_feature 1..1586: note = mRNA a-1 (hSL-A100) (opt2) from Homo sapiens__NP_000448.3__HNF4A(39-474)(S87A_K106R_K108R_K126R_ K127R_S142A_S143A_S148A_T166A_S167A_K179R_K180R_K234R_K300R _K307R_K309R_S313A_S378A_T429A_T432A_S436A_K447R_K458R_S461 E_K470R)
  source 1..1586: mol_type = other RNA
aggagagtcccgcagtcggcgtccagcggctctgcttgttcgtgtgtgtgtcgttgcaggccttattcaagcttaccatggacacctccccctccgagggcaccaacctcaacgcccccaactccctcggcgtctccgccctctgcgccatctgcggcgaccgcgccaccggcaagcactacggcgcctcctcctgcgacggctgcaagggcttcttccgccgcgccgtccgcaagaaccacatgtactcctgccgcttctcccgccagtgcgtcgtcgaccgcgaccgccgcaaccagtgccgctactgccgcctcaagaagtgcttccgcgccggcatgcgccgcgaggccgtccagaacgagcgcgaccgcatctccacccgccgcgccgcctacgaggactccgccctcccctccatcaacgccctcctccaggccgaggtcctctcccgccagatcgccgcccccgtctccggcatcaacggcgacatccgcgcccgccgcatcgcctccatcgccgacgtctgcgagtccatgaaggagcagctcctcgtcctcgtcgagtgggccaagtacatccccgccttctgcgagctccccctcgacgaccaggtcgccctcctccgcgcccacgccggcgagcacctcctcctcggcgccacccgccgctccatggtcttcaaggacgtcctcctcctcggcaacgactacatcgtcccccgccactgccccgagctcgccgagatgtcccgcgtctccatccgcatcctcgacgagctcgtcctccccttccaggagctccagatcgacgacaacgagtacgcctacctcaaggccatcatcttcttcgaccccgacgcccgcggcctctccgaccccggccgcatccgccgcctccgcgcccaggtccaggtctccctcgaggactacatcaacgaccgccagtacgactcccgcggccgcttcggcgagctcctcctcctcctccccaccctccagtccatcacctggcagatgatcgagcagatccagttcatcaagctcttcggcatggccaagatcgacaacctcctccaggagatgctcctcggcggcgccccctccgacgccccccacgcccaccaccccctccacccccacctcatgcaggagcacatgggcaccaacgtcatcgtcgccaacaccatgcccacccacctctccaacggccagatgtgcgagtggccccgcccccgcggccaggccgccgcccccgaggccccccagcccgccccccccggcggctccggctccgagccctaccgcctcctccccggcgccgtcgccaccatcgtccgccccctcgaggccatcccccagcccaccatcacccgccaggaggtcatctgaggactagtccctgttcccagagcccacttttttttctttttttgaaataaaatagcctgtctttcagatctcaaaggctcttttcagagccaccaaaaaaaaaaaaaaaaaaaaaaaaaaaaaaaaaaaaaaaaaaaaaaaaaaaaaaaaaaaaaaaaaaaaaaaaaaaaaaaaaaaaaaaaaaaaaaaaaaaaa

SEQ ID NO: 3937 - RNA, 1586 nt, synthetic construct
  misc_feature 1..1586: note = mRNA a-1 (hSL-A100) (opt2) from Homo sapiens__NP_000448.3__HNF4A(39-474)(S87A_S95A_S99A_K106R_K1 08R_K126R_K127R_S142A_S143A_S148A_T166A_S167A_S313A_S378A_T 429A_T432A_S436A_K458R_S461E)
  source 1..1586: mol_type = other RNA
aggagagtcccgcagtcggcgtccagcggctctgcttgttcgtgtgtgtgtcgttgcaggccttattcaagcttaccatggacacctccccctccgagggcaccaacctcaacgcccccaactccctcggcgtctccgccctctgcgccatctgcggcgaccgcgccaccggcaagcactacggcgcctcctcctgcgacggctgcaagggcttcttccgccgcgccgtccgcaagaaccacatgtacgcctgccgcttcgcccgccagtgcgtcgtcgaccgcgaccgccgcaaccagtgccgctactgccgcctcaagaagtgcttccgcgccggcatgcgccgcgaggccgtccagaacgagcgcgaccgcatctccacccgccgcgccgcctacgaggactccgccctcccctccatcaacgccctcctccaggccgaggtcctctcccgccagatcgccgcccccgtctccggcatcaacggcgacatccgcgccaagaagatcgcctccatcgccgacgtctgcgagtccatgaaggagcagctcctcgtcctcgtcgagtgggccaagtacatccccgccttctgcgagctccccctcgacgaccaggtcgccctcctccgcgcccacgccggcgagcacctcctcctcggcgccaccaagcgctccatggtcttcaaggacgtcctcctcctcggcaacgactacatcgtcccccgccactgccccgagctcgccgagatgtcccgcgtctccatccgcatcctcgacgagctcgtcctccccttccaggagctccagatcgacgacaacgagtacgcctacctcaaggccatcatcttcttcgaccccgacgccaagggcctctccgaccccggcaagatcaagcgcctccgcgcccaggtccaggtctccctcgaggactacatcaacgaccgccagtacgactcccgcggccgcttcggcgagctcctcctcctcctccccaccctccagtccatcacctggcagatgatcgagcagatccagttcatcaagctcttcggcatggccaagatcgacaacctcctccaggagatgctcctcggcggcgccccctccgacgccccccacgcccaccaccccctccacccccacctcatgcaggagcacatgggcaccaacgtcatcgtcgccaacaccatgcccacccacctctccaacggccagatgtgcgagtggccccgcccccgcggccaggccgccgcccccgaggccccccagcccgccccccccggcggctccggctccgagccctacaagctcctccccggcgccgtcgccaccatcgtccgccccctcgaggccatcccccagcccaccatcaccaagcaggaggtcatctgaggactagtccctgttcccagagcccacttttttttctttttttgaaataaaatagcctgtctttcagatctcaaaggctcttttcagagccaccaaaaaaaaaaaaaaaaaaaaaaaaaaaaaaaaaaaaaaaaaaaaaaaaaaaaaaaaaaaaaaaaaaaaaaaaaaaaaaaaaaaaaaaaaaaaaaaaaaaaa

SEQ ID NO: 3938 - RNA, 1586 nt, synthetic construct
  misc_feature 1..1586: note = mRNA a-1 (hSL-A100) (opt2) from Homo sapiens__NP_000448.3__HNF4A(39-474)(S87A_K106R_K108R_K126R_ K127R_S138A_T139A_S142A_S143A_S148A_T166A_S167A_S313A_S378A _T429A_T432A_S436A_K458R_S461E)
  source 1..1586: mol_type = other RNA
aggagagtcccgcagtcggcgtccagcggctctgcttgttcgtgtgtgtgtcgttgcaggccttattcaagcttaccatggacacctccccctccgagggcaccaacctcaacgcccccaactccctcggcgtctccgccctctgcgccatctgcggcgaccgcgccaccggcaagcactacggcgcctcctcctgcgacggctgcaagggcttcttccgccgcgccgtccgcaagaaccacatgtactcctgccgcttctcccgccagtgcgtcgtcgaccgcgaccgccgcaaccagtgccgctactgccgcctcaagaagtgcttccgcgccggcatgcgccgcgaggccgtccagaacgagcgcgaccgcatcgccgcccgccgcgccgcctacgaggactccgccctcccctccatcaacgccctcctccaggccgaggtcctctcccgccagatcgccgcccccgtctccggcatcaacggcgacatccgcgccaagaagatcgcctccatcgccgacgtctgcgagtccatgaaggagcagctcctcgtcctcgtcgagtgggccaagtacatccccgccttctgcgagctccccctcgacgaccaggtcgccctcctccgcgcccacgccggcgagcacctcctcctcggcgccaccaagcgctccatggtcttcaaggacgtcctcctcctcggcaacgactacatcgtcccccgccactgccccgagctcgccgagatgtcccgcgtctccatccgcatcctcgacgagctcgtcctccccttccaggagctccagatcgacgacaacgagtacgcctacctcaaggccatcatcttcttcgaccccgacgccaagggcctctccgaccccggcaagatcaagcgcctccgcgcccaggtccaggtctccctcgaggactacatcaacgaccgccagtacgactcccgcggccgcttcggcgagctcctcctcctcctccccaccctccagtccatcacctggcagatgatcgagcagatccagttcatcaagctcttcggcatggccaagatcgacaacctcctccaggagatgctcctcggcggcgccccctccgacgccccccacgcccaccaccccctccacccccacctcatgcaggagcacatgggcaccaacgtcatcgtcgccaacaccatgcccacccacctctccaacggccagatgtgcgagtggccccgcccccgcggccaggccgccgcccccgaggccccccagcccgccccccccggcggctccggctccgagccctacaagctcctccccggcgccgtcgccaccatcgtccgccccctcgaggccatcccccagcccaccatcaccaagcaggaggtcatctgaggactagtccctgttcccagagcccacttttttttctttttttgaaataaaatagcctgtctttcagatctcaaaggctcttttcagagccaccaaaaaaaaaaaaaaaaaaaaaaaaaaaaaaaaaaaaaaaaaaaaaaaaaaaaaaaaaaaaaaaaaaaaaaaaaaaaaaaaaaaaaaaaaaaaaaaaaaaaa

SEQ ID NO: 3939 - RNA, 1586 nt, synthetic construct
  misc_feature 1..1586: note = mRNA a-1 (hSL-A100) (opt2) from Homo sapiens__NP_000448.3__HNF4A(39-474)(S87A_S95A_S99A_K106R_K1 08R_K126R_K127R_S138A_T139A_S142A_S143A_S148A_T166A_S167A_S 313A_S378A_T429A_T432A_S436A_K458R_S461E)
  source 1..1586: mol_type = other RNA
aggagagtcccgcagtcggcgtccagcggctctgcttgttcgtgtgtgtgtcgttgcaggccttattcaagcttaccatggacacctccccctccgagggcaccaacctcaacgcccccaactccctcggcgtctccgccctctgcgccatctgcggcgaccgcgccaccggcaagcactacggcgcctcctcctgcgacggctgcaagggcttcttccgccgcgccgtccgcaagaaccacatgtacgcctgccgcttcgcccgccagtgcgtcgtcgaccgcgaccgccgcaaccagtgccgctactgccgcctcaagaagtgcttccgcgccggcatgcgccgcgaggccgtccagaacgagcgcgaccgcatcgccgcccgccgcgccgcctacgaggactccgccctcccctccatcaacgccctcctccaggccgaggtcctctcccgccagatcgccgcccccgtctccggcatcaacggcgacatccgcgccaagaagatcgcctccatcgccgacgtctgcgagtccatgaaggagcagctcctcgtcctcgtcgagtgggccaagtacatccccgccttctgcgagctccccctcgacgaccaggtcgccctcctccgcgcccacgccggcgagcacctcctcctcggcgccaccaagcgctccatggtcttcaaggacgtcctcctcctcggcaacgactacatcgtcccccgccactgccccgagctcgccgagatgtcccgcgtctccatccgcatcctcgacgagctcgtcctccccttccaggagctccagatcgacgacaacgagtacgcctacctcaaggccatcatcttcttcgaccccgacgccaagggcctctccgaccccggcaagatcaagcgcctccgcgcccaggtccaggtctccctcgaggactacatcaacgaccgccagtacgactcccgcggccgcttcggcgagctcctcctcctcctccccaccctccagtccatcacctggcagatgatcgagcagatccagttcatcaagctcttcggcatggccaagatcgacaacctcctccaggagatgctcctcggcggcgccccctccgacgccccccacgcccaccaccccctccacccccacctcatgcaggagcacatgggcaccaacgtcatcgtcgccaacaccatgcccacccacctctccaacggccagatgtgcgagtggccccgcccccgcggccaggccgccgcccccgaggccccccagcccgccccccccggcggctccggctccgagccctacaagctcctccccggcgccgtcgccaccatcgtccgccccctcgaggccatcccccagcccaccatcaccaagcaggaggtcatctgaggactagtccctgttcccagagcccacttttttttctttttttgaaataaaatagcctgtctttcagatctcaaaggctcttttcagagccaccaaaaaaaaaaaaaaaaaaaaaaaaaaaaaaaaaaaaaaaaaaaaaaaaaaaaaaaaaaaaaaaaaaaaaaaaaaaaaaaaaaaaaaaaaaaaaaaaaaaaa

SEQ ID NO: 3940 - RNA, 1586 nt, synthetic construct
  misc_feature 1..1586: note = mRNA a-1 (hSL-A100) (opt3) from Homo sapiens__NP_000448.3__HNF4A(39-474)
  source 1..1586: mol_type = other RNA
aggagagtcccgcagtcggcgtccagcggctctgcttgttcgtgtgtgtgtcgttgcaggccttattcaagcttaccatggacacctctccttcagaggggacaaacttaaatgcgccaaacagtctgggagtgagcgctctatgcgccatctgtggtgatagggcaactggcaaacactacggggcctcctcttgcgacggatgtaagggctttttccggcgctcggtacgtaaaaatcatatgtattcatgccgatttagcagacaatgtgtggtcgataaggacaaaaggaaccagtgccggtactgtcgcctcaagaagtgcttcagagctggtatgaaaaaggaagcagtgcagaatgagagggatcggattagtacccgccgatcctcttatgaagacagctccctgccgtcaataaacgcccttctgcaggctgaggttttgagtagacaaatcacaagccccgtgtctgggattaatggagatatcagggccaaaaagattgcgtccatcgcagacgtctgtgagtcaatgaaagaacagctcctggtgctggtagagtgggccaagtacatacctgctttttgcgaactcccattagatgaccaggttgccctgcttcgggcacacgctggcgagcatttgctgctaggcgccaccaagcgtagcatggtgttcaaagacgtcctcctgcttgggaacgattatatcgtgccccgccactgtcctgagctggcggaaatgagtagagtgtctattaggatcttggacgagctcgtcctgccatttcaggaattacaaattgatgacaatgagtacgcctacctgaaggcaatcatattctttgatcccgacgctaaaggactctccgatcctggtaagattaaacggcttcgaagccaggttcaggtgtcgctggaagactatatcaacgatcgccagtacgactctagaggcaggttcggggagttgctactgctcctgccaactcttcaatccattacatggcagatgatcgagcagatccaatttattaagctgttcggaatggccaaaatagataatttgctccaggaaatgctgttaggcggttcaccgagtgacgctccccatgcccaccaccctctgcatccacacctaatgcaggagcatatggggaccaacgtaatcgtggcaaatacgatgcccactcacctcagcaacggacagatgtgcgaatggcctcggccacgcggccaagccgctacccccgagacaccgcagccttctcccccaggcgggtccggaagcgaaccttataagctgcttcccggtgcggtcgcaactattgtgaagccattgtcagccatcccccagcctaccataacaaaacaggaggttatttgaggactagtccctgttcccagagcccacttttttttctttttttgaaataaaatagcctgtctttcagatctcaaaggctcttttcagagccaccaaaaaaaaaaaaaaaaaaaaaaaaaaaaaaaaaaaaaaaaaaaaaaaaaaaaaaaaaaaaaaaaaaaaaaaaaaaaaaaaaaaaaaaaaaaaaaaaaaaaa

SEQ ID NO: 3941 - RNA, 1586 nt, synthetic construct
  misc_feature 1..1586: note = mRNA a-1 (hSL-A100) (opt3) from Homo sapiens__NP_000448.3__HNF4A(39-474)(S313A)
  source 1..1586: mol_type = other RNA
aggagagtcccgcagtcggcgtccagcggctctgcttgttcgtgtgtgtgtcgttgcaggccttattcaagcttaccatggacacctctccttcagaggggacaaacttaaatgcgccaaacagtctgggagtgagcgctctatgcgccatctgtggtgatagggcaactggcaaacactacggggcctcctcttgcgacggatgtaagggctttttccggcgctcggtacgtaaaaatcatatgtattcatgccgatttagcagacaatgtgtggtcgataaggacaaaaggaaccagtgccggtactgtcgcctcaagaagtgcttcagagctggtatgaaaaaggaagcagtgcagaatgagagggatcggattagtacccgccgatcctcttatgaagacagctccctgccgtcaataaacgcccttctgcaggctgaggttttgagtagacaaatcacaagccccgtgtctgggattaatggagatatcagggccaaaaagattgcgtccatcgcagacgtctgtgagtcaatgaaagaacagctcctggtgctggtagagtgggccaagtacatacctgctttttgcgaactcccattagatgaccaggttgccctgcttcgggcacacgctggcgagcatttgctgctaggcgccaccaagcgtagcatggtgttcaaagacgtcctcctgcttgggaacgattatatcgtgccccgccactgtcctgagctggcggaaatgagtagagtgtctattaggatcttggacgagctcgtcctgccatttcaggaattacaaattgatgacaatgagtacgcctacctgaaggcaatcatattctttgatcccgacgctaaaggactctccgatcctggtaagattaaacggcttcgagcccaggttcaggtgagcctggaagactatatcaacgatcgccagtacgactcgagaggcaggttcggggagttgctactgctcctgccaactcttcaatctattacatggcagatgatcgagcagatccaatttattaagctgttcggaatggctaaaatagataatttgctccaggaaatgctgttaggcggttccccgtcagacgcaccccatgcccaccaccctctgcatccacacctaatgcaggagcatatggggaccaacgtaatcgtggccaatacgatgcccactcacctcagtaacggacagatgtgcgaatggcctcggccacgcggccaagctgcgacccccgagacaccgcagcctagcccacccggcgggtccggatctgaaccttataagctgcttcccggtgcagtcgccactattgtgaagccattgagcgctatcccccagcctaccataacaaaacaggaggttatttgaggactagtccctgttcccagagcccacttttttttctttttttgaaataaaatagcctgtctttcagatctcaaaggctcttttcagagccaccaaaaaaaaaaaaaaaaaaaaaaaaaaaaaaaaaaaaaaaaaaaaaaaaaaaaaaaaaaaaaaaaaaaaaaaaaaaaaaaaaaaaaaaaaaaaaaaaaaaaa

SEQ ID NO: 3942 - RNA, 1586 nt, synthetic construct
  misc_feature 1..1586: note = mRNA a-1 (hSL-A100) (opt3) from Homo sapiens__NP_000448.3__HNF4A(39-474)(S313E)
  source 1..1586: mol_type = other RNA
aggagagtcccgcagtcggcgtccagcggctctgcttgttcgtgtgtgtgtcgttgcaggccttattcaagcttaccatggacacctctccttcagaggggacaaacttaaatgcgccaaacagtctgggagtgagcgctctatgcgccatctgtggtgatagggcaactggcaaacactacggggcctcctcttgcgacggatgtaagggctttttccggcgctcggtacgtaaaaatcatatgtattcatgccgatttagcagacaatgtgtggtcgataaggacaaaaggaaccagtgccggtactgtcgcctcaagaagtgcttcagagctggtatgaaaaaggaagcagtgcagaatgagagggatcggattagtacccgccgatcctcttatgaagacagctccctgccgtcaataaacgcccttctgcaggctgaggttttgagtagacaaatcacaagccccgtgtctgggattaatggagatatcagggccaaaaagattgcgtccatcgcagacgtctgtgagtcaatgaaagaacagctcctggtgctggtagagtgggccaagtacatacctgctttttgcgaactcccattagatgaccaggttgccctgcttcgggcacacgctggcgagcatttgctgctaggcgccaccaagcgtagcatggtgttcaaagacgtcctcctgcttgggaacgattatatcgtgccccgccactgtcctgagctggcggaaatgagtagagtgtctattaggatcttggacgagctcgtcctgccatttcaggaattacaaattgatgacaatgagtacgcctacctgaaggcaatcatattctttgatcccgacgctaaaggactctccgatcctggtaagattaaacggcttcgagaacaggttcaggtgagcctggaggactatatcaacgatcgccagtacgactcgagaggcaggttcggggagttgctactgctcctgccaactcttcaatctattacatggcagatgatcgaacagatccaatttattaagctgttcggaatggccaaaatagataatttgctccaggagatgctgttaggcggttccccgtcagacgctccccatgcccaccaccctctgcatccacacctaatgcaggaacatatggggaccaacgtaatcgtggcaaatacgatgcccactcacctcagtaacggacagatgtgcgagtggcctcggccacgcggccaagccgctacccccgaaacaccgcagcctagcccacccggcgggtccggatctgagccttataagctgcttcccggtgcggtcgcaactattgtgaagccattgagcgccatcccccagcctaccataacaaaacaggaggttatttgaggactagtccctgttcccagagcccacttttttttctttttttgaaataaaatagcctgtctttcagatctcaaaggctcttttcagagccaccaaaaaaaaaaaaaaaaaaaaaaaaaaaaaaaaaaaaaaaaaaaaaaaaaaaaaaaaaaaaaaaaaaaaaaaaaaaaaaaaaaaaaaaaaaaaaaaaaaaaa

SEQ ID NO: 3943 - RNA, 1586 nt, synthetic construct
  misc_feature 1..1586: note = mRNA a-1 (hSL-A100) (opt3) from Homo sapiens__NP_000448.3__HNF4A(39-474)(S142A_S143A)
  source 1..1586: mol_type = other RNA
aggagagtcccgcagtcggcgtccagcggctctgcttgttcgtgtgtgtgtcgttgcaggccttattcaagcttaccatggacacctctccttcagaggggacaaacttaaatgcgccaaacagtctgggagtgagcgctctatgcgccatctgtggtgatagggcaactggcaaacactacggggcctcctcttgcgacggatgtaagggctttttccggcgctcggtacgtaaaaatcatatgtattcatgccgatttagcagacaatgtgtggtcgataaggacaaaaggaaccagtgccggtactgtcgcctcaagaagtgcttcagagctggtatgaaaaaggaagcagtgcagaatgagagggatcggattagtacccgccgagccgcttatgaagactcctctctgccgagcataaacgcccttctgcaggcggaggttttgtccagacaaatcacatcacccgtgagtgggattaatggagatatcagggccaaaaagattgcaagcatcgctgacgtctgtgagtctatgaaagaacagctcctggtgctggtagagtgggccaagtacatacctgcattttgcgaactcccattagatgaccaggttgctctgcttcgggcccacgcgggcgagcatttgctgctaggcgccaccaagcgttccatggtgttcaaagacgtcctcctgcttgggaacgattatatcgtgccccgccactgtcctgagctggcagaaatgtcaagagtgagcattaggatcttggacgagctcgtcctgccatttcaggaattacaaattgatgacaatgagtacgcttacctgaaggccatcatattctttgatcccgacgctaaaggactcagtgatcctggtaagattaaacggcttcgatctcaggttcaggtgtccctggaagactatatcaacgatcgccagtacgacagcagaggcaggttcggggagttgctactgctcctgccaactcttcaatcgattacatggcagatgatcgagcagatccaatttattaagctgttcggaatggccaaaatagataatttgctccaggaaatgctgttaggcggttctccgtccgacgcaccccatgcccaccaccctctgcatccacacctaatgcaggagcatatggggaccaacgtaatcgtggctaatacgatgcccactcacctctcaaacggacagatgtgcgaatggcctcggccacgcggccaagcggcaacccccgagacaccgcagcctagtcccccaggcgggagcggatccgaaccttataagctgcttcccggtgccgtcgctactattgtgaagccattgtctgccatcccccagcctaccataacaaaacaggaggttatttgaggactagtccctgttcccagagcccacttttttttctttttttgaaataaaatagcctgtctttcagatctcaaaggctcttttcagagccaccaaaaaaaaaaaaaaaaaaaaaaaaaaaaaaaaaaaaaaaaaaaaaaaaaaaaaaaaaaaaaaaaaaaaaaaaaaaaaaaaaaaaaaaaaaaaaaaaaaaaa

SEQ ID NO: 3944 - RNA, 1586 nt, synthetic construct
  misc_feature 1..1586: note = mRNA a-1 (hSL-A100) (opt3) from Homo sapiens__NP_000448.3__HNF4A(39-474)(S142E_S143E)
  source 1..1586: mol_type = other RNA
aggagagtcccgcagtcggcgtccagcggctctgcttgttcgtgtgtgtgtcgttgcaggccttattcaagcttaccatggacacctctccttcagaggggacaaacttaaatgcgccaaacagtctgggagtgagcgctctatgcgccatctgtggtgatagggcaactggcaaacactacggggcctcctcttgcgacggatgtaagggctttttccggcgctcggtacgtaaaaatcatatgtattcatgccgatttagcagacaatgtgtggtcgataaggacaaaaggaaccagtgccggtactgtcgcctcaagaagtgcttcagagctggtatgaaaaaggaagcagtgcagaatgagagggatcggattagtacccgccgagaagagtatgaggactcctctctgccgagcataaacgcccttctgcaggctgaagttttgtccagacaaatcacatcacccgtgagtgggattaatggagatatcagggccaaaaagattgcgagcatcgcagacgtctgtgagtctatgaaagaacagctcctggtgctggtagagtgggccaagtacatacctgctttttgcgagctcccattagatgaccaggttgccctgcttcgggcacacgctggcgaacatttgctgctaggcgccaccaagcgttccatggtgttcaaagacgtcctcctgcttgggaacgattatatcgtgccccgccactgtcctgagctggcggaaatgtcaagagtgagcattaggatcttggacgagctcgtcctgccatttcaggaattacaaattgatgacaatgagtacgcctacctgaaggcaatcatattctttgatcccgacgctaaaggactcagtgatcctggtaagattaaacggcttcgatctcaggttcaggtgtccctggaggactatatcaacgatcgccagtacgacagcagaggcaggttcggggaattgctactgctcctgccaactcttcaatcgattacatggcagatgatcgagcagatccaatttattaagctgttcggaatggccaaaatagataatttgctccaggaaatgctgttaggcggttctccgtccgacgctccccatgcccaccaccctctgcatccacacctaatgcaggagcatatggggaccaacgtaatcgtggcaaatacgatgcccactcacctctcaaacggacagatgtgcgaatggcctcggccacgcggccaagccgctacccccgagacaccgcagcctagtcccccaggcgggagcggatccgagccttataagctgcttcccggtgcggtcgcaactattgtgaagccattgtctgccatcccccagcctaccataacaaaacaggaagttatttgaggactagtccctgttcccagagcccacttttttttctttttttgaaataaaatagcctgtctttcagatctcaaaggctcttttcagagccaccaaaaaaaaaaaaaaaaaaaaaaaaaaaaaaaaaaaaaaaaaaaaaaaaaaaaaaaaaaaaaaaaaaaaaaaaaaaaaaaaaaaaaaaaaaaaaaaaaaaaa

SEQ ID NO: 3945 - RNA, 1586 nt, synthetic construct
  misc_feature 1..1586: note = mRNA a-1 (hSL-A100) (opt3) from Homo sapiens__NP_000448.3__HNF4A(39-474)(S143A)
  source 1..1586: mol_type = other RNA
aggagagtcccgcagtcggcgtccagcggctctgcttgttcgtgtgtgtgtcgttgcaggccttattcaagcttaccatggacacctctccttcagaggggacaaacttaaatgcgccaaacagtctgggagtgagcgctctatgcgccatctgtggtgatagggcaactggcaaacactacggggcctcctcttgcgacggatgtaagggctttttccggcgctcggtacgtaaaaatcatatgtattcatgccgatttagcagacaatgtgtggtcgataaggacaaaaggaaccagtgccggtactgtcgcctcaagaagtgcttcagagctggtatgaaaaaggaagcagtgcagaatgagagggatcggattagtacccgccgatccgcctatgaagactctagcctgccgtccataaacgcccttctgcaggccgaggttttgtcaagacaaatcacaagtcccgtgagcgggattaatggagatatcagggcgaaaaagattgcatctatcgccgacgtctgtgagtccatgaaagaacagctcctggtgctggtagagtgggctaagtacatacctgccttttgcgaactcccattagatgaccaggttgcactgcttcgggctcacgccggcgagcatttgctgctaggcgcgaccaagcgttcaatggtgttcaaagacgtcctcctgcttgggaacgattatatcgtgccccgccactgtcctgagctggccgaaatgagcagagtgagtattaggatcttggacgagctcgtcctgccatttcaggaattacaaattgatgacaatgagtacgcatacctgaaggctatcatattctttgatcccgacgccaaaggactctctgatcctggtaagattaaacggcttcgatcccaggttcaggtgagcctggaagactatatcaacgatcgccagtacgactcgagaggcaggttcggggagttgctactgctcctgccaactcttcaatctattacatggcagatgatcgagcagatccaatttattaagctgttcggaatggctaaaatagataatttgctccaggaaatgctgttaggcggttccccgtcagacgctccccatgcacaccaccctctgcatccacacctaatgcaggagcatatggggaccaacgtaatcgtggccaatacgatgcccactcacctcagtaacggacagatgtgcgaatggcctcggccacgcggccaagctgcgacccccgagacaccgcagcctagcccacccggcgggtccggatctgaaccttataagctgcttcccggtgcagtcgccactattgtgaagccattgagcgctatcccccagcctaccataacaaaacaggaggttatttgaggactagtccctgttcccagagcccacttttttttctttttttgaaataaaatagcctgtctttcagatctcaaaggctcttttcagagccaccaaaaaaaaaaaaaaaaaaaaaaaaaaaaaaaaaaaaaaaaaaaaaaaaaaaaaaaaaaaaaaaaaaaaaaaaaaaaaaaaaaaaaaaaaaaaaaaaaaaaa

SEQ ID NO: 3946 - RNA, 1586 nt, synthetic construct
  misc_feature 1..1586: note = mRNA a-1 (hSL-A100) (opt3) from Homo sapiens__NP_000448.3__HNF4A(39-474)(T166A)
  source 1..1586: mol_type = other RNA
aggagagtcccgcagtcggcgtccagcggctctgcttgttcgtgtgtgtgtcgttgcaggccttattcaagcttaccatggacacctctccttcagaggggacaaacttaaatgcgccaaacagtctgggagtgagcgctctatgcgccatctgtggtgatagggcaactggcaaacactacggggcctcctcttgcgacggatgtaagggctttttccggcgctcggtacgtaaaaatcatatgtattcatgccgatttagcagacaatgtgtggtcgataaggacaaaaggaaccagtgccggtactgtcgcctcaagaagtgcttcagagctggtatgaaaaaggaagcagtgcagaatgagagggatcggattagtacccgccgatcctcttatgaagacagctccctgccgtcaataaacgcccttctgcaggctgaggttttgagtagacaaatcgccagccccgtgtctgggattaatggagatatcagggcgaaaaagattgcatccatcgccgacgtctgtgagtcaatgaaagaacagctcctggtgctggtagagtgggctaagtacatacctgccttttgcgaactcccattagatgaccaggttgcactgcttcgggctcacgccggcgagcatttgctgctaggcgcgacaaagcgtagcatggtgttcaaagacgtcctcctgcttgggaacgattatatcgtgccccgccactgtcctgagctggccgaaatgagtagagtgtctattaggatcttggacgagctcgtcctgccatttcaggaattacaaattgatgacaatgagtacgcatacctgaaggctatcatattctttgatcccgacgccaaaggactctccgatcctggtaagattaaacggcttcgaagccaggttcaggtgtcgctggaagactatatcaacgatcgccagtacgactctagaggcaggttcggggagttgctactgctcctgccaacccttcaatccattacttggcagatgatcgagcagatccaatttattaagctgttcggaatggctaaaatagataatttgctccaggaaatgctgttaggcggttcaccgagtgacgcaccccatgcccaccaccctctgcatccacacctaatgcaggagcatatggggacaaacgtaatcgtggccaataccatgcccacgcacctcagcaacggacagatgtgcgaatggcctcggccacgcggccaagctgcgactcccgagaccccgcagccttctcccccaggcgggtccggaagcgaaccttataagctgcttcccggtgcagtcgccacaattgtgaagccattgtcagctatcccccagcctactataaccaaacaggaggttatttgaggactagtccctgttcccagagcccacttttttttctttttttgaaataaaatagcctgtctttcagatctcaaaggctcttttcagagccaccaaaaaaaaaaaaaaaaaaaaaaaaaaaaaaaaaaaaaaaaaaaaaaaaaaaaaaaaaaaaaaaaaaaaaaaaaaaaaaaaaaaaaaaaaaaaaaaaaaaaa

SEQ ID NO: 3947 - RNA, 1586 nt, synthetic construct
  misc_feature 1..1586: note = mRNA a-1 (hSL-A100) (opt3) from Homo sapiens__NP_000448.3__HNF4A(39-474)(S167E)
  source 1..1586: mol_type = other RNA
aggagagtcccgcagtcggcgtccagcggctctgcttgttcgtgtgtgtgtcgttgcaggccttattcaagcttaccatggacacctctccttcagaggggacaaacttaaatgcgccaaacagtctgggagtgagcgctctatgcgccatctgtggtgatagggcaactggcaaacactacggggcctcctcttgcgacggatgtaagggctttttccggcgctcggtacgtaaaaatcatatgtattcatgccgatttagcagacaatgtgtggtcgataaggacaaaaggaaccagtgccggtactgtcgcctcaagaagtgcttcagagctggtatgaaaaaggaagcagtgcagaatgagagggatcggattagtacccgccgatcctcttatgaagacagctccctgccgtcaataaacgcccttctgcaggctgaggttttgagtagacaaatcacagagcccgtgagcgggattaatggagatatcagggccaaaaagattgcgtctatcgcagacgtctgtgaatccatgaaagagcagctcctggtgctggtagaatgggccaagtacatacctgctttttgcgagctcccattagatgaccaggttgccctgcttcgggcacacgctggcgagcatttgctgctaggcgccaccaagcgttcaatggtgttcaaagacgtcctcctgcttgggaacgattatatcgtgccccgccactgtcctgaactggcggagatgagcagagtgagtattaggatcttggacgaactcgtcctgccatttcaggagttacaaattgatgacaatgaatacgcctacctgaaggcaatcatattctttgatcccgacgctaaaggactctctgatcctggtaagattaaacggcttcgatcccaggttcaggtgagcctggaggactatatcaacgatcgccagtacgactcgagaggcaggttcggggagttgctactgctcctgccaactcttcaatctattacatggcagatgatcgaacagatccaatttattaagctgttcggaatggccaaaatagataatttgctccaggagatgctgttaggcggttccccgtcagacgctccccatgcccaccaccctctgcatccacacctaatgcaggaacatatggggaccaacgtaatcgtggcaaatacgatgcccactcacctcagtaacggacagatgtgcgagtggcctcggccacgcggccaagccgctacccccgaaacaccgcagcctagcccacccggcgggtccggatctgagccttataagctgcttcccggtgcggtcgcaactattgtgaagccattgagcgccatcccccagcctaccataacaaaacaggaggttatttgaggactagtccctgttcccagagcccacttttttttctttttttgaaataaaatagcctgtctttcagatctcaaaggctcttttcagagccaccaaaaaaaaaaaaaaaaaaaaaaaaaaaaaaaaaaaaaaaaaaaaaaaaaaaaaaaaaaaaaaaaaaaaaaaaaaaaaaaaaaaaaaaaaaaaaaaaaaaaa

SEQ ID NO: 3948 - RNA, 1586 nt, synthetic construct
  misc_feature 1..1586: note = mRNA a-1 (hSL-A100) (opt3) from Homo sapiens__NP_000448.3__HNF4A(39-474)(S167A)
  source 1..1586: mol_type = other RNA
aggagagtcccgcagtcggcgtccagcggctctgcttgttcgtgtgtgtgtcgttgcaggccttattcaagcttaccatggacacctctccttcagaggggacaaacttaaatgcgccaaacagtctgggagtgagcgctctatgcgccatctgtggtgatagggcaactggcaaacactacggggcctcctcttgcgacggatgtaagggctttttccggcgctcggtacgtaaaaatcatatgtattcatgccgatttagcagacaatgtgtggtcgataaggacaaaaggaaccagtgccggtactgtcgcctcaagaagtgcttcagagctggtatgaaaaaggaagcagtgcagaatgagagggatcggattagtacccgccgatcctcttatgaagacagctccctgccgtcaataaacgcccttctgcaggctgaggttttgagtagacaaatcacagcccccgtgagcgggattaatggagatatcagggcgaaaaagattgcatctatcgccgacgtctgtgagtccatgaaagaacagctcctggtgctggtagagtgggctaagtacatacctgccttttgcgaactcccattagatgaccaggttgcactgcttcgggctcacgccggcgagcatttgctgctaggcgcgaccaagcgttcaatggtgttcaaagacgtcctcctgcttgggaacgattatatcgtgccccgccactgtcctgagctggccgaaatgagcagagtgagtattaggatcttggacgagctcgtcctgccatttcaggaattacaaattgatgacaatgagtacgcatacctgaaggctatcatattctttgatcccgacgccaaaggactctctgatcctggtaagattaaacggcttcgatcccaggttcaggtgagcctggaagactatatcaacgatcgccagtacgactcgagaggcaggttcggggagttgctactgctcctgccaactcttcaatctattacatggcagatgatcgagcagatccaatttattaagctgttcggaatggctaaaatagataatttgctccaggaaatgctgttaggcggttccccgtcagacgcaccccatgcccaccaccctctgcatccacacctaatgcaggagcatatggggaccaacgtaatcgtggccaatacgatgcccactcacctcagtaacggacagatgtgcgaatggcctcggccacgcggccaagctgcgacccccgagacaccgcagcctagcccacccggcgggtccggatctgaaccttataagctgcttcccggtgcagtcgccactattgtgaagccattgagcgctatcccccagcctaccataacaaaacaggaggttatttgaggactagtccctgttcccagagcccacttttttttctttttttgaaataaaatagcctgtctttcagatctcaaaggctcttttcagagccaccaaaaaaaaaaaaaaaaaaaaaaaaaaaaaaaaaaaaaaaaaaaaaaaaaaaaaaaaaaaaaaaaaaaaaaaaaaaaaaaaaaaaaaaaaaaaaaaaaaaaa

SEQ ID NO: 3949 - RNA, 1586 nt, synthetic construct
  misc_feature 1..1586: note = mRNA a-1 (hSL-A100) (opt3) from Homo sapiens__NP_000448.3__HNF4A(39-474)(S167A_S378A_T429A_T432A _S436A)
  source 1..1586: mol_type = other RNA
aggagagtcccgcagtcggcgtccagcggctctgcttgttcgtgtgtgtgtcgttgcaggccttattcaagcttaccatggacacctctccttcagaggggacaaacttaaatgcgccaaacagtctgggagtgagcgctctatgcgccatctgtggtgatagggcaactggcaaacactacggggcctcctcttgcgacggatgtaagggctttttccggcgctcggtacgtaaaaatcatatgtattcatgccgatttagcagacaatgtgtggtcgataaggacaaaaggaaccagtgccggtactgtcgcctcaagaagtgcttcagagctggtatgaaaaaggaagcagtgcagaatgagagggatcggattagtacccgccgatcctcttatgaagacagctccctgccgtcaataaacgcccttctgcaggctgaggttttgagtagacaaatcacagcccccgtgagcgggattaatggagatatcagggcgaaaaagattgcatctatcgccgacgtctgtgagtccatgaaagaacagctcctggtgctggtagagtgggctaagtacatacctgccttttgcgaactcccattagatgaccaggttgcactgcttcgggctcacgccggcgagcatttgctgctaggcgcgaccaagcgttcaatggtgttcaaagacgtcctcctgcttgggaacgattatatcgtgccccgccactgtcctgagctggccgaaatgagcagagtgagtattaggatcttggacgagctcgtcctgccatttcaggaattacaaattgatgacaatgagtacgcatacctgaaggctatcatattctttgatcccgacgccaaaggactctctgatcctggtaagattaaacggcttcgatcccaggttcaggtgagcctggaagactatatcaacgatcgccagtacgactcgagaggcaggttcggggagttgctactgctcctgccaactcttcaatctattacatggcagatgatcgagcagatccaatttattaagctgttcggaatggctaaaatagataatttgctccaggaaatgctgttaggcggtgccccgtccgacgcaccccatgcccaccaccctctgcatccacacctaatgcaggagcatatggggaccaacgtaatcgtggctaatacgatgcccactcacctctcaaacggacagatgtgcgaatggcctcggccacgcggccaagcggcagcccccgaggctccgcagcctgcacccccaggcgggagtggaagcgaaccttataagctgcttcccggtgccgtcgccaccattgtgaagccattgtccgctatcccccagcctacaataactaaacaggaggttatttgaggactagtccctgttcccagagcccacttttttttctttttttgaaataaaatagcctgtctttcagatctcaaaggctcttttcagagccaccaaaaaaaaaaaaaaaaaaaaaaaaaaaaaaaaaaaaaaaaaaaaaaaaaaaaaaaaaaaaaaaaaaaaaaaaaaaaaaaaaaaaaaaaaaaaaaaaaaaaa

SEQ ID NO: 3950 - RNA, 1586 nt, synthetic construct
  misc_feature 1..1586: note = mRNA a-1 (hSL-A100) (opt3) from Homo sapiens__NP_000448.3__HNF4A(39-474)(S167E_S378E_T429E_T432E _S436E)
  source 1..1586: mol_type = other RNA
aggagagtcccgcagtcggcgtccagcggctctgcttgttcgtgtgtgtgtcgttgcaggccttattcaagcttaccatggacacctctccttcagaggggacaaacttaaatgcgccaaacagtctgggagtgagcgctctatgcgccatctgtggtgatagggcaactggcaaacactacggggcctcctcttgcgacggatgtaagggctttttccggcgctcggtacgtaaaaatcatatgtattcatgccgatttagcagacaatgtgtggtcgataaggacaaaaggaaccagtgccggtactgtcgcctcaagaagtgcttcagagctggtatgaaaaaggaagcagtgcagaatgagagggatcggattagtacccgccgatcctcttatgaagacagctccctgccgtcaataaacgcccttctgcaggctgaggttttgagtagacaaatcacagagcccgtgagcgggattaatggagatatcagggccaaaaagattgcgtctatcgcagacgtctgtgaatccatgaaagagcagctcctggtgctggtagaatgggccaagtacatacctgctttttgcgagctcccattagatgaccaggttgccctgcttcgggcacacgctggcgagcatttgctgctaggcgccaccaagcgttcaatggtgttcaaagacgtcctcctgcttgggaacgattatatcgtgccccgccactgtcctgaactggcggagatgagcagagtgagtattaggatcttggacgaactcgtcctgccatttcaggagttacaaattgatgacaatgaatacgcctacctgaaggcaatcatattctttgatcccgacgctaaaggactctctgatcctggtaagattaaacggcttcgatcccaggttcaggtgagcctggaggactatatcaacgatcgccagtacgactcgagaggcaggttcggggagttgctactgctcctgccaactcttcaatctattacatggcagatgatcgaacagatccaatttattaagctgttcggaatggccaaaatagataatttgctccaggagatgctgttaggcggtgaaccgtccgacgctccccatgcccaccaccctctgcatccacacctaatgcaggagcatatggggaccaacgtaatcgtggcaaatacgatgcccactcacctctcaaacggacagatgtgcgaatggcctcggccacgcggccaagccgctgagcccgaggaaccgcagcctgagcccccaggcgggagtggaagcgaaccttataagctgcttcccggtgcggtcgcaaccattgtgaagccattgtccgccatcccccagcctacaataactaaacaggaggttatttgaggactagtccctgttcccagagcccacttttttttctttttttgaaataaaatagcctgtctttcagatctcaaaggctcttttcagagccaccaaaaaaaaaaaaaaaaaaaaaaaaaaaaaaaaaaaaaaaaaaaaaaaaaaaaaaaaaaaaaaaaaaaaaaaaaaaaaaaaaaaaaaaaaaaaaaaaaaaaa

SEQ ID NO: 3951 - RNA, 1586 nt, synthetic construct
  misc_feature 1..1586: note = mRNA a-1 (hSL-A100) (opt3) from Homo sapiens__NP_000448.3__HNF4A(39-474)(S87A)
  source 1..1586: mol_type = other RNA
aggagagtcccgcagtcggcgtccagcggctctgcttgttcgtgtgtgtgtcgttgcaggccttattcaagcttaccatggacacctctccttcagaggggacaaacttaaatgcgccaaacagtctgggagtgagcgctctatgcgccatctgtggtgatagggcaactggcaaacactacggggcctcctcttgcgacggatgtaagggctttttccggcgcgctgtacgtaaaaatcatatgtattcgtgccgattttcaagacaatgtgtggtcgataaggacaaaaggaaccagtgccggtactgtcgcctcaagaagtgcttcagagcaggtatgaaaaaggaagccgtgcagaatgagagggatcggattagcacccgccgaagttcctatgaagactctagcctgccgtccataaacgcccttctgcaggccgaggttttgtcaagacaaatcacaagtcccgtgagcgggattaatggagatatcagggcgaaaaagattgcatctatcgccgacgtctgtgagtccatgaaagaacagctcctggtgctggtagagtgggctaagtacatacctgccttttgcgaactcccattagatgaccaggttgcactgcttcgggctcacgccggcgagcatttgctgctaggcgcgaccaagcgttcaatggtgttcaaagacgtcctcctgcttgggaacgattatatcgtgccccgccactgtcctgagctggccgaaatgagcagagtgagtattaggatcttggacgagctcgtcctgccatttcaggaattacaaattgatgacaatgagtacgcatacctgaaggctatcatattctttgatcccgacgccaaaggactctctgatcctggtaagattaaacggcttcgatcccaggttcaggtgagcctggaagactatatcaacgatcgccagtacgactcgagaggcaggttcggggagttgctactgctcctgccaactcttcaatctattacatggcagatgatcgagcagatccaatttattaagctgttcggaatggctaaaatagataatttgctccaggaaatgctgttaggcggttccccgtcagacgctccccatgcacaccaccctctgcatccacacctaatgcaggagcatatggggaccaacgtaatcgtggccaatacgatgcccactcacctcagtaacggacagatgtgcgaatggcctcggccacgcggccaagctgcgacccccgagacaccgcagcctagcccacccggcgggtccggatctgaaccttataagctgcttcccggtgcagtcgccactattgtgaagccattgagcgctatcccccagcctaccataacaaaacaggaggttatttgaggactagtccctgttcccagagcccacttttttttctttttttgaaataaaatagcctgtctttcagatctcaaaggctcttttcagagccaccaaaaaaaaaaaaaaaaaaaaaaaaaaaaaaaaaaaaaaaaaaaaaaaaaaaaaaaaaaaaaaaaaaaaaaaaaaaaaaaaaaaaaaaaaaaaaaaaaaaaa

SEQ ID NO: 3952 - RNA, 1586 nt, synthetic construct
  misc_feature 1..1586: note = mRNA a-1 (hSL-A100) (opt3) from Homo sapiens__NP_000448.3__HNF4A(39-474)(S87E)
  source 1..1586: mol_type = other RNA
aggagagtcccgcagtcggcgtccagcggctctgcttgttcgtgtgtgtgtcgttgcaggccttattcaagcttaccatggacacctctccttcagaggggacaaacttaaatgcgccaaacagtctgggagtgagcgctctatgcgccatctgtggtgatagggcaactggcaaacactacggggcctcctcttgcgacggatgtaagggctttttccggcgcgaagtacgtaaaaatcatatgtattcgtgccgattttcaagacaatgtgtggtcgataaggacaaaaggaaccagtgccggtactgtcgcctcaagaagtgcttcagagctggtatgaaaaaggaggcagtgcagaatgaaagggatcggattagcacccgccgaagttcctatgaggactctagcctgccgtccataaacgcccttctgcaggctgaggttttgtcaagacaaatcacaagtcccgtgagcgggattaatggagatatcagggccaaaaagattgcgtctatcgcagacgtctgtgaatccatgaaagagcagctcctggtgctggtagaatgggccaagtacatacctgctttttgcgagctcccattagatgaccaggttgccctgcttcgggcacacgctggcgagcatttgctgctaggcgccaccaagcgttcaatggtgttcaaagacgtcctcctgcttgggaacgattatatcgtgccccgccactgtcctgaactggcggagatgagcagagtgagtattaggatcttggacgaactcgtcctgccatttcaggagttacaaattgatgacaatgaatacgcctacctgaaggcaatcatattctttgatcccgacgctaaaggactctctgatcctggtaagattaaacggcttcgatcccaggttcaggtgagcctggaggactatatcaacgatcgccagtacgactcgagaggcaggttcggggagttgctactgctcctgccaactcttcaatctattacatggcagatgatcgaacagatccaatttattaagctgttcggaatggccaaaatagataatttgctccaggagatgctgttaggcggttccccgtcagacgctccccatgcccaccaccctctgcatccacacctaatgcaggaacatatggggaccaacgtaatcgtggcaaatacgatgcccactcacctcagtaacggacagatgtgcgagtggcctcggccacgcggccaagccgctacccccgaaacaccgcagcctagcccacccggcgggtccggatctgagccttataagctgcttcccggtgcggtcgcaactattgtgaagccattgagcgccatcccccagcctaccataacaaaacaggaggttatttgaggactagtccctgttcccagagcccacttttttttctttttttgaaataaaatagcctgtctttcagatctcaaaggctcttttcagagccaccaaaaaaaaaaaaaaaaaaaaaaaaaaaaaaaaaaaaaaaaaaaaaaaaaaaaaaaaaaaaaaaaaaaaaaaaaaaaaaaaaaaaaaaaaaaaaaaaaaaaa

SEQ ID NO: 3953 - RNA, 1586 nt, synthetic construct
  misc_feature 1..1586: note = mRNA a-1 (hSL-A100) (opt3) from Homo sapiens__NP_000448.3__HNF4A(39-474)(R2V)
  source 1..1586: mol_type = other RNA
aggagagtcccgcagtcggcgtccagcggctctgcttgttcgtgtgtgtgtcgttgcaggccttattcaagcttaccatggacacctctccttcagaggggacaaacttaaatgcgccaaacagtctgggagtaagcgctctatgcgccatctgtggtgatagagcaactggcaaacactacggggcctcctcttgcgacggatgtaagggctttttcaggcggtcggtgcgcaaaaatcatatgtattcatgccgatttagccgtcaatgtgtcgtggataaggacaaaagaaaccagtgcaggtactgtcggctcaagaagtgcttccgcgctggtatgaaaaaggaagcagttcagaatgagagagataggattagtacccggcgctcctcttatgaagacagctccctgccgtcaataaacgcccttctgcaggctgaggtgttgagtcgacaaatcacaagccccgtctctgggattaatggagatatcagagccaaaaagattgcgtccatcgcagacgtgtgtgagtcaatgaaagaacagctcctggtactggttgagtgggccaagtacatacctgctttttgcgaactcccattagatgaccaggtggccctgcttagggcacacgctggcgagcatttgctgctaggcgccaccaagcggagcatggtcttcaaagacgtgctcctgcttgggaacgattatatcgtgccccgtcactgtcctgagctggcggaaatgagtcgcgtctctattagaatcttggacgagctcgttctgccatttcaggaattacaaattgatgacaatgagtacgcctacctgaaggcaatcatattctttgatcccgacgctaaaggactctccgatcctggtaagattaaaaggcttcggagccaggtgcaggtatcgctggaagactatatcaacgatcgacagtacgactctcgcggcagattcggggagttgctactgctcctgccaactcttcaatccattacatggcagatgatcgagcagatccaatttattaagctgttcggaatggccaaaatagataatttgctccaggaaatgctgttaggcggttcaccgagtgacgctccccatgcccaccaccctctgcatccacacctaatgcaggagcatatggggaccaacgtgatcgtcgcaaatacgatgcccactcacctcagcaacggacagatgtgcgaatggcctaggccacggggccaagccgctacccccgagacaccgcagccttctcccccaggcgggtccggaagcgaaccttataagctgcttcccggtgcggtggcaactattgttaagccattgtcagccatcccccagcctaccataacaaaacaggaggtgatttgaggactagtccctgttcccagagcccacttttttttctttttttgaaataaaatagcctgtctttcagatctcaaaggctcttttcagagccaccaaaaaaaaaaaaaaaaaaaaaaaaaaaaaaaaaaaaaaaaaaaaaaaaaaaaaaaaaaaaaaaaaaaaaaaaaaaaaaaaaaaaaaaaaaaaaaaaaaaaa

SEQ ID NO: 3954 - RNA, 1586 nt, synthetic construct
  misc_feature 1..1586: note = mRNA a-1 (hSL-A100) (opt3) from Homo sapiens__NP_000448.3__HNF4A(39-474)(R2V_K5V)
  source 1..1586: mol_type = other RNA
aggagagtcccgcagtcggcgtccagcggctctgcttgttcgtgtgtgtgtcgttgcaggccttattcaagcttaccatggacacctctccttcagaggggacaaacttaaatgcgccaaacagtctgggagtgagcgctctatgcgccatctgtggtgatagagcaactggcaagcactacggggcctcctcttgcgacggatgtaaaggctttttcaggcggtcggtccgcaagaatcatatgtattcatgccgatttagccgtcaatgtgtggttgataaagacaagagaaaccagtgcaggtactgtcggctcaaaaagtgcttccgcgctggtatgaagaaagaagcagtgcagaatgagagagataggattagtacccggcgctcctcttatgaagacagctccctgccgtcaataaacgcccttctgcaggctgaggtcttgagtcgacaaatcacaagccccgtgtctgggattaatggagatatcagagccaagaaaattgcgtccatcgcagacgtatgtgagtcaatgaaggaacagctcctggttctggtggagtgggccaaatacatacctgctttttgcgaactcccattagatgaccaggtcgccctgcttagggcacacgctggcgagcatttgctgctaggcgccaccaagcggagcatggtgttcaaggacgtgctcctgcttgggaacgattatatcgtcccccgtcactgtcctgagctggcggaaatgagtcgcgtttctattagaatcttggacgagctcgtgctgccatttcaggaattacaaattgatgacaatgagtacgcctacctgaaagcaatcatattctttgatcccgacgctaagggactctccgatcctggtaaaattaagaggcttcggagccaggtacaggtgtcgctggaagactatatcaacgatcgacagtacgactctcgcggcagattcggggagttgctactgctcctgccaactcttcaatccattacatggcagatgatcgagcagatccaatttattaaactgttcggaatggccaagatagataatttgctccaggaaatgctgttaggcggttcaccgagtgacgctccccatgcccaccaccctctgcatccacacctaatgcaggagcatatggggaccaacgtcatcgtggcaaatacgatgcccactcacctcagcaacggacagatgtgcgaatggcctaggccacggggccaagccgctacccccgagacaccgcagccttctcccccaggcgggtccggaagcgaaccttataaactgcttcccggtgcggttgcaactattgtgaagccattgtcagccatcccccagcctaccataacaaagcaggaggtcatttgaggactagtccctgttcccagagcccacttttttttctttttttgaaataaaatagcctgtctttcagatctcaaaggctcttttcagagccaccaaaaaaaaaaaaaaaaaaaaaaaaaaaaaaaaaaaaaaaaaaaaaaaaaaaaaaaaaaaaaaaaaaaaaaaaaaaaaaaaaaaaaaaaaaaaaaaaaaaaa

SEQ ID NO: 3955 - RNA, 1586 nt, synthetic construct
  misc_feature 1..1586: note = mRNA a-1 (hSL-A100) (opt3) from Homo sapiens__NP_000448.3__HNF4A(39-474)(K179R_K180R)
  source 1..1586: mol_type = other RNA
aggagagtcccgcagtcggcgtccagcggctctgcttgttcgtgtgtgtgtcgttgcaggccttattcaagcttaccatggacacctctccttcagaggggacaaacttaaatgcgccaaacagtctgggagtgagcgctctatgcgccatctgtggtgatagggcaactggcaaacactacggggcctcctcttgcgacggatgtaagggctttttccggcgctcggtacgtaaaaatcatatgtattcatgccgatttagcagacaatgtgtggtcgataaggacaaaaggaaccagtgccggtactgtcgcctcaagaagtgcttcagagctggtatgaaaaaggaagcagtgcagaatgagagggatcggattagtacccgccgatcctcttatgaagacagctccctgccgtcaataaacgcccttctgcaggctgaggttttgagtagacaaatcacaagccccgtgtctgggattaatggagatatcagggcccggcgtattgcgtccatcgcagacgtctgtgagtcaatgaaagaacagctcctggtgctggtagagtgggccaagtacatacctgctttttgcgaactcccattagatgaccaggttgccctgcttcgcgcacacgctggcgagcatttgctgctaggcgccaccaaaagaagcatggtgttcaaggacgtcctcctgcttgggaacgattatatcgtgcccaggcactgtcctgagctggcggaaatgagtcgggtgtctattcgaatcttggacgagctcgtcctgccatttcaggaattacaaattgatgacaatgagtacgcctacctgaaggcaatcatattctttgatcccgacgctaaaggactctccgatcctggtaagattaaacgccttagaagccaggttcaggtgtcgctggaagactatatcaacgataggcagtacgactctcggggccgcttcggggagttgctactgctcctgccaactcttcaatccattacatggcagatgatcgagcagatccaatttattaagctgttcggaatggccaaaatagataatttgctccaggaaatgctgttaggcggttcaccgagtgacgctccccatgcccaccaccctctgcatccacacctaatgcaggagcatatggggaccaacgtaatcgtggcaaatacgatgcccactcacctcagcaacggacagatgtgcgaatggcctagaccaaggggccaagccgctacccccgagacaccgcagccttctcccccaggcgggtccggaagcgaaccttataagctgcttcccggtgcggtcgcaactattgtgaaaccattgtcagccatcccccagcctaccataacaaagcaggaggttatttgaggactagtccctgttcccagagcccacttttttttctttttttgaaataaaatagcctgtctttcagatctcaaaggctcttttcagagccaccaaaaaaaaaaaaaaaaaaaaaaaaaaaaaaaaaaaaaaaaaaaaaaaaaaaaaaaaaaaaaaaaaaaaaaaaaaaaaaaaaaaaaaaaaaaaaaaaaaaaa

SEQ ID NO: 3956 - RNA, 1586 nt, synthetic construct
  misc_feature 1..1586: note = mRNA a-1 (hSL-A100) (opt3) from Homo sapiens__NP_000448.3__HNF4A(39-474)(K234R)
  source 1..1586: mol_type = other RNA
aggagagtcccgcagtcggcgtccagcggctctgcttgttcgtgtgtgtgtcgttgcaggccttattcaagcttaccatggacacctctccttcagaggggacaaacttaaatgcgccaaacagtctgggagtgagcgctctatgcgccatctgtggtgatagggcaactggcaaacactacggggcctcctcttgcgacggatgtaagggctttttccggcgctcggtacgtaaaaatcatatgtattcatgccgatttagcagacaatgtgtggtcgataaggacaaaaggaaccagtgccggtactgtcgcctcaagaagtgcttcagagctggtatgaaaaaggaagcagtgcagaatgagagggatcggattagtacccgccgatcctcttatgaagacagctccctgccgtcaataaacgcccttctgcaggctgaggttttgagtagacaaatcacaagccccgtgtctgggattaatggagatatcagggccaaaaagattgcgtccatcgcagacgtctgtgagtcaatgaaagaacagctcctggtgctggtagagtgggccaagtacatacctgctttttgcgaactcccattagatgaccaggttgccctgcttcgggcacacgctggcgagcatttgctgctaggcgccacccgtcgcagcatggtgttcaaggacgtcctcctgcttgggaacgattatatcgtgcccagacactgtcctgagctggcggaaatgagtagggtgtctattcggatcttggacgagctcgtcctgccatttcaggaattacaaattgatgacaatgagtacgcctacctgaaagcaatcatattctttgatcccgacgctaagggactctccgatcctggtaaaattaagcgacttcgcagccaggttcaggtgtcgctggaagactatatcaacgatagacagtacgactctaggggccggttcggggagttgctactgctcctgccaactcttcaatccattacatggcagatgatcgagcagatccaatttattaaactgttcggaatggccaagatagataatttgctccaggaaatgctgttaggcggttcaccgagtgacgctccccatgcccaccaccctctgcatccacacctaatgcaggagcatatggggaccaacgtaatcgtggcaaatacgatgcccactcacctcagcaacggacagatgtgcgaatggcctcgcccaagaggccaagccgctacccccgagacaccgcagccttctcccccaggcgggtccggaagcgaaccttataaactgcttcccggtgcggtcgcaactattgtgaagccattgtcagccatcccccagcctaccataacaaagcaggaggttatttgaggactagtccctgttcccagagcccacttttttttctttttttgaaataaaatagcctgtctttcagatctcaaaggctcttttcagagccaccaaaaaaaaaaaaaaaaaaaaaaaaaaaaaaaaaaaaaaaaaaaaaaaaaaaaaaaaaaaaaaaaaaaaaaaaaaaaaaaaaaaaaaaaaaaaaaaaaaaaa

SEQ ID NO: 3957 - RNA, 1586 nt, synthetic construct
  misc_feature 1..1586: note = mRNA a-1 (hSL-A100) (opt3) from Homo sapiens__NP_000448.3__HNF4A(39-474)(K300R)
  source 1..1586: mol_type = other RNA
aggagagtcccgcagtcggcgtccagcggctctgcttgttcgtgtgtgtgtcgttgcaggccttattcaagcttaccatggacacctctccttcagaggggacaaacttaaatgcgccaaacagtctgggagtgagcgctctatgcgccatctgtggtgatagggcaactggcaaacactacggggcctcctcttgcgacggatgtaagggctttttccggcgctcggtacgtaaaaatcatatgtattcatgccgatttagcagacaatgtgtggtcgataaggacaaaaggaaccagtgccggtactgtcgcctcaagaagtgcttcagagctggtatgaaaaaggaagcagtgcagaatgagagggatcggattagtacccgccgatcctcttatgaagacagctccctgccgtcaataaacgcccttctgcaggctgaggttttgagtagacaaatcacaagccccgtgtctgggattaatggagatatcagggccaaaaagattgcgtccatcgcagacgtctgtgagtcaatgaaagaacagctcctggtgctggtagagtgggccaagtacatacctgctttttgcgaactcccattagatgaccaggttgccctgcttcgggcacacgctggcgagcatttgctgctaggcgccaccaagcgtagcatggtgttcaaagacgtcctcctgcttgggaacgattatatcgtgccccgccactgtcctgagctggcggaaatgagtagagtgtctattaggatcttggacgagctcgtcctgccatttcaggaattacaaattgatgacaatgagtacgcctacctgaaggcaatcatattctttgatcccgacgctcggggactctccgatcctggtaaaattaagcgacttcgcagccaggttcaggtgtcgctggaagactatatcaacgatagacagtacgactctaggggccggttcggggagttgctactgctcctgccaactcttcaatccattacatggcagatgatcgagcagatccaatttattaaactgttcggaatggccaagatagataatttgctccaggaaatgctgttaggcggttcaccgagtgacgctccccatgcccaccaccctctgcatccacacctaatgcaggagcatatggggaccaacgtaatcgtggcaaatacgatgcccactcacctcagcaacggacagatgtgcgaatggcctcgcccaagaggccaagccgctacccccgagacaccgcagccttctcccccaggcgggtccggaagcgaaccttataaactgcttcccggtgcggtcgcaactattgtgaagccattgtcagccatcccccagcctaccataacaaagcaggaggttatttgaggactagtccctgttcccagagcccacttttttttctttttttgaaataaaatagcctgtctttcagatctcaaaggctcttttcagagccaccaaaaaaaaaaaaaaaaaaaaaaaaaaaaaaaaaaaaaaaaaaaaaaaaaaaaaaaaaaaaaaaaaaaaaaaaaaaaaaaaaaaaaaaaaaaaaaaaaaaaa

SEQ ID NO: 3958 - RNA, 1586 nt, synthetic construct
  misc_feature 1..1586: note = mRNA a-1 (hSL-A100) (opt3) from Homo sapiens__NP_000448.3__HNF4A(39-474)(K300R_K307R_K309R)
  source 1..1586: mol_type = other RNA
aggagagtcccgcagtcggcgtccagcggctctgcttgttcgtgtgtgtgtcgttgcaggccttattcaagcttaccatggacacctctccttcagaggggacaaacttaaatgcgccaaacagtctgggagtgagcgctctatgcgccatctgtggtgatagggcaactggcaaacactacggggcctcctcttgcgacggatgtaagggctttttccggcgctcggtacgtaaaaatcatatgtattcatgccgatttagcagacaatgtgtggtcgataaggacaaaaggaaccagtgccggtactgtcgcctcaagaagtgcttcagagctggtatgaaaaaggaagcagtgcagaatgagagggatcggattagtacccgccgatcctcttatgaagacagctccctgccgtcaataaacgcccttctgcaggctgaggttttgagtagacaaatcacaagccccgtgtctgggattaatggagatatcagggccaaaaagattgcgtccatcgcagacgtctgtgagtcaatgaaagaacagctcctggtgctggtagagtgggccaagtacatacctgctttttgcgaactcccattagatgaccaggttgccctgcttcgggcacacgctggcgagcatttgctgctaggcgccaccaagcgtagcatggtgttcaaagacgtcctcctgcttgggaacgattatatcgtgccccgccactgtcctgagctggcggaaatgagtagagtgtctattaggatcttggacgagctcgtcctgccatttcaggaattacaaattgatgacaatgagtacgcctacctgaaggcaatcatattctttgatcccgacgctcggggactctccgatcctggtcgcattcgaagacttaggagccaggttcaggtgtcgctggaagactatatcaacgatcggcagtacgactctcgcggcagattcggggagttgctactgctcctgccaactcttcaatccattacatggcagatgatcgagcagatccaatttattaaactgttcggaatggccaagatagataatttgctccaggaaatgctgttaggcggttcaccgagtgacgctccccatgcccaccaccctctgcatccacacctaatgcaggagcatatggggaccaacgtaatcgtggcaaatacgatgcccactcacctcagcaacggacagatgtgcgaatggcctaggccacgtggccaagccgctacccccgagacaccgcagccttctcccccaggcgggtccggaagcgaaccttataaactgcttcccggtgcggtcgcaactattgtgaagccattgtcagccatcccccagcctaccataacaaaacaggaggttatttgaggactagtccctgttcccagagcccacttttttttctttttttgaaataaaatagcctgtctttcagatctcaaaggctcttttcagagccaccaaaaaaaaaaaaaaaaaaaaaaaaaaaaaaaaaaaaaaaaaaaaaaaaaaaaaaaaaaaaaaaaaaaaaaaaaaaaaaaaaaaaaaaaaaaaaaaaaaaaa

SEQ ID NO: 3959 - RNA, 1586 nt, synthetic construct
  misc_feature 1..1586: note = mRNA a-1 (hSL-A100) (opt3) from Homo sapiens__NP_000448.3__HNF4A(39-474)(K447R_K470R)
  source 1..1586: mol_type = other RNA
aggagagtcccgcagtcggcgtccagcggctctgcttgttcgtgtgtgtgtcgttgcaggccttattcaagcttaccatggacacctctccttcagaggggacaaacttaaatgcgccaaacagtctgggagtgagcgctctatgcgccatctgtggtgatagggcaactggcaaacactacggggcctcctcttgcgacggatgtaagggctttttccggcgctcggtacgtaaaaatcatatgtattcatgccgatttagcagacaatgtgtggtcgataaggacaaaaggaaccagtgccggtactgtcgcctcaagaagtgcttcagagctggtatgaaaaaggaagcagtgcagaatgagagggatcggattagtacccgccgatcctcttatgaagacagctccctgccgtcaataaacgcccttctgcaggctgaggttttgagtagacaaatcacaagccccgtgtctgggattaatggagatatcagggccaaaaagattgcgtccatcgcagacgtctgtgagtcaatgaaagaacagctcctggtgctggtagagtgggccaagtacatacctgctttttgcgaactcccattagatgaccaggttgccctgcttcgggcacacgctggcgagcatttgctgctaggcgccaccaagcgtagcatggtgttcaaagacgtcctcctgcttgggaacgattatatcgtgccccgccactgtcctgagctggcggaaatgagtagagtgtctattaggatcttggacgagctcgtcctgccatttcaggaattacaaattgatgacaatgagtacgcctacctgaaggcaatcatattctttgatcccgacgctaaaggactctccgatcctggtaagattaaacggcttcgaagccaggttcaggtgtcgctggaagactatatcaacgatcgccagtacgactctagaggcaggttcggggagttgctactgctcctgccaactcttcaatccattacatggcagatgatcgagcagatccaatttattaagctgttcggaatggccaaaatagataatttgctccaggaaatgctgttaggcggttcaccgagtgacgctccccatgcccaccaccctctgcatccacacctaatgcaggagcatatggggaccaacgtaatcgtggcaaatacgatgcccactcacctcagcaacggacagatgtgcgaatggcctcggccacgcggccaagccgctacccccgagacaccgcagccttctcccccaggcgggtccggaagcgaaccttatagactgcttcccggtgcggtcgcaactattgtgaagccattgtcagccatcccccagcctaccataacaaggcaggaggttatttgaggactagtccctgttcccagagcccacttttttttctttttttgaaataaaatagcctgtctttcagatctcaaaggctcttttcagagccaccaaaaaaaaaaaaaaaaaaaaaaaaaaaaaaaaaaaaaaaaaaaaaaaaaaaaaaaaaaaaaaaaaaaaaaaaaaaaaaaaaaaaaaaaaaaaaaaaaaaaa

SEQ ID NO: 3960 - RNA, 1586 nt, synthetic construct
  misc_feature 1..1586: note = mRNA a-1 (hSL-A100) (opt3) from Homo sapiens__NP_000448.3__HNF4A(39-474)(K458R)
  source 1..1586: mol_type = other RNA
aggagagtcccgcagtcggcgtccagcggctctgcttgttcgtgtgtgtgtcgttgcaggccttattcaagcttaccatggacacctctccttcagaggggacaaacttaaatgcgccaaacagtctgggagtgagcgctctatgcgccatctgtggtgatagggcaactggcaaacactacggggcctcctcttgcgacggatgtaagggctttttccggcgctcggtacgtaaaaatcatatgtattcatgccgatttagcagacaatgtgtggtcgataaggacaaaaggaaccagtgccggtactgtcgcctcaagaagtgcttcagagctggtatgaaaaaggaagcagtgcagaatgagagggatcggattagtacccgccgatcctcttatgaagacagctccctgccgtcaataaacgcccttctgcaggctgaggttttgagtagacaaatcacaagccccgtgtctgggattaatggagatatcagggccaaaaagattgcgtccatcgcagacgtctgtgagtcaatgaaagaacagctcctggtgctggtagagtgggccaagtacatacctgctttttgcgaactcccattagatgaccaggttgccctgcttcgggcacacgctggcgagcatttgctgctaggcgccaccaagcgtagcatggtgttcaaagacgtcctcctgcttgggaacgattatatcgtgccccgccactgtcctgagctggcggaaatgagtagagtgtctattaggatcttggacgagctcgtcctgccatttcaggaattacaaattgatgacaatgagtacgcctacctgaaggcaatcatattctttgatcccgacgctaaaggactctccgatcctggtaagattaaacggcttcgaagccaggttcaggtgtcgctggaagactatatcaacgatcgccagtacgactctagaggcaggttcggggagttgctactgctcctgccaactcttcaatccattacatggcagatgatcgagcagatccaatttattaagctgttcggaatggccaaaatagataatttgctccaggaaatgctgttaggcggttcaccgagtgacgctccccatgcccaccaccctctgcatccacacctaatgcaggagcatatggggaccaacgtaatcgtggcaaatacgatgcccactcacctcagcaacggacagatgtgcgaatggcctcggccacgcggccaagccgctacccccgagacaccgcagccttctcccccaggcgggtccggaagcgaaccttataagctgcttcccggtgcggtcgcaactattgtgagaccattgtcagccatcccccagcctaccataacaaagcaggaggttatttgaggactagtccctgttcccagagcccacttttttttctttttttgaaataaaatagcctgtctttcagatctcaaaggctcttttcagagccaccaaaaaaaaaaaaaaaaaaaaaaaaaaaaaaaaaaaaaaaaaaaaaaaaaaaaaaaaaaaaaaaaaaaaaaaaaaaaaaaaaaaaaaaaaaaaaaaaaaaaa

SEQ ID NO: 3961 - RNA, 1586 nt, synthetic construct
  misc_feature 1..1586: note = mRNA a-1 (hSL-A100) (opt3) from Homo sapiens__NP_000448.3__HNF4A(39-474)(K106R_K108R_K126R_K127R )
  source 1..1586: mol_type = other RNA
aggagagtcccgcagtcggcgtccagcggctctgcttgttcgtgtgtgtgtcgttgcaggccttattcaagcttaccatggacacctctccttcagaggggacaaacttaaatgcgccaaacagtctgggagtgagcgctctatgcgccatctgtggtgatagggcaactggcaaacactacggggcctcctcttgcgacggatgtaagggctttttccggcgctcggtacgtaaaaatcatatgtattcatgccgatttagcagacaatgtgtggtcgatagggaccggcgcaaccagtgcagatactgtaggctcaagaaatgcttccgggctggtatgcgccgagaagcagtgcagaatgagagagataggattagtacccggcgttcctcttatgaagacagctccctgccgtcaataaacgcccttctgcaggctgaggttttgagtcgccaaatcacaagccccgtgtctgggattaatggagatatcagagccaagaagattgcgtccatcgcagacgtctgtgagtcaatgaaagaacagctcctggtgctggtagagtgggccaagtacatacctgctttttgcgaactcccattagatgaccaggttgccctgcttagggcacacgctggcgagcatttgctgctaggcgccaccaaacggagcatggtgttcaaggacgtcctcctgcttgggaacgattatatcgtgccccgacactgtcctgagctggcggaaatgagtcgcgtgtctattagaatcttggacgagctcgtcctgccatttcaggaattacaaattgatgacaatgagtacgcctacctgaaagcaatcatattctttgatcccgacgctaagggactctccgatcctggtaagattaaaaggcttcggagccaggttcaggtgtcgctggaagactatatcaacgatcgccagtacgactctagaggcaggttcggggagttgctactgctcctgccaactcttcaatccattacatggcagatgatcgagcagatccaatttattaagctgttcggaatggccaaaatagataatttgctccaggaaatgctgttaggcggttcaccgagtgacgctccccatgcccaccaccctctgcatccacacctaatgcaggagcatatggggaccaacgtaatcgtggcaaatacgatgcccactcacctcagcaacggacagatgtgcgaatggcctcgtccacggggccaagccgctacccccgagacaccgcagccttctcccccaggcgggtccggaagcgaaccttataagctgcttcccggtgcggtcgcaactattgtgaaaccattgtcagccatcccccagcctaccataacaaagcaggaggttatttgaggactagtccctgttcccagagcccacttttttttctttttttgaaataaaatagcctgtctttcagatctcaaaggctcttttcagagccaccaaaaaaaaaaaaaaaaaaaaaaaaaaaaaaaaaaaaaaaaaaaaaaaaaaaaaaaaaaaaaaaaaaaaaaaaaaaaaaaaaaaaaaaaaaaaaaaaaaaaa

SEQ ID NO: 3962 - RNA, 1586 nt, synthetic construct
  misc_feature 1..1586: note = mRNA a-1 (hSL-A100) (opt3) from Homo sapiens__NP_000448.3__HNF4A(39-474)(E285Q)
  source 1..1586: mol_type = other RNA
aggagagtcccgcagtcggcgtccagcggctctgcttgttcgtgtgtgtgtcgttgcaggccttattcaagcttaccatggacacctctccttcagaggggacaaacttaaatgcgccaaacagtctgggagtgagcgctctatgcgccatctgtggtgatagggcaactggcaaacactacggggcctcctcttgcgacggatgtaagggctttttccggcgctcggtacgtaaaaatcatatgtattcatgccgatttagcagacaatgtgtggtcgataaggacaaaaggaaccagtgccggtactgtcgcctcaagaagtgcttcagagctggtatgaaaaaggaagcagtgcagaatgagagggatcggattagtacccgccgatcctcttatgaagacagctccctgccgtcaataaacgcccttctgcaggctgaggttttgagtagacaaatcacaagccccgtgtctgggattaatggagatatcagggccaaaaagattgcgtccatcgcagacgtctgtgagtcaatgaaagaacagctcctggtgctggtagagtgggccaagtacatacctgctttttgcgaactcccattagatgaccaggttgccctgcttcgggcacacgctggcgagcatttgctgctaggcgccaccaagcgtagcatggtgttcaaagacgtcctcctgcttgggaacgattatatcgtgccccgccactgtcctgagctggcggaaatgagtagagtgtctattaggatcttggacgagctcgtcctgccatttcaggaattacaaattgatgacaatcagtacgcctacctgaaggcaatcatattctttgatcccgacgctaaaggactctccgatcctggtaagattaaacggcttcgaagccaggttcaggtgtcgctggaggactatatcaacgatcgccaatacgactctagaggcaggttcggggaattgctactgctcctgccaactcttcagtccattacatggcagatgatcgagcaaatccagtttattaagctgttcggaatggccaaaatagataatttgctccaggagatgctgttaggcggttcaccgagtgacgctccccatgcccaccaccctctgcatccacacctaatgcaggaacatatggggaccaacgtaatcgtggcaaatacgatgcccactcacctcagcaacggacaaatgtgcgagtggcctcggccacgcggccaggccgctacccccgaaacaccgcagccttctcccccaggcgggtccggaagcgagccttataagctgcttcccggtgcggtcgcaactattgtgaagccattgtcagccatcccccagcctaccataacaaaacaagaagttatttgaggactagtccctgttcccagagcccacttttttttctttttttgaaataaaatagcctgtctttcagatctcaaaggctcttttcagagccaccaaaaaaaaaaaaaaaaaaaaaaaaaaaaaaaaaaaaaaaaaaaaaaaaaaaaaaaaaaaaaaaaaaaaaaaaaaaaaaaaaaaaaaaaaaaaaaaaaaaaa

SEQ ID NO: 3963 - RNA, 1586 nt, synthetic construct
  misc_feature 1..1586: note = mRNA a-1 (hSL-A100) (opt3) from Homo sapiens__NP_000448.3__HNF4A(39-474)(T166E)
  source 1..1586: mol_type = other RNA
aggagagtcccgcagtcggcgtccagcggctctgcttgttcgtgtgtgtgtcgttgcaggccttattcaagcttaccatggacacctctccttcagaggggacaaacttaaatgcgccaaacagtctgggagtgagcgctctatgcgccatctgtggtgatagggcaactggcaaacactacggggcctcctcttgcgacggatgtaagggctttttccggcgctcggtacgtaaaaatcatatgtattcatgccgatttagcagacaatgtgtggtcgataaggacaaaaggaaccagtgccggtactgtcgcctcaagaagtgcttcagagctggtatgaaaaaggaagcagtgcagaatgagagggatcggattagtacccgccgatcctcttatgaagacagctccctgccgtcaataaacgcccttctgcaggctgaggttttgagtagacaaatcgagagccccgtgtctgggattaatggagatatcagggccaaaaagattgcgtccatcgcagacgtctgtgaatcaatgaaagagcagctcctggtgctggtagaatgggccaagtacatacctgctttttgcgagctcccattagatgaccaggttgccctgcttcgggcacacgctggcgagcatttgctgctaggcgccacaaagcgtagcatggtgttcaaagacgtcctcctgcttgggaacgattatatcgtgccccgccactgtcctgaactggcggagatgagtagagtgtctattaggatcttggacgaactcgtcctgccatttcaggagttacaaattgatgacaatgaatacgcctacctgaaggcaatcatattctttgatcccgacgctaaaggactctccgatcctggtaagattaaacggcttcgaagccaggttcaggtgtcgctggaggactatatcaacgatcgccagtacgactctagaggcaggttcggggagttgctactgctcctgccaacccttcaatccattacttggcagatgatcgaacagatccaatttattaagctgttcggaatggccaaaatagataatttgctccaggagatgctgttaggcggttcaccgagtgacgctccccatgcccaccaccctctgcatccacacctaatgcaggaacatatggggacaaacgtaatcgtggcaaataccatgcccacgcacctcagcaacggacagatgtgcgagtggcctcggccacgcggccaagccgctactcccgaaaccccgcagccttctcccccaggcgggtccggaagcgagccttataagctgcttcccggtgcggtcgcaacaattgtgaagccattgtcagccatcccccagcctactataaccaaacaggaggttatttgaggactagtccctgttcccagagcccacttttttttctttttttgaaataaaatagcctgtctttcagatctcaaaggctcttttcagagccaccaaaaaaaaaaaaaaaaaaaaaaaaaaaaaaaaaaaaaaaaaaaaaaaaaaaaaaaaaaaaaaaaaaaaaaaaaaaaaaaaaaaaaaaaaaaaaaaaaaaaa

SEQ ID NO: 3964 - RNA, 1586 nt, synthetic construct
  misc_feature 1..1586: note = mRNA a-1 (hSL-A100) (opt3) from Homo sapiens__NP_000448.3__HNF4A(39-474)(S148A)
  source 1..1586: mol_type = other RNA
aggagagtcccgcagtcggcgtccagcggctctgcttgttcgtgtgtgtgtcgttgcaggccttattcaagcttaccatggacacctctccttcagaggggacaaacttaaatgcgccaaacagtctgggagtgagcgctctatgcgccatctgtggtgatagggcaactggcaaacactacggggcctcctcttgcgacggatgtaagggctttttccggcgctcggtacgtaaaaatcatatgtattcatgccgatttagcagacaatgtgtggtcgataaggacaaaaggaaccagtgccggtactgtcgcctcaagaagtgcttcagagctggtatgaaaaaggaagcagtgcagaatgagagggatcggattagtacccgccgatcctcttatgaagacagcgccctgccgtccataaacgcccttctgcaggccgaggttttgtcaagacaaatcacaagtcccgtgagcgggattaatggagatatcagggcgaaaaagattgcatctatcgccgacgtctgtgagtccatgaaagaacagctcctggtgctggtagagtgggctaagtacatacctgccttttgcgaactcccattagatgaccaggttgcactgcttcgggctcacgccggcgagcatttgctgctaggcgcgaccaagcgttcaatggtgttcaaagacgtcctcctgcttgggaacgattatatcgtgccccgccactgtcctgagctggccgaaatgagcagagtgagtattaggatcttggacgagctcgtcctgccatttcaggaattacaaattgatgacaatgagtacgcatacctgaaggctatcatattctttgatcccgacgccaaaggactctctgatcctggtaagattaaacggcttcgatcccaggttcaggtgagcctggaagactatatcaacgatcgccagtacgactcgagaggcaggttcggggagttgctactgctcctgccaactcttcaatctattacatggcagatgatcgagcagatccaatttattaagctgttcggaatggctaaaatagataatttgctccaggaaatgctgttaggcggttccccgtcagacgctccccatgcacaccaccctctgcatccacacctaatgcaggagcatatggggaccaacgtaatcgtggccaatacgatgcccactcacctcagtaacggacagatgtgcgaatggcctcggccacgcggccaagctgcgacccccgagacaccgcagcctagcccacccggcgggtccggatctgaaccttataagctgcttcccggtgcagtcgccactattgtgaagccattgagcgctatcccccagcctaccataacaaaacaggaggttatttgaggactagtccctgttcccagagcccacttttttttctttttttgaaataaaatagcctgtctttcagatctcaaaggctcttttcagagccaccaaaaaaaaaaaaaaaaaaaaaaaaaaaaaaaaaaaaaaaaaaaaaaaaaaaaaaaaaaaaaaaaaaaaaaaaaaaaaaaaaaaaaaaaaaaaaaaaaaaaa

SEQ ID NO: 3965 - RNA, 1586 nt, synthetic construct
  misc_feature 1..1586: note = mRNA a-1 (hSL-A100) (opt3) from Homo sapiens__NP_000448.3__HNF4A(39-474)(S148E)
  source 1..1586: mol_type = other RNA
aggagagtcccgcagtcggcgtccagcggctctgcttgttcgtgtgtgtgtcgttgcaggccttattcaagcttaccatggacacctctccttcagaggggacaaacttaaatgcgccaaacagtctgggagtgagcgctctatgcgccatctgtggtgatagggcaactggcaaacactacggggcctcctcttgcgacggatgtaagggctttttccggcgctcggtacgtaaaaatcatatgtattcatgccgatttagcagacaatgtgtggtcgataaggacaaaaggaaccagtgccggtactgtcgcctcaagaagtgcttcagagctggtatgaaaaaggaagcagtgcagaatgagagggatcggattagtacccgccgatcctcttatgaagacagcgagctgccgtccataaacgcccttctgcaggctgaggttttgtcaagacaaatcacaagtcccgtgagcgggattaatggagatatcagggccaaaaagattgcgtctatcgcagacgtctgtgaatccatgaaagagcagctcctggtgctggtagaatgggccaagtacatacctgctttttgcgagctcccattagatgaccaggttgccctgcttcgggcacacgctggcgagcatttgctgctaggcgccaccaagcgttcaatggtgttcaaagacgtcctcctgcttgggaacgattatatcgtgccccgccactgtcctgaactggcggagatgagcagagtgagtattaggatcttggacgaactcgtcctgccatttcaggagttacaaattgatgacaatgaatacgcctacctgaaggcaatcatattctttgatcccgacgctaaaggactctctgatcctggtaagattaaacggcttcgatcccaggttcaggtgagcctggaggactatatcaacgatcgccagtacgactcgagaggcaggttcggggagttgctactgctcctgccaactcttcaatctattacatggcagatgatcgaacagatccaatttattaagctgttcggaatggccaaaatagataatttgctccaggagatgctgttaggcggttccccgtcagacgctccccatgcccaccaccctctgcatccacacctaatgcaggaacatatggggaccaacgtaatcgtggcaaatacgatgcccactcacctcagtaacggacagatgtgcgagtggcctcggccacgcggccaagccgctacccccgaaacaccgcagcctagcccacccggcgggtccggatctgagccttataagctgcttcccggtgcggtcgcaactattgtgaagccattgagcgccatcccccagcctaccataacaaaacaggaggttatttgaggactagtccctgttcccagagcccacttttttttctttttttgaaataaaatagcctgtctttcagatctcaaaggctcttttcagagccaccaaaaaaaaaaaaaaaaaaaaaaaaaaaaaaaaaaaaaaaaaaaaaaaaaaaaaaaaaaaaaaaaaaaaaaaaaaaaaaaaaaaaaaaaaaaaaaaaaaaaa

SEQ ID NO: 3966 - RNA, 1586 nt, synthetic construct
  misc_feature 1..1586: note = mRNA a-1 (hSL-A100) (opt3) from Homo sapiens__NP_000448.3__HNF4A(39-474)(S183A)
  source 1..1586: mol_type = other RNA
aggagagtcccgcagtcggcgtccagcggctctgcttgttcgtgtgtgtgtcgttgcaggccttattcaagcttaccatggacacctctccttcagaggggacaaacttaaatgcgccaaacagtctgggagtgagcgctctatgcgccatctgtggtgatagggcaactggcaaacactacggggcctcctcttgcgacggatgtaagggctttttccggcgctcggtacgtaaaaatcatatgtattcatgccgatttagcagacaatgtgtggtcgataaggacaaaaggaaccagtgccggtactgtcgcctcaagaagtgcttcagagctggtatgaaaaaggaagcagtgcagaatgagagggatcggattagtacccgccgatcctcttatgaagacagctccctgccgtcaataaacgcccttctgcaggctgaggttttgagtagacaaatcacaagccccgtgtctgggattaatggagatatcagggccaaaaagattgcggcaatcgccgacgtctgtgagtccatgaaagaacagctcctggtgctggtagagtgggctaagtacatacctgccttttgcgaactcccattagatgaccaggttgcactgcttcgggctcacgccggcgagcatttgctgctaggcgcgaccaagcgttcaatggtgttcaaagacgtcctcctgcttgggaacgattatatcgtgccccgccactgtcctgagctggccgaaatgagcagagtgagtattaggatcttggacgagctcgtcctgccatttcaggaattacaaattgatgacaatgagtacgcatacctgaaggctatcatattctttgatcccgacgccaaaggactctctgatcctggtaagattaaacggcttcgatcccaggttcaggtgagcctggaagactatatcaacgatcgccagtacgactcgagaggcaggttcggggagttgctactgctcctgccaactcttcaatctattacatggcagatgatcgagcagatccaatttattaagctgttcggaatggctaaaatagataatttgctccaggaaatgctgttaggcggttccccgtcagacgcaccccatgcccaccaccctctgcatccacacctaatgcaggagcatatggggaccaacgtaatcgtggccaatacgatgcccactcacctcagtaacggacagatgtgcgaatggcctcggccacgcggccaagctgcgacccccgagacaccgcagcctagcccacccggcgggtccggatctgaaccttataagctgcttcccggtgcagtcgccactattgtgaagccattgagcgctatcccccagcctaccataacaaaacaggaggttatttgaggactagtccctgttcccagagcccacttttttttctttttttgaaataaaatagcctgtctttcagatctcaaaggctcttttcagagccaccaaaaaaaaaaaaaaaaaaaaaaaaaaaaaaaaaaaaaaaaaaaaaaaaaaaaaaaaaaaaaaaaaaaaaaaaaaaaaaaaaaaaaaaaaaaaaaaaaaaaa

SEQ ID NO: 3967 - RNA, 1586 nt, synthetic construct
  misc_feature 1..1586: note = mRNA a-1 (hSL-A100) (opt3) from Homo sapiens__NP_000448.3__HNF4A(39-474)(S183E)
  source 1..1586: mol_type = other RNA
aggagagtcccgcagtcggcgtccagcggctctgcttgttcgtgtgtgtgtcgttgcaggccttattcaagcttaccatggacacctctccttcagaggggacaaacttaaatgcgccaaacagtctgggagtgagcgctctatgcgccatctgtggtgatagggcaactggcaaacactacggggcctcctcttgcgacggatgtaagggctttttccggcgctcggtacgtaaaaatcatatgtattcatgccgatttagcagacaatgtgtggtcgataaggacaaaaggaaccagtgccggtactgtcgcctcaagaagtgcttcagagctggtatgaaaaaggaagcagtgcagaatgagagggatcggattagtacccgccgatcctcttatgaagacagctccctgccgtcaataaacgcccttctgcaggctgaggttttgagtagacaaatcacaagccccgtgtctgggattaatggagatatcagggccaaaaagattgcggagatcgcagacgtctgtgaatccatgaaagagcagctcctggtgctggtagaatgggccaagtacatacctgctttttgcgagctcccattagatgaccaggttgccctgcttcgggcacacgctggcgagcatttgctgctaggcgccaccaagcgttcaatggtgttcaaagacgtcctcctgcttgggaacgattatatcgtgccccgccactgtcctgaactggcggagatgagcagagtgagtattaggatcttggacgaactcgtcctgccatttcaggagttacaaattgatgacaatgaatacgcctacctgaaggcaatcatattctttgatcccgacgctaaaggactctctgatcctggtaagattaaacggcttcgatcccaggttcaggtgagcctggaggactatatcaacgatcgccagtacgactcgagaggcaggttcggggagttgctactgctcctgccaactcttcaatctattacatggcagatgatcgaacagatccaatttattaagctgttcggaatggccaaaatagataatttgctccaggagatgctgttaggcggttccccgtcagacgctccccatgcccaccaccctctgcatccacacctaatgcaggaacatatggggaccaacgtaatcgtggcaaatacgatgcccactcacctcagtaacggacagatgtgcgagtggcctcggccacgcggccaagccgctacccccgaaacaccgcagcctagcccacccggcgggtccggatctgagccttataagctgcttcccggtgcggtcgcaactattgtgaagccattgagcgccatcccccagcctaccataacaaaacaggaggttatttgaggactagtccctgttcccagagcccacttttttttctttttttgaaataaaatagcctgtctttcagatctcaaaggctcttttcagagccaccaaaaaaaaaaaaaaaaaaaaaaaaaaaaaaaaaaaaaaaaaaaaaaaaaaaaaaaaaaaaaaaaaaaaaaaaaaaaaaaaaaaaaaaaaaaaaaaaaaaaa

SEQ ID NO: 3968 - RNA, 1586 nt, synthetic construct
  misc_feature 1..1586: note = mRNA a-1 (hSL-A100) (opt3) from Homo sapiens__NP_000448.3__HNF4A(39-474)(S461A)
  source 1..1586: mol_type = other RNA
aggagagtcccgcagtcggcgtccagcggctctgcttgttcgtgtgtgtgtcgttgcaggccttattcaagcttaccatggacacctctccttcagaggggacaaacttaaatgcgccaaacagtctgggagtgagcgctctatgcgccatctgtggtgatagggcaactggcaaacactacggggcctcctcttgcgacggatgtaagggctttttccggcgctcggtacgtaaaaatcatatgtattcatgccgatttagcagacaatgtgtggtcgataaggacaaaaggaaccagtgccggtactgtcgcctcaagaagtgcttcagagctggtatgaaaaaggaagcagtgcagaatgagagggatcggattagtacccgccgatcctcttatgaagacagctccctgccgtcaataaacgcccttctgcaggctgaggttttgagtagacaaatcacaagccccgtgtctgggattaatggagatatcagggccaaaaagattgcgtccatcgcagacgtctgtgagtcaatgaaagaacagctcctggtgctggtagagtgggccaagtacatacctgctttttgcgaactcccattagatgaccaggttgccctgcttcgggcacacgctggcgagcatttgctgctaggcgccaccaagcgtagcatggtgttcaaagacgtcctcctgcttgggaacgattatatcgtgccccgccactgtcctgagctggcggaaatgagtagagtgtctattaggatcttggacgagctcgtcctgccatttcaggaattacaaattgatgacaatgagtacgcctacctgaaggcaatcatattctttgatcccgacgctaaaggactctccgatcctggtaagattaaacggcttcgaagccaggttcaggtgtcgctggaagactatatcaacgatcgccagtacgactctagaggcaggttcggggagttgctactgctcctgccaactcttcaatccattacatggcagatgatcgagcagatccaatttattaagctgttcggaatggccaaaatagataatttgctccaggaaatgctgttaggcggttcaccgagtgacgctccccatgcccaccaccctctgcatccacacctaatgcaggagcatatggggaccaacgtaatcgtggcaaatacgatgcccactcacctcagcaacggacagatgtgcgaatggcctcggccacgcggccaagccgctacccccgagacaccgcagccttctcccccaggcgggtccggaagcgaaccttataagctgcttcccggtgcggtcgcaactattgtgaagccattggccgctatcccccagcctaccataacaaaacaggaggttatttgaggactagtccctgttcccagagcccacttttttttctttttttgaaataaaatagcctgtctttcagatctcaaaggctcttttcagagccaccaaaaaaaaaaaaaaaaaaaaaaaaaaaaaaaaaaaaaaaaaaaaaaaaaaaaaaaaaaaaaaaaaaaaaaaaaaaaaaaaaaaaaaaaaaaaaaaaaaaaa

SEQ ID NO: 3969 - RNA, 1586 nt, synthetic construct
  misc_feature 1..1586: note = mRNA a-1 (hSL-A100) (opt3) from Homo sapiens__NP_000448.3__HNF4A(39-474)(S461E)
  source 1..1586: mol_type = other RNA
aggagagtcccgcagtcggcgtccagcggctctgcttgttcgtgtgtgtgtcgttgcaggccttattcaagcttaccatggacacctctccttcagaggggacaaacttaaatgcgccaaacagtctgggagtgagcgctctatgcgccatctgtggtgatagggcaactggcaaacactacggggcctcctcttgcgacggatgtaagggctttttccggcgctcggtacgtaaaaatcatatgtattcatgccgatttagcagacaatgtgtggtcgataaggacaaaaggaaccagtgccggtactgtcgcctcaagaagtgcttcagagctggtatgaaaaaggaagcagtgcagaatgagagggatcggattagtacccgccgatcctcttatgaagacagctccctgccgtcaataaacgcccttctgcaggctgaggttttgagtagacaaatcacaagccccgtgtctgggattaatggagatatcagggccaaaaagattgcgtccatcgcagacgtctgtgagtcaatgaaagaacagctcctggtgctggtagagtgggccaagtacatacctgctttttgcgaactcccattagatgaccaggttgccctgcttcgggcacacgctggcgagcatttgctgctaggcgccaccaagcgtagcatggtgttcaaagacgtcctcctgcttgggaacgattatatcgtgccccgccactgtcctgagctggcggaaatgagtagagtgtctattaggatcttggacgagctcgtcctgccatttcaggaattacaaattgatgacaatgagtacgcctacctgaaggcaatcatattctttgatcccgacgctaaaggactctccgatcctggtaagattaaacggcttcgaagccaggttcaggtgtcgctggaagactatatcaacgatcgccagtacgactctagaggcaggttcggggagttgctactgctcctgccaactcttcaatccattacatggcagatgatcgagcagatccaatttattaagctgttcggaatggccaaaatagataatttgctccaggaaatgctgttaggcggttcaccgagtgacgctccccatgcccaccaccctctgcatccacacctaatgcaggagcatatggggaccaacgtaatcgtggcaaatacgatgcccactcacctcagcaacggacagatgtgcgaatggcctcggccacgcggccaagccgctacccccgagacaccgcagccttctcccccaggcgggtccggaagcgaaccttataagctgcttcccggtgcggtcgcaactattgtgaagccattggaggccatcccccagcctaccataacaaaacaggaggttatttgaggactagtccctgttcccagagcccacttttttttctttttttgaaataaaatagcctgtctttcagatctcaaaggctcttttcagagccaccaaaaaaaaaaaaaaaaaaaaaaaaaaaaaaaaaaaaaaaaaaaaaaaaaaaaaaaaaaaaaaaaaaaaaaaaaaaaaaaaaaaaaaaaaaaaaaaaaaaaa

SEQ ID NO: 3970 - RNA, 1586 nt, synthetic construct
  misc_feature 1..1586: note = mRNA a-1 (hSL-A100) (opt3) from Homo sapiens__NP_000448.3__HNF4A(39-474)(S142A_S143A_S313A)
  source 1..1586: mol_type = other RNA
aggagagtcccgcagtcggcgtccagcggctctgcttgttcgtgtgtgtgtcgttgcaggccttattcaagcttaccatggacacctctccttcagaggggacaaacttaaatgcgccaaacagtctgggagtgagcgctctatgcgccatctgtggtgatagggcaactggcaaacactacggggcctcctcttgcgacggatgtaagggctttttccggcgctcggtacgtaaaaatcatatgtattcatgccgatttagcagacaatgtgtggtcgataaggacaaaaggaaccagtgccggtactgtcgcctcaagaagtgcttcagagctggtatgaaaaaggaagcagtgcagaatgagagggatcggattagtacccgccgagccgcttatgaagactcctctctgccgagcataaacgcccttctgcaggcggaggttttgtccagacaaatcacatcacccgtgagtgggattaatggagatatcagggccaaaaagattgccagcatcgctgacgtctgtgagtctatgaaagaacagctcctggtgctggtagagtgggccaagtacatacctgcattttgcgaactcccattagatgaccaggttgctctgcttcgggcccacgcgggcgagcatttgctgctaggcgccaccaagcgttccatggtgttcaaagacgtcctcctgcttgggaacgattatatcgtgccccgccactgtcctgagctggcagaaatgtcaagagtgagcattaggatcttggacgagctcgtcctgccatttcaggaattacaaattgatgacaatgagtacgcttacctgaaggccatcatattctttgatcccgacgctaaaggactcagtgatcctggtaagattaaacggcttcgagcccaggttcaggtgtctctggaagactatatcaacgatcgccagtacgactccagaggcaggttcggggagttgctactgctcctgccaactcttcaaagcattacatggcagatgatcgagcagatccaatttattaagctgttcggaatggcaaaaatagataatttgctccaggaaatgctgttaggcggttcgccgtctgacgcaccccatgctcaccaccctctgcatccacacctaatgcaggagcatatggggaccaacgtaatcgtggcgaatacgatgcccactcacctctccaacggacagatgtgcgaatggcctcggccacgcggccaagcagccacccccgagacaccgcagccttcacccccaggcgggagtggaagcgaaccttataagctgcttcccggtgctgtcgccactattgtgaagccattgtccgcaatcccccagcctaccataacaaaacaggaggttatttgaggactagtccctgttcccagagcccacttttttttctttttttgaaataaaatagcctgtctttcagatctcaaaggctcttttcagagccaccaaaaaaaaaaaaaaaaaaaaaaaaaaaaaaaaaaaaaaaaaaaaaaaaaaaaaaaaaaaaaaaaaaaaaaaaaaaaaaaaaaaaaaaaaaaaaaaaaaaaa

SEQ ID NO: 3971 - RNA, 1586 nt, synthetic construct
  misc_feature 1..1586: note = mRNA a-1 (hSL-A100) (opt3) from Homo sapiens__NP_000448.3__HNF4A(39-474)(S142A_S143A_S313A_K458R )
  source 1..1586: mol_type = other RNA
aggagagtcccgcagtcggcgtccagcggctctgcttgttcgtgtgtgtgtcgttgcaggccttattcaagcttaccatggacacctctccttcagaggggacaaacttaaatgcgccaaacagtctgggagtgagcgctctatgcgccatctgtggtgatagggcaactggcaaacactacggggcctcctcttgcgacggatgtaagggctttttccggcgctcggtacgtaaaaatcatatgtattcatgccgatttagcagacaatgtgtggtcgataaggacaaaaggaaccagtgccggtactgtcgcctcaagaagtgcttcagagctggtatgaaaaaggaagcagtgcagaatgagagggatcggattagtacccgccgagccgcttatgaagactcctctctgccgagcataaacgcccttctgcaggcggaggttttgtccagacaaatcacatcacccgtgagtgggattaatggagatatcagggccaaaaagattgccagcatcgctgacgtctgtgagtctatgaaagaacagctcctggtgctggtagagtgggccaagtacatacctgcattttgcgaactcccattagatgaccaggttgctctgcttcgggcccacgcgggcgagcatttgctgctaggcgccaccaagcgttccatggtgttcaaagacgtcctcctgcttgggaacgattatatcgtgccccgccactgtcctgagctggcagaaatgtcaagagtgagcattaggatcttggacgagctcgtcctgccatttcaggaattacaaattgatgacaatgagtacgcttacctgaaggccatcatattctttgatcccgacgctaaaggactcagtgatcctggtaagattaaacggcttcgagcccaggttcaggtgtctctggaagactatatcaacgatcgccagtacgactccagaggcaggttcggggagttgctactgctcctgccaactcttcaaagcattacatggcagatgatcgagcagatccaatttattaagctgttcggaatggcaaaaatagataatttgctccaggaaatgctgttaggcggttcgccgtctgacgcaccccatgctcaccaccctctgcatccacacctaatgcaggagcatatggggaccaacgtaatcgtggcgaatacgatgcccactcacctctccaacggacagatgtgcgaatggcctcggccacgcggccaagcagccacccccgagacaccgcagccttcacccccaggcgggagtggaagcgaaccttataagctgcttcccggtgctgtcgccactattgtgagaccattgtccgcaatcccccagcctaccataacaaagcaggaggttatttgaggactagtccctgttcccagagcccacttttttttctttttttgaaataaaatagcctgtctttcagatctcaaaggctcttttcagagccaccaaaaaaaaaaaaaaaaaaaaaaaaaaaaaaaaaaaaaaaaaaaaaaaaaaaaaaaaaaaaaaaaaaaaaaaaaaaaaaaaaaaaaaaaaaaaaaaaaaaaa

SEQ ID NO: 3972 - RNA, 1586 nt, synthetic construct
  misc_feature 1..1586: note = mRNA a-1 (hSL-A100) (opt3) from Homo sapiens__NP_000448.3__HNF4A(39-474)(S142A_S143A_S167A_S313A _S378A_T429A_T432A_S436A_K458R)
  source 1..1586: mol_type = other RNA
aggagagtcccgcagtcggcgtccagcggctctgcttgttcgtgtgtgtgtcgttgcaggccttattcaagcttaccatggacacctctccttcagaggggacaaacttaaatgcgccaaacagtctgggagtgagcgctctatgcgccatctgtggtgatagggcaactggcaaacactacggggcctcctcttgcgacggatgtaagggctttttccggcgctcggtacgtaaaaatcatatgtattcatgccgatttagcagacaatgtgtggtcgataaggacaaaaggaaccagtgccggtactgtcgcctcaagaagtgcttcagagctggtatgaaaaaggaagcagtgcagaatgagagggatcggattagtacccgccgagccgcttatgaagactcctctctgccgagcataaacgcccttctgcaggcggaggttttgtccagacaaatcacagcacccgtgtcagggattaatggagatatcagggccaaaaagattgctagtatcgccgacgtctgtgagagcatgaaagaacagctcctggtgctggtagagtgggcaaagtacatacctgctttttgcgaactcccattagatgaccaggttgccctgcttcgggcgcacgccggcgagcatttgctgctaggcgcaaccaagcgttctatggtgttcaaagacgtcctcctgcttgggaacgattatatcgtgccccgccactgtcctgagctggctgaaatgtccagagtgtcaattaggatcttggacgagctcgtcctgccatttcaggaattacaaattgatgacaatgagtacgcctacctgaaggctatcatattctttgatcccgacgccaaaggactcagcgatcctggtaagattaaacggcttcgagcacaggttcaggtgagtctggaagactatatcaacgatcgccagtacgactctagaggcaggttcggggagttgctactgctcctgccaactcttcaatccattacatggcagatgatcgagcagatccaatttattaagctgttcggaatggccaaaatagataatttgctccaggaaatgctgttaggcggtgctccgagcgacgcgccccatgcacaccaccctctgcatccacacctaatgcaggagcatatggggaccaacgtaatcgtggccaatacgatgcccactcacctctcgaacggacagatgtgcgaatggcctcggccacgcggccaagctgccgcacccgaggccccgcagcctgctcccccaggcgggtctggatccgaaccttataagctgcttcccggtgccgtcgcaaccattgtgagaccattgtcagcgatcccccagcctacaataactaagcaggaggttatttgaggactagtccctgttcccagagcccacttttttttctttttttgaaataaaatagcctgtctttcagatctcaaaggctcttttcagagccaccaaaaaaaaaaaaaaaaaaaaaaaaaaaaaaaaaaaaaaaaaaaaaaaaaaaaaaaaaaaaaaaaaaaaaaaaaaaaaaaaaaaaaaaaaaaaaaaaaaaaa

SEQ ID NO: 3973 - RNA, 1586 nt, synthetic construct
  misc_feature 1..1586: note = mRNA a-1 (hSL-A100) (opt3) from Homo sapiens__NP_000448.3__HNF4A(39-474)(S142A_S143A_S148A_S167A _S313A_S378A_T429A_T432A_S436A_K458R)
  source 1..1586: mol_type = other RNA
aggagagtcccgcagtcggcgtccagcggctctgcttgttcgtgtgtgtgtcgttgcaggccttattcaagcttaccatggacacctctccttcagaggggacaaacttaaatgcgccaaacagtctgggagtgagcgctctatgcgccatctgtggtgatagggcaactggcaaacactacggggcctcctcttgcgacggatgtaagggctttttccggcgctcggtacgtaaaaatcatatgtattcatgccgatttagcagacaatgtgtggtcgataaggacaaaaggaaccagtgccggtactgtcgcctcaagaagtgcttcagagctggtatgaaaaaggaagcagtgcagaatgagagggatcggattagtacccgccgagccgcttatgaagactccgccctgccgtctataaacgcgcttctgcaggcagaggttttgagcagacaaatcacagcccccgtgtccgggattaatggagatatcagggctaaaaagattgcctcaatcgcagacgtctgtgagagtatgaaagaacagctcctggtgctggtagagtgggctaagtacatacctgccttttgcgaactcccattagatgaccaggttgcgctgcttcgggcccacgcaggcgagcatttgctgctaggcgctaccaagcgtagcatggtgttcaaagacgtcctcctgcttgggaacgattatatcgtgccccgccactgtcctgagctggccgaaatgtctagagtgtccattaggatcttggacgagctcgtcctgccatttcaggaattacaaattgatgacaatgagtacgcttacctgaaggccatcatattctttgatcccgacgcaaaaggactctcagatcctggtaagattaaacggcttcgagcccaggttcaggtgagcctggaagactatatcaacgatcgccagtacgacagtagaggcaggttcggggagttgctactgctcctgccaactcttcaatctattacatggcagatgatcgagcagatccaatttattaagctgttcggaatggctaaaatagataatttgctccaggaaatgctgttaggcggtgcgccgtccgacgcaccccatgcccaccaccctctgcatccacacctaatgcaggagcatatggggaccaacgtaatcgtggctaatacgatgcccactcacctcagcaacggacagatgtgcgaatggcctcggccacgcggccaagccgcagcccccgaggctccgcagcctgcacccccaggcgggtcgggatctgaaccttataagctgcttcccggtgccgtcgcgaccattgtgagaccattgtccgctatcccccagcctacaataactaagcaggaggttatttgaggactagtccctgttcccagagcccacttttttttctttttttgaaataaaatagcctgtctttcagatctcaaaggctcttttcagagccaccaaaaaaaaaaaaaaaaaaaaaaaaaaaaaaaaaaaaaaaaaaaaaaaaaaaaaaaaaaaaaaaaaaaaaaaaaaaaaaaaaaaaaaaaaaaaaaaaaaaaa

SEQ ID NO: 3974 - RNA, 1586 nt, synthetic construct
  misc_feature 1..1586: note = mRNA a-1 (hSL-A100) (opt3) from Homo sapiens__NP_000448.3__HNF4A(39-474)(K106R_K108R_K126R_K127R _S142A_S143A_S148A_S167A_S313A_S378A_T429A_T432A_S436A_K458 R)
  source 1..1586: mol_type = other RNA
aggagagtcccgcagtcggcgtccagcggctctgcttgttcgtgtgtgtgtcgttgcaggccttattcaagcttaccatggacacctctccttcagaggggacaaacttaaatgcgccaaacagtctgggagtgagcgctctatgcgccatctgtggtgatagggcaactggcaaacactacggggcctcctcttgcgacggatgtaagggctttttccggcgctcggtacgtaaaaatcatatgtattcatgccgatttagcagacaatgtgtggtcgatagggaccggcgcaaccagtgcagatactgtaggctcaagaaatgcttccgggctggtatgcgccgagaagcagtgcagaatgagagagataggattagtacccggcgtgccgcttatgaagactccgccctgccgtctataaacgcgcttctgcaggcagaggttttgagccgccaaatcacagcccccgtgtccgggattaatggagatatcagagctaagaagattgcctcaatcgcagacgtctgtgagagtatgaaagaacagctcctggtgctggtagagtgggctaagtacatacctgccttttgcgaactcccattagatgaccaggttgcgctgcttagggcccacgcaggcgagcatttgctgctaggcgctaccaaacggagcatggtgttcaaggacgtcctcctgcttgggaacgattatatcgtgccccgacactgtcctgagctggccgaaatgtctcgcgtgtccattagaatcttggacgagctcgtcctgccatttcaggaattacaaattgatgacaatgagtacgcttacctgaaagccatcatattctttgatcccgacgcaaagggactctcagatcctggtaagattaaaaggcttcgggcccaggttcaggtgagcctggaagactatatcaacgatcgccagtacgacagtagaggcaggttcggggagttgctactgctcctgccaactcttcaatctattacatggcagatgatcgagcagatccaatttattaagctgttcggaatggctaaaatagataatttgctccaggaaatgctgttaggcggtgcgccgtccgacgcaccccatgcccaccaccctctgcatccacacctaatgcaggagcatatggggaccaacgtaatcgtggctaatacgatgcccactcacctcagcaacggacagatgtgcgaatggcctcgtccacggggccaagccgcagcccccgaggctccgcagcctgcacccccaggcgggtcgggatctgaaccttataagctgcttcccggtgccgtcgcgaccattgtgcgaccattgtccgctatcccccagcctacaataactaaacaggaggttatttgaggactagtccctgttcccagagcccacttttttttctttttttgaaataaaatagcctgtctttcagatctcaaaggctcttttcagagccaccaaaaaaaaaaaaaaaaaaaaaaaaaaaaaaaaaaaaaaaaaaaaaaaaaaaaaaaaaaaaaaaaaaaaaaaaaaaaaaaaaaaaaaaaaaaaaaaaaaaaa

SEQ ID NO: 3975 - RNA, 1586 nt, synthetic construct
  misc_feature 1..1586: note = mRNA a-1 (hSL-A100) (opt3) from Homo sapiens__NP_000448.3__HNF4A(39-474)(S142A_S143A_S148A_T166A _S167A_S313A_S378A_T429A_T432A_S436A_K458R)
  source 1..1586: mol_type = other RNA
aggagagtcccgcagtcggcgtccagcggctctgcttgttcgtgtgtgtgtcgttgcaggccttattcaagcttaccatggacacctctccttcagaggggacaaacttaaatgcgccaaacagtctgggagtgagcgctctatgcgccatctgtggtgatagggcaactggcaaacactacggggcctcctcttgcgacggatgtaagggctttttccggcgctcggtacgtaaaaatcatatgtattcatgccgatttagcagacaatgtgtggtcgataaggacaaaaggaaccagtgccggtactgtcgcctcaagaagtgcttcagagctggtatgaaaaaggaagcagtgcagaatgagagggatcggattagtacccgccgagccgcttatgaagactccgccctgccgtctataaacgcgcttctgcaggcagaggttttgagcagacaaatcgccgctcccgtgtccgggattaatggagatatcagggccaaaaagattgcatcaatcgctgacgtctgtgagagtatgaaagaacagctcctggtgctggtagagtgggccaagtacatacctgcgttttgcgaactcccattagatgaccaggttgccctgcttcgggcacacgctggcgagcatttgctgctaggcgccacaaagcgtagcatggtgttcaaagacgtcctcctgcttgggaacgattatatcgtgccccgccactgtcctgagctggctgaaatgtctagagtgtccattaggatcttggacgagctcgtcctgccatttcaggaattacaaattgatgacaatgagtacgcctacctgaaggcaatcatattctttgatcccgacgccaaaggactctcagatcctggtaagattaaacggcttcgagctcaggttcaggtgagcctggaagactatatcaacgatcgccagtacgacagtagaggcaggttcggggagttgctactgctcctgccaacccttcaatctattacttggcagatgatcgagcagatccaatttattaagctgttcggaatggcgaaaatagataatttgctccaggaaatgctgttaggcggtgcaccgtccgacgctccccatgcccaccaccctctgcatccacacctaatgcaggagcatatggggacaaacgtaatcgtggccaataccatgcccacgcacctcagcaacggacagatgtgcgaatggcctcggccacgcggccaagcagccgctcccgaggccccgcagcctgcacccccaggcgggtcgggatctgaaccttataagctgcttcccggtgcggtcgctactattgtgagaccattgtccgccatcccccagcctaccataacaaagcaggaggttatttgaggactagtccctgttcccagagcccacttttttttctttttttgaaataaaatagcctgtctttcagatctcaaaggctcttttcagagccaccaaaaaaaaaaaaaaaaaaaaaaaaaaaaaaaaaaaaaaaaaaaaaaaaaaaaaaaaaaaaaaaaaaaaaaaaaaaaaaaaaaaaaaaaaaaaaaaaaaaaa

SEQ ID NO: 3976 - RNA, 1586 nt, synthetic construct
  misc_feature 1..1586: note = mRNA a-1 (hSL-A100) (opt3) from Homo sapiens__NP_000448.3__HNF4A(39-474)(S87A_S142A_S143A_S148A_ T166A_S167A_S313A_S378A_T429A_T432A_S436A_K458R)
  source 1..1586: mol_type = other RNA
aggagagtcccgcagtcggcgtccagcggctctgcttgttcgtgtgtgtgtcgttgcaggccttattcaagcttaccatggacacctctccttcagaggggacaaacttaaatgcgccaaacagtctgggagtgagcgctctatgcgccatctgtggtgatagggcaactggcaaacactacggggcctcctcttgcgacggatgtaagggctttttccggcgcgctgtacgtaaaaatcatatgtattcgtgccgattttcaagacaatgtgtggtcgataaggacaaaaggaaccagtgccggtactgtcgcctcaagaagtgcttcagagcaggtatgaaaaaggaagccgtgcagaatgagagggatcggattagcacccgccgagctgcctatgaagacagtgcgctgccgtccataaacgcacttctgcaggccgaggttttgtctagacaaatcgctgcccccgtgagcgggattaatggagatatcagggctaaaaagattgcatccatcgccgacgtctgtgagtcaatgaaagaacagctcctggtgctggtagagtgggcgaagtacatacctgccttttgcgaactcccattagatgaccaggttgcactgcttcgggctcacgccggcgagcatttgctgctaggcgctacaaagcgtagtatggtgttcaaagacgtcctcctgcttgggaacgattatatcgtgccccgccactgtcctgagctggccgaaatgagcagagtgtctattaggatcttggacgagctcgtcctgccatttcaggaattacaaattgatgacaatgagtacgcatacctgaaggccatcatattctttgatcccgacgctaaaggactctccgatcctggtaagattaaacggcttcgagcgcaggttcaggtgtcactggaagactatatcaacgatcgccagtacgacagcagaggcaggttcggggagttgctactgctcctgccaacccttcaaagtattacttggcagatgatcgagcagatccaatttattaagctgttcggaatggcaaaaatagataatttgctccaggaaatgctgttaggcggtgccccgtctgacgctccccatgcccaccaccctctgcatccacacctaatgcaggagcatatggggacaaacgtaatcgtggcaaataccatgcccacgcacctctccaacggacagatgtgcgaatggcctcggccacgcggccaagccgctgcccccgaggcaccgcagcctgcgcccccaggcgggagcggatcggaaccttataagctgcttcccggtgctgtcgccactattgtgagaccattgtctgcaatcccccagcctaccataacaaagcaggaggttatttgaggactagtccctgttcccagagcccacttttttttctttttttgaaataaaatagcctgtctttcagatctcaaaggctcttttcagagccaccaaaaaaaaaaaaaaaaaaaaaaaaaaaaaaaaaaaaaaaaaaaaaaaaaaaaaaaaaaaaaaaaaaaaaaaaaaaaaaaaaaaaaaaaaaaaaaaaaaaaa

SEQ ID NO: 3977 - RNA, 1586 nt, synthetic construct
  misc_feature 1..1586: note = mRNA a-1 (hSL-A100) (opt3) from Homo sapiens__NP_000448.3__HNF4A(39-474)(S87A_K106R_K108R_K126R_ K127R_S142A_S143A_S148A_T166A_S167A_S313A_S378A_T429A_T432A _S436A_K458R)
  source 1..1586: mol_type = other RNA
aggagagtcccgcagtcggcgtccagcggctctgcttgttcgtgtgtgtgtcgttgcaggccttattcaagcttaccatggacacctctccttcagaggggacaaacttaaatgcgccaaacagtctgggagtgagcgctctatgcgccatctgtggtgatagggcaactggcaaacactacggggcctcctcttgcgacggatgtaagggctttttccggcgcgctgtacgtaaaaatcatatgtattcgtgccgattttcaagacaatgtgtggtcgatagggaccggcgcaaccagtgcagatactgtaggctcaagaaatgcttccgggcaggtatgcgccgagaagccgtgcagaatgagagagataggattagcacccggcgtgctgcctatgaagacagtgcgctgccgtccataaacgcacttctgcaggccgaggttttgtctcgccaaatcgctgcccccgtgagcgggattaatggagatatcagagcaaagaagattgcttccatcgccgacgtctgtgagtcaatgaaagaacagctcctggtgctggtagagtgggcgaagtacatacctgccttttgcgaactcccattagatgaccaggttgcactgcttagggctcacgccggcgagcatttgctgctaggcgctacaaaacggagtatggtgttcaaggacgtcctcctgcttgggaacgattatatcgtgccccgacactgtcctgagctggccgaaatgagccgcgtgtctattagaatcttggacgagctcgtcctgccatttcaggaattacaaattgatgacaatgagtacgcatacctgaaagccatcatattctttgatcccgacgctaagggactctccgatcctggtaagattaaaaggcttcgggcgcaggttcaggtgtcactggaagactatatcaacgatcgccagtacgacagcagaggcaggttcggggagttgctactgctcctgccaacccttcaaagtattacttggcagatgatcgagcagatccaatttattaagctgttcggaatggcaaaaatagataatttgctccaggaaatgctgttaggcggtgccccgtctgacgctccccatgcccaccaccctctgcatccacacctaatgcaggagcatatggggacaaacgtaatcgtggcaaataccatgcccacgcacctctccaacggacagatgtgcgaatggcctcgtccacggggccaagccgctgcccccgaggcaccgcagcctgcgcccccaggcgggagcggatcggaaccttataagctgcttcccggtgctgtcgccactattgtgcgaccattgtctgcaatcccccagcctaccataacaaaacaggaggttatttgaggactagtccctgttcccagagcccacttttttttctttttttgaaataaaatagcctgtctttcagatctcaaaggctcttttcagagccaccaaaaaaaaaaaaaaaaaaaaaaaaaaaaaaaaaaaaaaaaaaaaaaaaaaaaaaaaaaaaaaaaaaaaaaaaaaaaaaaaaaaaaaaaaaaaaaaaaaaaa

SEQ ID NO: 3978 - RNA, 1586 nt, synthetic construct
  misc_feature 1..1586: note = mRNA a-1 (hSL-A100) (opt3) from Homo sapiens__NP_000448.3__HNF4A(39-474)(S87A_K106R_K108R_K126R_ K127R)
  source 1..1586: mol_type = other RNA
aggagagtcccgcagtcggcgtccagcggctctgcttgttcgtgtgtgtgtcgttgcaggccttattcaagcttaccatggacacctctccttcagaggggacaaacttaaatgcgccaaacagtctgggagtgagcgctctatgcgccatctgtggtgatagggcaactggcaaacactacggggcctcctcttgcgacggatgtaagggctttttccggcgcgctgtacgtaaaaatcatatgtattcgtgccgattttcaagacaatgtgtggtcgatagggaccggcgcaaccagtgcagatactgtaggctcaagaaatgcttccgggcaggtatgcgccgagaagccgtgcagaatgagagagataggattagcacccggcgtagttcctatgaagactctagcctgccgtccataaacgcccttctgcaggccgaggttttgtcacgccaaatcacaagtcccgtgagcgggattaatggagatatcagagcgaagaagattgcatctatcgccgacgtctgtgagtccatgaaagaacagctcctggtgctggtagagtgggctaagtacatacctgccttttgcgaactcccattagatgaccaggttgcactgcttagggctcacgccggcgagcatttgctgctaggcgcgaccaaacggtcaatggtgttcaaggacgtcctcctgcttgggaacgattatatcgtgccccgacactgtcctgagctggccgaaatgagccgcgtgagtattagaatcttggacgagctcgtcctgccatttcaggaattacaaattgatgacaatgagtacgcatacctgaaagctatcatattctttgatcccgacgccaagggactctctgatcctggtaagattaaaaggcttcggtcccaggttcaggtgagcctggaagactatatcaacgatcgccagtacgactcgagaggcaggttcggggagttgctactgctcctgccaactcttcaatctattacatggcagatgatcgagcagatccaatttattaagctgttcggaatggctaaaatagataatttgctccaggaaatgctgttaggcggttccccgtcagacgctccccatgcacaccaccctctgcatccacacctaatgcaggagcatatggggaccaacgtaatcgtggccaatacgatgcccactcacctcagtaacggacagatgtgcgaatggcctcgtccacggggccaagctgcgacccccgagacaccgcagcctagcccacccggcgggtccggatctgaaccttataagctgcttcccggtgcagtcgccactattgtgaaaccattgagcgctatcccccagcctaccataacaaagcaggaggttatttgaggactagtccctgttcccagagcccacttttttttctttttttgaaataaaatagcctgtctttcagatctcaaaggctcttttcagagccaccaaaaaaaaaaaaaaaaaaaaaaaaaaaaaaaaaaaaaaaaaaaaaaaaaaaaaaaaaaaaaaaaaaaaaaaaaaaaaaaaaaaaaaaaaaaaaaaaaaaaa

SEQ ID NO: 3979 - RNA, 1586 nt, synthetic construct
  misc_feature 1..1586: note = mRNA a-1 (hSL-A100) (opt3) from Homo sapiens__NP_000448.3__HNF4A(39-474)(S87A_K106R_K108R_K126R_ K127R_S142A_S143A_S148A_T166A_S167A_S313A_S378A_T429A_T432A _S436A_K458R_S461A)
  source 1..1586: mol_type = other RNA
aggagagtcccgcagtcggcgtccagcggctctgcttgttcgtgtgtgtgtcgttgcaggccttattcaagcttaccatggacacctctccttcagaggggacaaacttaaatgcgccaaacagtctgggagtgagcgctctatgcgccatctgtggtgatagggcaactggcaaacactacggggcctcctcttgcgacggatgtaagggctttttccggcgcgctgtacgtaaaaatcatatgtattcgtgccgattttcaagacaatgtgtggtcgatagggaccggcgcaaccagtgcagatactgtaggctcaagaaatgcttccgggcaggtatgcgccgagaagccgtgcagaatgagagagataggattagcacccggcgtgctgcctatgaagacagtgcgctgccgtccataaacgcacttctgcaggccgaggttttgtctcgccaaatcgctgcccccgtgagcgggattaatggagatatcagagcaaagaagattgcttccatcgccgacgtctgtgagtcaatgaaagaacagctcctggtgctggtagagtgggcgaagtacatacctgccttttgcgaactcccattagatgaccaggttgcactgcttagggctcacgccggcgagcatttgctgctaggcgctacaaaacggagtatggtgttcaaggacgtcctcctgcttgggaacgattatatcgtgccccgacactgtcctgagctggccgaaatgagccgcgtgtctattagaatcttggacgagctcgtcctgccatttcaggaattacaaattgatgacaatgagtacgcatacctgaaagccatcatattctttgatcccgacgctaagggactctccgatcctggtaagattaaaaggcttcgggcgcaggttcaggtgtcactggaagactatatcaacgatcgccagtacgacagcagaggcaggttcggggagttgctactgctcctgccaacccttcaaagtattacttggcagatgatcgagcagatccaatttattaagctgttcggaatggcaaaaatagataatttgctccaggaaatgctgttaggcggtgccccgtctgacgctccccatgcccaccaccctctgcatccacacctaatgcaggagcatatggggacaaacgtaatcgtggcaaataccatgcccacgcacctctccaacggacagatgtgcgaatggcctcgtccacggggccaagccgctgcccccgaggcaccgcagcctgcgcccccaggcgggagcggatcggaaccttataagctgcttcccggtgctgtcgccactattgtgcgaccattggcagccatcccccagcctaccataacaaaacaggaggttatttgaggactagtccctgttcccagagcccacttttttttctttttttgaaataaaatagcctgtctttcagatctcaaaggctcttttcagagccaccaaaaaaaaaaaaaaaaaaaaaaaaaaaaaaaaaaaaaaaaaaaaaaaaaaaaaaaaaaaaaaaaaaaaaaaaaaaaaaaaaaaaaaaaaaaaaaaaaaaaa

SEQ ID NO: 3980 - RNA, 1586 nt, synthetic construct
  misc_feature 1..1586: note = mRNA a-1 (hSL-A100) (opt3) from Homo sapiens__NP_000448.3__HNF4A(39-474)(S87A_K106R_K108R_K126R_ K127R_S142A_S143A_S148A_T166A_S167A_S313A_S378A_T429A_T432A _S436A_K458R_S461E)
  source 1..1586: mol_type = other RNA
aggagagtcccgcagtcggcgtccagcggctctgcttgttcgtgtgtgtgtcgttgcaggccttattcaagcttaccatggacacctctccttcagaggggacaaacttaaatgcgccaaacagtctgggagtgagcgctctatgcgccatctgtggtgatagggcaactggcaaacactacggggcctcctcttgcgacggatgtaagggctttttccggcgcgctgtacgtaaaaatcatatgtattcgtgccgattttcaagacaatgtgtggtcgatagggaccggcgcaaccagtgcagatactgtaggctcaagaaatgcttccgggcaggtatgcgccgagaagccgtgcagaatgagagagataggattagcacccggcgtgctgcctatgaagacagtgcgctgccgtccataaacgcacttctgcaggccgaggttttgtctcgccaaatcgctgcccccgtgagcgggattaatggagatatcagagcaaagaagattgcttccatcgccgacgtctgtgagtcaatgaaagaacagctcctggtgctggtagagtgggcgaagtacatacctgccttttgcgaactcccattagatgaccaggttgcactgcttagggctcacgccggcgagcatttgctgctaggcgctacaaaacggagtatggtgttcaaggacgtcctcctgcttgggaacgattatatcgtgccccgacactgtcctgagctggccgaaatgagccgcgtgtctattagaatcttggacgagctcgtcctgccatttcaggaattacaaattgatgacaatgagtacgcatacctgaaagccatcatattctttgatcccgacgctaagggactctccgatcctggtaagattaaaaggcttcgggcgcaggttcaggtgtcactggaagactatatcaacgatcgccagtacgacagcagaggcaggttcggggagttgctactgctcctgccaacccttcaaagtattacttggcagatgatcgagcagatccaatttattaagctgttcggaatggcaaaaatagataatttgctccaggaaatgctgttaggcggtgccccgtctgacgctccccatgcccaccaccctctgcatccacacctaatgcaggagcatatggggacaaacgtaatcgtggcaaataccatgcccacgcacctctccaacggacagatgtgcgaatggcctcgtccacggggccaagccgctgcccccgaggcaccgcagcctgcgcccccaggcgggagcggatcggaaccttataagctgcttcccggtgctgtcgccactattgtgcgaccattggaggcaatcccccagcctaccataacaaaacaggaggttatttgaggactagtccctgttcccagagcccacttttttttctttttttgaaataaaatagcctgtctttcagatctcaaaggctcttttcagagccaccaaaaaaaaaaaaaaaaaaaaaaaaaaaaaaaaaaaaaaaaaaaaaaaaaaaaaaaaaaaaaaaaaaaaaaaaaaaaaaaaaaaaaaaaaaaaaaaaaaaaa

SEQ ID NO: 3981 - RNA, 1586 nt, synthetic construct
  misc_feature 1..1586: note = mRNA a-1 (hSL-A100) (opt3) from Homo sapiens__NP_000448.3__HNF4A(39-474)(S87A_K106R_K108R_K126R_ K127R_S142A_S143A_S148E_T166A_S167E_S313A_S378E_T429E_T432E _S436E_K458R_S461E)
  source 1..1586: mol_type = other RNA
aggagagtcccgcagtcggcgtccagcggctctgcttgttcgtgtgtgtgtcgttgcaggccttattcaagcttaccatggacacctctccttcagaggggacaaacttaaatgcgccaaacagtctgggagtgagcgctctatgcgccatctgtggtgatagggcaactggcaaacactacggggcctcctcttgcgacggatgtaagggctttttccggcgcgctgtacgtaaaaatcatatgtattcgtgccgattttcaagacaatgtgtggtcgatagggaccggcgcaaccagtgcagatactgtaggctcaagaaatgcttccgggcaggtatgcgccgagaagccgtgcagaatgagagagataggattagcacccggcgtgctgcctatgaagacagtgagctgccgtccataaacgcgcttctgcaggcagaggttttgtctcgccaaatcgccgaacccgtgagcgggattaatggagatatcagagctaagaagattgcctccatcgcagacgtctgtgagtcaatgaaagaacagctcctggtgctggtagagtgggctaagtacatacctgccttttgcgagctcccattagatgaccaggttgcgctgcttagggcccacgcaggcgaacatttgctgctaggcgctacaaaacggagtatggtgttcaaggacgtcctcctgcttgggaacgattatatcgtgccccgacactgtcctgagctggccgaaatgagccgcgtgtctattagaatcttggacgagctcgtcctgccatttcaggaattacaaattgatgacaatgagtacgcttacctgaaagccatcatattctttgatcccgacgcaaagggactctccgatcctggtaagattaaaaggcttcgggcccaggttcaggtgtcactggaggactatatcaacgatcgccagtacgacagcagaggcaggttcggggaattgctactgctcctgccaacccttcaaagtattacttggcagatgatcgagcagatccaatttattaagctgttcggaatggctaaaatagataatttgctccaggaaatgctgttaggcggtgagccgtctgacgcgccccatgcacaccaccctctgcatccacacctaatgcaggaacatatggggacaaacgtaatcgtggccaataccatgcccacgcacctctccaacggacagatgtgcgagtggcctcgtccacggggccaagctgccgagcccgaggaaccgcagcctgaacccccaggcgggagcggatcggagccttataagctgcttcccggtgcagtcgccactattgtgcgaccattggaagctatcccccagcctaccataacaaaacaggaggttatttgaggactagtccctgttcccagagcccacttttttttctttttttgaaataaaatagcctgtctttcagatctcaaaggctcttttcagagccaccaaaaaaaaaaaaaaaaaaaaaaaaaaaaaaaaaaaaaaaaaaaaaaaaaaaaaaaaaaaaaaaaaaaaaaaaaaaaaaaaaaaaaaaaaaaaaaaaaaaaa

SEQ ID NO: 3982 - RNA, 1586 nt, synthetic construct
  misc_feature 1..1586: note = mRNA a-1 (hSL-A100) (opt3) from Homo sapiens__NP_000448.3__HNF4A(39-474)(S87A_K106R_K108R_K126R_ K127R_S142A_S143A_S148A_T166A_S167A_K179R_K180R_S313A_S378A _T429A_T432A_S436A_K458R_S461E)
  source 1..1586: mol_type = other RNA
aggagagtcccgcagtcggcgtccagcggctctgcttgttcgtgtgtgtgtcgttgcaggccttattcaagcttaccatggacacctctccttcagaggggacaaacttaaatgcgccaaacagtctgggagtgagcgctctatgcgccatctgtggtgatagggcaactggcaaacactacggggcctcctcttgcgacggatgtaagggctttttccggcgcgctgtacgtaaaaatcatatgtattcgtgccgattttcaagacaatgtgtggtcgatagggaccggcgcaaccagtgcagatactgtaggctcaagaaatgcttccgggcaggtatgcgccgagaagccgtgcagaatgagagagataggattagcacccggcgtgctgcctatgaagacagtgcgctgccgtccataaacgcacttctgcaggccgaggttttgtctcgccaaatcgctgcccccgtgagcgggattaatggagatatcagagcaaggcggattgcttccatcgccgacgtctgtgagtcaatgaaggaacagctcctggtgctggtagagtgggcgaagtacatacctgccttttgcgaactcccattagatgaccaggttgcactgcttcgagctcacgccggcgagcatttgctgctaggcgctacaaaacgcagtatggtgttcaaggacgtcctcctgcttgggaacgattatatcgtgcccagacactgtcctgagctggccgaaatgagcagggtgtctattcggatcttggacgagctcgtcctgccatttcaggaattacaaattgatgacaatgagtacgcatacctgaaagccatcatattctttgatcccgacgctaagggactctccgatcctggtaaaattaagcgccttagagcgcaggttcaggtgtcactggaagactatatcaacgataggcagtacgacagccgtggccggttcggggagttgctactgctcctgccaacccttcaaagtattacttggcagatgatcgagcagatccaatttattaagctgttcggaatggcaaaaatagataatttgctccaggaaatgctgttaggcggtgccccgtctgacgctccccatgcccaccaccctctgcatccacacctaatgcaggagcatatggggacaaacgtaatcgtggcaaataccatgcccacgcacctctccaacggacagatgtgcgaatggcctcgaccaagaggccaagccgctgcccccgaggcaccgcagcctgcgcccccaggcgggagcggatcggaaccttataagctgcttcccggtgctgtcgccactattgtgaggccattggaggcaatcccccagcctaccataacaaaacaggaggttatttgaggactagtccctgttcccagagcccacttttttttctttttttgaaataaaatagcctgtctttcagatctcaaaggctcttttcagagccaccaaaaaaaaaaaaaaaaaaaaaaaaaaaaaaaaaaaaaaaaaaaaaaaaaaaaaaaaaaaaaaaaaaaaaaaaaaaaaaaaaaaaaaaaaaaaaaaaaaaaa

SEQ ID NO: 3983 - RNA, 1586 nt, synthetic construct
  misc_feature 1..1586: note = mRNA a-1 (hSL-A100) (opt3) from Homo sapiens__NP_000448.3__HNF4A(39-474)(S87A_K106R_K108R_K126R_ K127R_S142A_S143A_S148A_T166A_S167A_K300R_K307R_K309R_S313A _S378A_T429A_T432A_S436A_K458R_S461E)
  source 1..1586: mol_type = other RNA
aggagagtcccgcagtcggcgtccagcggctctgcttgttcgtgtgtgtgtcgttgcaggccttattcaagcttaccatggacacctctccttcagaggggacaaacttaaatgcgccaaacagtctgggagtgagcgctctatgcgccatctgtggtgatagggcaactggcaaacactacggggcctcctcttgcgacggatgtaagggctttttccggcgcgctgtacgtaaaaatcatatgtattcgtgccgattttcaagacaatgtgtggtcgatagggaccggcgcaaccagtgcagatactgtaggctcaagaaatgcttccgggcaggtatgcgccgagaagccgtgcagaatgagagagataggattagcacccggcgtgctgcctatgaagacagtgcgctgccgtccataaacgcacttctgcaggccgaggttttgtctcgccaaatcgctgcccccgtgagcgggattaatggagatatcagagcaaagaagattgcttccatcgccgacgtctgtgagtcaatgaaagaacagctcctggtgctggtagagtgggcgaagtacatacctgccttttgcgaactcccattagatgaccaggttgcactgcttagggctcacgccggcgagcatttgctgctaggcgctacaaaacggagtatggtgttcaaggacgtcctcctgcttgggaacgattatatcgtgccccgacactgtcctgagctggccgaaatgagccgcgtgtctattagaatcttggacgagctcgtcctgccatttcaggaattacaaattgatgacaatgagtacgcatacctgaaagccatcatattctttgatcccgacgctaggggactctccgatcctggtcggattcgcagacttagggcgcaggttcaggtgtcactggaagactatatcaacgatcgtcagtacgacagccggggccgattcggggagttgctactgctcctgccaacccttcaaagtattacttggcagatgatcgagcagatccaatttattaagctgttcggaatggcaaagatagataatttgctccaggaaatgctgttaggcggtgccccgtctgacgctccccatgcccaccaccctctgcatccacacctaatgcaggagcatatggggacaaacgtaatcgtggcaaataccatgcccacgcacctctccaacggacagatgtgcgaatggcctagaccaaggggccaagccgctgcccccgaggcaccgcagcctgcgcccccaggcgggagcggatcggaaccttataaactgcttcccggtgctgtcgccactattgtgcgcccattggaggcaatcccccagcctaccataacaaagcaggaggttatttgaggactagtccctgttcccagagcccacttttttttctttttttgaaataaaatagcctgtctttcagatctcaaaggctcttttcagagccaccaaaaaaaaaaaaaaaaaaaaaaaaaaaaaaaaaaaaaaaaaaaaaaaaaaaaaaaaaaaaaaaaaaaaaaaaaaaaaaaaaaaaaaaaaaaaaaaaaaaaa

SEQ ID NO: 3984 - RNA, 1586 nt, synthetic construct
  misc_feature 1..1586: note = mRNA a-1 (hSL-A100) (opt3) from Homo sapiens__NP_000448.3__HNF4A(39-474)(S87A_K106R_K108R_K126R_ K127R_S142A_S143A_S148A_T166A_S167A_S313A_S378A_T429A_T432A _S436A_K447R_K458R_S461E_K470R)
  source 1..1586: mol_type = other RNA
aggagagtcccgcagtcggcgtccagcggctctgcttgttcgtgtgtgtgtcgttgcaggccttattcaagcttaccatggacacctctccttcagaggggacaaacttaaatgcgccaaacagtctgggagtgagcgctctatgcgccatctgtggtgatagggcaactggcaaacactacggggcctcctcttgcgacggatgtaagggctttttccggcgcgctgtacgtaaaaatcatatgtattcgtgccgattttcaagacaatgtgtggtcgatagggaccggcgcaaccagtgcagatactgtaggctcaagaaatgcttccgggcaggtatgcgccgagaagccgtgcagaatgagagagataggattagcacccggcgtgctgcctatgaagacagtgcgctgccgtccataaacgcacttctgcaggccgaggttttgtctcgccaaatcgctgcccccgtgagcgggattaatggagatatcagagcaaagaagattgcttccatcgccgacgtctgtgagtcaatgaaagaacagctcctggtgctggtagagtgggcgaagtacatacctgccttttgcgaactcccattagatgaccaggttgcactgcttagggctcacgccggcgagcatttgctgctaggcgctacaaaacggagtatggtgttcaaggacgtcctcctgcttgggaacgattatatcgtgccccgacactgtcctgagctggccgaaatgagccgcgtgtctattagaatcttggacgagctcgtcctgccatttcaggaattacaaattgatgacaatgagtacgcatacctgaaagccatcatattctttgatcccgacgctaagggactctccgatcctggtaagattaaaaggcttcgggcgcaggttcaggtgtcactggaagactatatcaacgatcgccagtacgacagcagaggcaggttcggggagttgctactgctcctgccaacccttcaaagtattacttggcagatgatcgagcagatccaatttattaagctgttcggaatggcaaaaatagataatttgctccaggaaatgctgttaggcggtgccccgtctgacgctccccatgcccaccaccctctgcatccacacctaatgcaggagcatatggggacaaacgtaatcgtggcaaataccatgcccacgcacctctccaacggacagatgtgcgaatggcctcgtccacggggccaagccgctgcccccgaggcaccgcagcctgcgcccccaggcgggagcggatcggaaccttatcgactgcttcccggtgctgtcgccactattgtgagaccattggaggcaatcccccagcctaccataacaaggcaggaggttatttgaggactagtccctgttcccagagcccacttttttttctttttttgaaataaaatagcctgtctttcagatctcaaaggctcttttcagagccaccaaaaaaaaaaaaaaaaaaaaaaaaaaaaaaaaaaaaaaaaaaaaaaaaaaaaaaaaaaaaaaaaaaaaaaaaaaaaaaaaaaaaaaaaaaaaaaaaaaaaa

SEQ ID NO: 3985 - RNA, 1586 nt, synthetic construct
  misc_feature 1..1586: note = mRNA a-1 (hSL-A100) (opt3) from Homo sapiens__NP_000448.3__HNF4A(39-474)(S87A_K106R_K108R_K126R_ K127R_S142A_S143A_S148A_T166A_S167A_K179R_K180R_K234R_K300R _K307R_K309R_S313A_S378A_T429A_T432A_S436A_K447R_K458R_S461 E_K470R)
  source 1..1586: mol_type = other RNA
aggagagtcccgcagtcggcgtccagcggctctgcttgttcgtgtgtgtgtcgttgcaggccttattcaagcttaccatggacacctctccttcagaggggacaaacttaaatgcgccaaacagtctgggagtgagcgctctatgcgccatctgtggtgatagggcaactggcaaacactacggggcctcctcttgcgacggatgtaagggctttttccggcgcgctgtacgtaaaaatcatatgtattcgtgccgattttcaagacaatgtgtggtcgatagggaccggcgcaaccagtgcagatactgtaggctcaagaaatgcttccgggcaggtatgcgccgagaagccgtgcagaatgagagagataggattagcacccggcgtgctgcctatgaagacagtgcgctgccgtccataaacgcacttctgcaggccgaggttttgtctcgccaaatcgctgcccccgtgagcgggattaatggagatatcagagcaaggcggattgcttccatcgccgacgtctgtgagtcaatgaaggaacagctcctggtgctggtagagtgggcgaagtacatacctgccttttgcgaactcccattagatgaccaggttgcactgcttcgagctcacgccggcgagcatttgctgctaggcgctacacgcagaagtatggtgttcaaagacgtcctcctgcttgggaacgattatatcgtgcccaggcactgtcctgagctggccgaaatgagccgggtgtctattcgcatcttggacgagctcgtcctgccatttcaggaattacaaattgatgacaatgagtacgcatacctgaaggccatcatattctttgatcccgacgctagaggactctccgatcctggtaggattcgtcggcttcgagcgcaggttcaggtgtcactggaagactatatcaacgatagacagtacgacagcaggggccgcttcggggagttgctactgctcctgccaacccttcaaagtattacttggcagatgatcgagcagatccaatttattaaactgttcggaatggcaaagatagataatttgctccaggaaatgctgttaggcggtgccccgtctgacgctccccatgcccaccaccctctgcatccacacctaatgcaggagcatatggggacaaacgtaatcgtggcaaataccatgcccacgcacctctccaacggacagatgtgcgaatggcctcggccaagaggccaagccgctgcccccgaggcaccgcagcctgcgcccccaggcgggagcggatcggaaccttataggctgcttcccggtgctgtcgccactattgtgcgcccattggaggcaatcccccagcctaccataacacgacaggaggttatttgaggactagtccctgttcccagagcccacttttttttctttttttgaaataaaatagcctgtctttcagatctcaaaggctcttttcagagccaccaaaaaaaaaaaaaaaaaaaaaaaaaaaaaaaaaaaaaaaaaaaaaaaaaaaaaaaaaaaaaaaaaaaaaaaaaaaaaaaaaaaaaaaaaaaaaaaaaaaaa

SEQ ID NO: 3986 - RNA, 1586 nt, synthetic construct
  misc_feature 1..1586: note = mRNA a-1 (hSL-A100) (opt3) from Homo sapiens__NP_000448.3__HNF4A(39-474)(S87A_S95A_S99A_K106R_K1 08R_K126R_K127R_S142A_S143A_S148A_T166A_S167A_S313A_S378A_T 429A_T432A_S436A_K458R_S461E)
  source 1..1586: mol_type = other RNA
aggagagtcccgcagtcggcgtccagcggctctgcttgttcgtgtgtgtgtcgttgcaggccttattcaagcttaccatggacacctctccttcagaggggacaaacttaaatgcgccaaacagtctgggagtgagcgctctatgcgccatctgtggtgatagggcaactggcaaacactacggggcctcctcttgcgacggatgtaagggctttttccggcgcgctgtacgtaaaaatcatatgtatgcatgccgatttgccagacaatgtgtggtcgatagggaccggcgcaaccagtgcagatactgtaggctcaagaaatgcttccgggctggtatgcgccgagaagccgtgcagaatgagagagataggatttcgacccggcgtgcggcatatgaagactcagccctgccgagcataaacgcccttctgcaggccgaggttttgagtcgccaaatcgcagctcccgtgtccgggattaatggagatatcagagccaagaagattgcgtctatcgccgacgtctgtgagagcatgaaagaacagctcctggtgctggtagagtgggcaaagtacatacctgctttttgcgaactcccattagatgaccaggttgccctgcttagggctcacgccggcgagcatttgctgctaggcgcaacaaaacggtccatggtgttcaaggacgtcctcctgcttgggaacgattatatcgtgccccgacactgtcctgagctggccgaaatgtcacgcgtgagtattagaatcttggacgagctcgtcctgccatttcaggaattacaaattgatgacaatgagtacgcttacctgaaagcgatcatattctttgatcccgacgcaaagggactcagcgatcctggtaagattaaaaggcttcgggcccaggttcaggtgtctctggaagactatatcaacgatcgccagtacgactccagaggcaggttcggggagttgctactgctcctgccaacccttcaatcaattacttggcagatgatcgagcagatccaatttattaagctgttcggaatggctaaaatagataatttgctccaggaaatgctgttaggcggtgccccgagcgacgcaccccatgcccaccaccctctgcatccacacctaatgcaggagcatatggggacaaacgtaatcgtggctaataccatgcccacgcacctcagtaacggacagatgtgcgaatggcctcgtccacggggccaagccgcagcgcccgaggctccgcagcctgctcccccaggcgggtctggatccgaaccttataagctgcttcccggtgcagtcgccactattgtgcgaccattggaggctatcccccagcctaccataacaaaacaggaggttatttgaggactagtccctgttcccagagcccacttttttttctttttttgaaataaaatagcctgtctttcagatctcaaaggctcttttcagagccaccaaaaaaaaaaaaaaaaaaaaaaaaaaaaaaaaaaaaaaaaaaaaaaaaaaaaaaaaaaaaaaaaaaaaaaaaaaaaaaaaaaaaaaaaaaaaaaaaaaaaa

SEQ ID NO: 3987 - RNA, 1586 nt, synthetic construct
  misc_feature 1..1586: note = mRNA a-1 (hSL-A100) (opt3) from Homo sapiens__NP_000448.3__HNF4A(39-474)(S87A_K106R_K108R_K126R_ K127R_S138A_T139A_S142A_S143A_S148A_T166A_S167A_S313A_S378A _T429A_T432A_S436A_K458R_S461E)
  source 1..1586: mol_type = other RNA
aggagagtcccgcagtcggcgtccagcggctctgcttgttcgtgtgtgtgtcgttgcaggccttattcaagcttaccatggacacctctccttcagaggggacaaacttaaatgcgccaaacagtctgggagtgagcgctctatgcgccatctgtggtgatagggcaactggcaaacactacggggcctcctcttgcgacggatgtaagggctttttccggcgcgctgtacgtaaaaatcatatgtattcgtgccgattttcaagacaatgtgtggtcgatagggaccggcgcaaccagtgcagatactgtaggctcaagaaatgcttccgggcaggtatgcgccgagaagccgtgcagaatgagagagataggattgctgcccggcgtgcggcatatgaagacagcgccctgccgagtataaacgcccttctgcaggccgaggttttgtcccgccaaatcgcagctcccgtgtctgggattaatggagatatcagagccaagaagattgcgagcatcgccgacgtctgtgagtccatgaaagaacagctcctggtgctggtagagtgggcaaagtacatacctgctttttgcgaactcccattagatgaccaggttgccctgcttagggctcacgccggcgagcatttgctgctaggcgcaaccaaacggtcaatggtgttcaaggacgtcctcctgcttgggaacgattatatcgtgccccgacactgtcctgagctggccgaaatgagtcgcgtgagcattagaatcttggacgagctcgtcctgccatttcaggaattacaaattgatgacaatgagtacgcttacctgaaagcgatcatattctttgatcccgacgcaaagggactctctgatcctggtaagattaaaaggcttcgggcccaggttcaggtgtccctggaagactatatcaacgatcgccagtacgactcaagaggcaggttcggggagttgctactgctcctgccaacacttcaaagcattacctggcagatgatcgagcagatccaatttattaagctgttcggaatggctaaaatagataatttgctccaggaaatgctgttaggcggtgccccgagtgacgcaccccatgcccaccaccctctgcatccacacctaatgcaggagcatatggggactaacgtaatcgtggctaatacaatgcccacccacctctctaacggacagatgtgcgaatggcctcgtccacggggccaagccgcagcgcccgaggctccgcagcctgctcccccaggcgggtccggaagcgaaccttataagctgcttcccggtgcagtcgccacgattgtgcgaccattggaggctatcccccagcctactataaccaaacaggaggttatttgaggactagtccctgttcccagagcccacttttttttctttttttgaaataaaatagcctgtctttcagatctcaaaggctcttttcagagccaccaaaaaaaaaaaaaaaaaaaaaaaaaaaaaaaaaaaaaaaaaaaaaaaaaaaaaaaaaaaaaaaaaaaaaaaaaaaaaaaaaaaaaaaaaaaaaaaaaaaaa

SEQ ID NO: 3988 - RNA, 1586 nt, synthetic construct
  misc_feature 1..1586: note = mRNA a-1 (hSL-A100) (opt3) from Homo sapiens__NP_000448.3__HNF4A(39-474)(S87A_S95A_S99A_K106R_K1 08R_K126R_K127R_S138A_T139A_S142A_S143A_S148A_T166A_S167A_S 313A_S378A_T429A_T432A_S436A_K458R_S461E)
  source 1..1586: mol_type = other RNA
aggagagtcccgcagtcggcgtccagcggctctgcttgttcgtgtgtgtgtcgttgcaggccttattcaagcttaccatggacacctctccttcagaggggacaaacttaaatgcgccaaacagtctgggagtgagcgctctatgcgccatctgtggtgatagggcaactggcaaacactacggggcctcctcttgcgacggatgtaagggctttttccggcgcgctgtacgtaaaaatcatatgtatgcatgccgatttgccagacaatgtgtggtcgatagggaccggcgcaaccagtgcagatactgtaggctcaagaaatgcttccgggctggtatgcgccgagaagccgtgcagaatgagagagataggattgcggcacggcgtgccgcttatgaagactcggccctgccgtcaataaacgcacttctgcaggctgaggttttgagccgccaaatcgccgcgcccgtgagtgggattaatggagatatcagagccaagaagattgcatccatcgctgacgtctgtgagtctatgaaagaacagctcctggtgctggtagagtgggccaagtacatacctgctttttgcgaactcccattagatgaccaggttgccctgcttagggcacacgccggcgagcatttgctgctaggcgctaccaaacggagcatggtgttcaaggacgtcctcctgcttgggaacgattatatcgtgccccgacactgtcctgagctggcggaaatgtcccgcgtgtcaattagaatcttggacgagctcgtcctgccatttcaggaattacaaattgatgacaatgagtacgcatacctgaaagccatcatattctttgatcccgacgctaagggactcagtgatcctggtaagattaaaaggcttcgggcccaggttcaggtgagcctggaagactatatcaacgatcgccagtacgactctagaggcaggttcggggagttgctactgctcctgccaacacttcaatccattacctggcagatgatcgagcagatccaatttattaagctgttcggaatggcaaaaatagataatttgctccaggaaatgctgttaggcggtgccccgtcagacgctccccatgcccaccaccctctgcatccacacctaatgcaggagcatatggggactaacgtaatcgtggcaaatacaatgcccacccacctcagcaacggacagatgtgcgaatggcctcgtccacggggccaagcggctgcccccgaggcaccgcagcctgctcccccaggcgggagtggatctgaaccttataagctgcttcccggtgccgtcgccacgattgtgcgaccattggaggcaatcccccagcctactataaccaaacaggaggttatttgaggactagtccctgttcccagagcccacttttttttctttttttgaaataaaatagcctgtctttcagatctcaaaggctcttttcagagccaccaaaaaaaaaaaaaaaaaaaaaaaaaaaaaaaaaaaaaaaaaaaaaaaaaaaaaaaaaaaaaaaaaaaaaaaaaaaaaaaaaaaaaaaaaaaaaaaaaaaaa

SEQ ID NO: 3989 - RNA, 1586 nt, synthetic construct
  misc_feature 1..1586: note = mRNA a-1 (hSL-A100) (opt4) from Homo sapiens__NP_000448.3__HNF4A(39-474)
  source 1..1586: mol_type = other RNA
aggagagtcccgcagtcggcgtccagcggctctgcttgttcgtgtgtgtgtcgttgcaggccttattcaagcttaccatggacaccagccccagcgagggcaccaacctgaacgcccccaacagcctgggcgtgagcgccctgtgcgccatctgcggcgacagagccaccggcaagcactacggcgccagcagctgcgacggctgcaagggcttcttcagaagaagcgtgagaaagaaccacatgtacagctgcagattcagcagacagtgcgtggtggacaaggacaagagaaaccagtgcagatactgcagactgaagaagtgcttcagagccggcatgaagaaggaggccgtgcagaacgagagagacagaatcagcaccagaagaagcagctacgaggacagcagcctgcccagcatcaacgccctgctgcaggccgaggtgctgagcagacagatcaccagccccgtgagcggcatcaacggcgacatcagagccaagaagatcgccagcatcgccgacgtgtgcgagagcatgaaggagcagctgctggtgctggtggagtgggccaagtacatccccgccttctgcgagctgcccctggacgaccaggtggccctgctgagagcccacgccggcgagcacctgctgctgggcgccaccaagagaagcatggtgttcaaggacgtgctgctgctgggcaacgactacatcgtgcccagacactgccccgagctggccgagatgagcagagtgagcatcagaatcctggacgagctggtgctgcccttccaggagctgcagatcgacgacaacgagtacgcctacctgaaggccatcatcttcttcgaccccgacgccaagggcctgagcgaccccggcaagatcaagagactgagaagccaggtgcaggtgagcctggaggactacatcaacgacagacagtacgacagcagaggcagattcggcgagctgctgctgctgctgcccaccctgcagagcatcacctggcagatgatcgagcagatccagttcatcaagctgttcggcatggccaagatcgacaacctgctgcaggagatgctgctgggcggcagccccagcgacgccccccacgcccaccaccccctgcacccccacctgatgcaggagcacatgggcaccaacgtgatcgtggccaacaccatgcccacccacctgagcaacggccagatgtgcgagtggcccagacccagaggccaggccgccacccccgagaccccccagcccagcccccccggcggcagcggcagcgagccctacaagctgctgcccggcgccgtggccaccatcgtgaagcccctgagcgccatcccccagcccaccatcaccaagcaggaggtgatctgaggactagtccctgttcccagagcccacttttttttctttttttgaaataaaatagcctgtctttcagatctcaaaggctcttttcagagccaccaaaaaaaaaaaaaaaaaaaaaaaaaaaaaaaaaaaaaaaaaaaaaaaaaaaaaaaaaaaaaaaaaaaaaaaaaaaaaaaaaaaaaaaaaaaaaaaaaaaaa

SEQ ID NO: 3990 - RNA, 1586 nt, synthetic construct
  misc_feature 1..1586: note = mRNA a-1 (hSL-A100) (opt4) from Homo sapiens__NP_000448.3__HNF4A(39-474)(S313A)
  source 1..1586: mol_type = other RNA
aggagagtcccgcagtcggcgtccagcggctctgcttgttcgtgtgtgtgtcgttgcaggccttattcaagcttaccatggacaccagccccagcgagggcaccaacctgaacgcccccaacagcctgggcgtgagcgccctgtgcgccatctgcggcgacagagccaccggcaagcactacggcgccagcagctgcgacggctgcaagggcttcttcagaagaagcgtgagaaagaaccacatgtacagctgcagattcagcagacagtgcgtggtggacaaggacaagagaaaccagtgcagatactgcagactgaagaagtgcttcagagccggcatgaagaaggaggccgtgcagaacgagagagacagaatcagcaccagaagaagcagctacgaggacagcagcctgcccagcatcaacgccctgctgcaggccgaggtgctgagcagacagatcaccagccccgtgagcggcatcaacggcgacatcagagccaagaagatcgccagcatcgccgacgtgtgcgagagcatgaaggagcagctgctggtgctggtggagtgggccaagtacatccccgccttctgcgagctgcccctggacgaccaggtggccctgctgagagcccacgccggcgagcacctgctgctgggcgccaccaagagaagcatggtgttcaaggacgtgctgctgctgggcaacgactacatcgtgcccagacactgccccgagctggccgagatgagcagagtgagcatcagaatcctggacgagctggtgctgcccttccaggagctgcagatcgacgacaacgagtacgcctacctgaaggccatcatcttcttcgaccccgacgccaagggcctgagcgaccccggcaagatcaagagactgagagcccaggtgcaggtgagcctggaggactacatcaacgacagacagtacgacagcagaggcagattcggcgagctgctgctgctgctgcccaccctgcagagcatcacctggcagatgatcgagcagatccagttcatcaagctgttcggcatggccaagatcgacaacctgctgcaggagatgctgctgggcggcagccccagcgacgccccccacgcccaccaccccctgcacccccacctgatgcaggagcacatgggcaccaacgtgatcgtggccaacaccatgcccacccacctgagcaacggccagatgtgcgagtggcccagacccagaggccaggccgccacccccgagaccccccagcccagcccccccggcggcagcggcagcgagccctacaagctgctgcccggcgccgtggccaccatcgtgaagcccctgagcgccatcccccagcccaccatcaccaagcaggaggtgatctgaggactagtccctgttcccagagcccacttttttttctttttttgaaataaaatagcctgtctttcagatctcaaaggctcttttcagagccaccaaaaaaaaaaaaaaaaaaaaaaaaaaaaaaaaaaaaaaaaaaaaaaaaaaaaaaaaaaaaaaaaaaaaaaaaaaaaaaaaaaaaaaaaaaaaaaaaaaaaa

SEQ ID NO: 3991 - RNA, 1586 nt, synthetic construct
  misc_feature 1..1586: note = mRNA a-1 (hSL-A100) (opt4) from Homo sapiens__NP_000448.3__HNF4A(39-474)(S313E)
  source 1..1586: mol_type = other RNA
aggagagtcccgcagtcggcgtccagcggctctgcttgttcgtgtgtgtgtcgttgcaggccttattcaagcttaccatggacaccagccccagcgagggcaccaacctgaacgcccccaacagcctgggcgtgagcgccctgtgcgccatctgcggcgacagagccaccggcaagcactacggcgccagcagctgcgacggctgcaagggcttcttcagaagaagcgtgagaaagaaccacatgtacagctgcagattcagcagacagtgcgtggtggacaaggacaagagaaaccagtgcagatactgcagactgaagaagtgcttcagagccggcatgaagaaggaggccgtgcagaacgagagagacagaatcagcaccagaagaagcagctacgaggacagcagcctgcccagcatcaacgccctgctgcaggccgaggtgctgagcagacagatcaccagccccgtgagcggcatcaacggcgacatcagagccaagaagatcgccagcatcgccgacgtgtgcgagagcatgaaggagcagctgctggtgctggtggagtgggccaagtacatccccgccttctgcgagctgcccctggacgaccaggtggccctgctgagagcccacgccggcgagcacctgctgctgggcgccaccaagagaagcatggtgttcaaggacgtgctgctgctgggcaacgactacatcgtgcccagacactgccccgagctggccgagatgagcagagtgagcatcagaatcctggacgagctggtgctgcccttccaggagctgcagatcgacgacaacgagtacgcctacctgaaggccatcatcttcttcgaccccgacgccaagggcctgagcgaccccggcaagatcaagagactgagagagcaggtgcaggtgagcctggaggactacatcaacgacagacagtacgacagcagaggcagattcggcgagctgctgctgctgctgcccaccctgcagagcatcacctggcagatgatcgagcagatccagttcatcaagctgttcggcatggccaagatcgacaacctgctgcaggagatgctgctgggcggcagccccagcgacgccccccacgcccaccaccccctgcacccccacctgatgcaggagcacatgggcaccaacgtgatcgtggccaacaccatgcccacccacctgagcaacggccagatgtgcgagtggcccagacccagaggccaggccgccacccccgagaccccccagcccagcccccccggcggcagcggcagcgagccctacaagctgctgcccggcgccgtggccaccatcgtgaagcccctgagcgccatcccccagcccaccatcaccaagcaggaggtgatctgaggactagtccctgttcccagagcccacttttttttctttttttgaaataaaatagcctgtctttcagatctcaaaggctcttttcagagccaccaaaaaaaaaaaaaaaaaaaaaaaaaaaaaaaaaaaaaaaaaaaaaaaaaaaaaaaaaaaaaaaaaaaaaaaaaaaaaaaaaaaaaaaaaaaaaaaaaaaaa

SEQ ID NO: 3992 - RNA, 1586 nt, synthetic construct
  misc_feature 1..1586: note = mRNA a-1 (hSL-A100) (opt4) from Homo sapiens__NP_000448.3__HNF4A(39-474)(S142A_S143A)
  source 1..1586: mol_type = other RNA
aggagagtcccgcagtcggcgtccagcggctctgcttgttcgtgtgtgtgtcgttgcaggccttattcaagcttaccatggacaccagccccagcgagggcaccaacctgaacgcccccaacagcctgggcgtgagcgccctgtgcgccatctgcggcgacagagccaccggcaagcactacggcgccagcagctgcgacggctgcaagggcttcttcagaagaagcgtgagaaagaaccacatgtacagctgcagattcagcagacagtgcgtggtggacaaggacaagagaaaccagtgcagatactgcagactgaagaagtgcttcagagccggcatgaagaaggaggccgtgcagaacgagagagacagaatcagcaccagaagagccgcctacgaggacagcagcctgcccagcatcaacgccctgctgcaggccgaggtgctgagcagacagatcaccagccccgtgagcggcatcaacggcgacatcagagccaagaagatcgccagcatcgccgacgtgtgcgagagcatgaaggagcagctgctggtgctggtggagtgggccaagtacatccccgccttctgcgagctgcccctggacgaccaggtggccctgctgagagcccacgccggcgagcacctgctgctgggcgccaccaagagaagcatggtgttcaaggacgtgctgctgctgggcaacgactacatcgtgcccagacactgccccgagctggccgagatgagcagagtgagcatcagaatcctggacgagctggtgctgcccttccaggagctgcagatcgacgacaacgagtacgcctacctgaaggccatcatcttcttcgaccccgacgccaagggcctgagcgaccccggcaagatcaagagactgagaagccaggtgcaggtgagcctggaggactacatcaacgacagacagtacgacagcagaggcagattcggcgagctgctgctgctgctgcccaccctgcagagcatcacctggcagatgatcgagcagatccagttcatcaagctgttcggcatggccaagatcgacaacctgctgcaggagatgctgctgggcggcagccccagcgacgccccccacgcccaccaccccctgcacccccacctgatgcaggagcacatgggcaccaacgtgatcgtggccaacaccatgcccacccacctgagcaacggccagatgtgcgagtggcccagacccagaggccaggccgccacccccgagaccccccagcccagcccccccggcggcagcggcagcgagccctacaagctgctgcccggcgccgtggccaccatcgtgaagcccctgagcgccatcccccagcccaccatcaccaagcaggaggtgatctgaggactagtccctgttcccagagcccacttttttttctttttttgaaataaaatagcctgtctttcagatctcaaaggctcttttcagagccaccaaaaaaaaaaaaaaaaaaaaaaaaaaaaaaaaaaaaaaaaaaaaaaaaaaaaaaaaaaaaaaaaaaaaaaaaaaaaaaaaaaaaaaaaaaaaaaaaaaaaa

SEQ ID NO: 3993 - RNA, 1586 nt, synthetic construct
  misc_feature 1..1586: note = mRNA a-1 (hSL-A100) (opt4) from Homo sapiens__NP_000448.3__HNF4A(39-474)(S142E_S143E)
  source 1..1586: mol_type = other RNA
aggagagtcccgcagtcggcgtccagcggctctgcttgttcgtgtgtgtgtcgttgcaggccttattcaagcttaccatggacaccagccccagcgagggcaccaacctgaacgcccccaacagcctgggcgtgagcgccctgtgcgccatctgcggcgacagagccaccggcaagcactacggcgccagcagctgcgacggctgcaagggcttcttcagaagaagcgtgagaaagaaccacatgtacagctgcagattcagcagacagtgcgtggtggacaaggacaagagaaaccagtgcagatactgcagactgaagaagtgcttcagagccggcatgaagaaggaggccgtgcagaacgagagagacagaatcagcaccagaagagaggagtacgaggacagcagcctgcccagcatcaacgccctgctgcaggccgaggtgctgagcagacagatcaccagccccgtgagcggcatcaacggcgacatcagagccaagaagatcgccagcatcgccgacgtgtgcgagagcatgaaggagcagctgctggtgctggtggagtgggccaagtacatccccgccttctgcgagctgcccctggacgaccaggtggccctgctgagagcccacgccggcgagcacctgctgctgggcgccaccaagagaagcatggtgttcaaggacgtgctgctgctgggcaacgactacatcgtgcccagacactgccccgagctggccgagatgagcagagtgagcatcagaatcctggacgagctggtgctgcccttccaggagctgcagatcgacgacaacgagtacgcctacctgaaggccatcatcttcttcgaccccgacgccaagggcctgagcgaccccggcaagatcaagagactgagaagccaggtgcaggtgagcctggaggactacatcaacgacagacagtacgacagcagaggcagattcggcgagctgctgctgctgctgcccaccctgcagagcatcacctggcagatgatcgagcagatccagttcatcaagctgttcggcatggccaagatcgacaacctgctgcaggagatgctgctgggcggcagccccagcgacgccccccacgcccaccaccccctgcacccccacctgatgcaggagcacatgggcaccaacgtgatcgtggccaacaccatgcccacccacctgagcaacggccagatgtgcgagtggcccagacccagaggccaggccgccacccccgagaccccccagcccagcccccccggcggcagcggcagcgagccctacaagctgctgcccggcgccgtggccaccatcgtgaagcccctgagcgccatcccccagcccaccatcaccaagcaggaggtgatctgaggactagtccctgttcccagagcccacttttttttctttttttgaaataaaatagcctgtctttcagatctcaaaggctcttttcagagccaccaaaaaaaaaaaaaaaaaaaaaaaaaaaaaaaaaaaaaaaaaaaaaaaaaaaaaaaaaaaaaaaaaaaaaaaaaaaaaaaaaaaaaaaaaaaaaaaaaaaaa

SEQ ID NO: 3994 - RNA, 1586 nt, synthetic construct
  misc_feature 1..1586: note = mRNA a-1 (hSL-A100) (opt4) from Homo sapiens__NP_000448.3__HNF4A(39-474)(S143A)
  source 1..1586: mol_type = other RNA
aggagagtcccgcagtcggcgtccagcggctctgcttgttcgtgtgtgtgtcgttgcaggccttattcaagcttaccatggacaccagccccagcgagggcaccaacctgaacgcccccaacagcctgggcgtgagcgccctgtgcgccatctgcggcgacagagccaccggcaagcactacggcgccagcagctgcgacggctgcaagggcttcttcagaagaagcgtgagaaagaaccacatgtacagctgcagattcagcagacagtgcgtggtggacaaggacaagagaaaccagtgcagatactgcagactgaagaagtgcttcagagccggcatgaagaaggaggccgtgcagaacgagagagacagaatcagcaccagaagaagcgcctacgaggacagcagcctgcccagcatcaacgccctgctgcaggccgaggtgctgagcagacagatcaccagccccgtgagcggcatcaacggcgacatcagagccaagaagatcgccagcatcgccgacgtgtgcgagagcatgaaggagcagctgctggtgctggtggagtgggccaagtacatccccgccttctgcgagctgcccctggacgaccaggtggccctgctgagagcccacgccggcgagcacctgctgctgggcgccaccaagagaagcatggtgttcaaggacgtgctgctgctgggcaacgactacatcgtgcccagacactgccccgagctggccgagatgagcagagtgagcatcagaatcctggacgagctggtgctgcccttccaggagctgcagatcgacgacaacgagtacgcctacctgaaggccatcatcttcttcgaccccgacgccaagggcctgagcgaccccggcaagatcaagagactgagaagccaggtgcaggtgagcctggaggactacatcaacgacagacagtacgacagcagaggcagattcggcgagctgctgctgctgctgcccaccctgcagagcatcacctggcagatgatcgagcagatccagttcatcaagctgttcggcatggccaagatcgacaacctgctgcaggagatgctgctgggcggcagccccagcgacgccccccacgcccaccaccccctgcacccccacctgatgcaggagcacatgggcaccaacgtgatcgtggccaacaccatgcccacccacctgagcaacggccagatgtgcgagtggcccagacccagaggccaggccgccacccccgagaccccccagcccagcccccccggcggcagcggcagcgagccctacaagctgctgcccggcgccgtggccaccatcgtgaagcccctgagcgccatcccccagcccaccatcaccaagcaggaggtgatctgaggactagtccctgttcccagagcccacttttttttctttttttgaaataaaatagcctgtctttcagatctcaaaggctcttttcagagccaccaaaaaaaaaaaaaaaaaaaaaaaaaaaaaaaaaaaaaaaaaaaaaaaaaaaaaaaaaaaaaaaaaaaaaaaaaaaaaaaaaaaaaaaaaaaaaaaaaaaaa

SEQ ID NO: 3995 - RNA, 1586 nt, synthetic construct
  misc_feature 1..1586: note = mRNA a-1 (hSL-A100) (opt4) from Homo sapiens__NP_000448.3__HNF4A(39-474)(T166A)
  source 1..1586: mol_type = other RNA
aggagagtcccgcagtcggcgtccagcggctctgcttgttcgtgtgtgtgtcgttgcaggccttattcaagcttaccatggacaccagccccagcgagggcaccaacctgaacgcccccaacagcctgggcgtgagcgccctgtgcgccatctgcggcgacagagccaccggcaagcactacggcgccagcagctgcgacggctgcaagggcttcttcagaagaagcgtgagaaagaaccacatgtacagctgcagattcagcagacagtgcgtggtggacaaggacaagagaaaccagtgcagatactgcagactgaagaagtgcttcagagccggcatgaagaaggaggccgtgcagaacgagagagacagaatcagcaccagaagaagcagctacgaggacagcagcctgcccagcatcaacgccctgctgcaggccgaggtgctgagcagacagatcgccagccccgtgagcggcatcaacggcgacatcagagccaagaagatcgccagcatcgccgacgtgtgcgagagcatgaaggagcagctgctggtgctggtggagtgggccaagtacatccccgccttctgcgagctgcccctggacgaccaggtggccctgctgagagcccacgccggcgagcacctgctgctgggcgccaccaagagaagcatggtgttcaaggacgtgctgctgctgggcaacgactacatcgtgcccagacactgccccgagctggccgagatgagcagagtgagcatcagaatcctggacgagctggtgctgcccttccaggagctgcagatcgacgacaacgagtacgcctacctgaaggccatcatcttcttcgaccccgacgccaagggcctgagcgaccccggcaagatcaagagactgagaagccaggtgcaggtgagcctggaggactacatcaacgacagacagtacgacagcagaggcagattcggcgagctgctgctgctgctgcccaccctgcagagcatcacctggcagatgatcgagcagatccagttcatcaagctgttcggcatggccaagatcgacaacctgctgcaggagatgctgctgggcggcagccccagcgacgccccccacgcccaccaccccctgcacccccacctgatgcaggagcacatgggcaccaacgtgatcgtggccaacaccatgcccacccacctgagcaacggccagatgtgcgagtggcccagacccagaggccaggccgccacccccgagaccccccagcccagcccccccggcggcagcggcagcgagccctacaagctgctgcccggcgccgtggccaccatcgtgaagcccctgagcgccatcccccagcccaccatcaccaagcaggaggtgatctgaggactagtccctgttcccagagcccacttttttttctttttttgaaataaaatagcctgtctttcagatctcaaaggctcttttcagagccaccaaaaaaaaaaaaaaaaaaaaaaaaaaaaaaaaaaaaaaaaaaaaaaaaaaaaaaaaaaaaaaaaaaaaaaaaaaaaaaaaaaaaaaaaaaaaaaaaaaaaa

SEQ ID NO: 3996 - RNA, 1586 nt, synthetic construct
  misc_feature 1..1586: note = mRNA a-1 (hSL-A100) (opt4) from Homo sapiens__NP_000448.3__HNF4A(39-474)(S167E)
  source 1..1586: mol_type = other RNA
aggagagtcccgcagtcggcgtccagcggctctgcttgttcgtgtgtgtgtcgttgcaggccttattcaagcttaccatggacaccagccccagcgagggcaccaacctgaacgcccccaacagcctgggcgtgagcgccctgtgcgccatctgcggcgacagagccaccggcaagcactacggcgccagcagctgcgacggctgcaagggcttcttcagaagaagcgtgagaaagaaccacatgtacagctgcagattcagcagacagtgcgtggtggacaaggacaagagaaaccagtgcagatactgcagactgaagaagtgcttcagagccggcatgaagaaggaggccgtgcagaacgagagagacagaatcagcaccagaagaagcagctacgaggacagcagcctgcccagcatcaacgccctgctgcaggccgaggtgctgagcagacagatcaccgagcccgtgagcggcatcaacggcgacatcagagccaagaagatcgccagcatcgccgacgtgtgcgagagcatgaaggagcagctgctggtgctggtggagtgggccaagtacatccccgccttctgcgagctgcccctggacgaccaggtggccctgctgagagcccacgccggcgagcacctgctgctgggcgccaccaagagaagcatggtgttcaaggacgtgctgctgctgggcaacgactacatcgtgcccagacactgccccgagctggccgagatgagcagagtgagcatcagaatcctggacgagctggtgctgcccttccaggagctgcagatcgacgacaacgagtacgcctacctgaaggccatcatcttcttcgaccccgacgccaagggcctgagcgaccccggcaagatcaagagactgagaagccaggtgcaggtgagcctggaggactacatcaacgacagacagtacgacagcagaggcagattcggcgagctgctgctgctgctgcccaccctgcagagcatcacctggcagatgatcgagcagatccagttcatcaagctgttcggcatggccaagatcgacaacctgctgcaggagatgctgctgggcggcagccccagcgacgccccccacgcccaccaccccctgcacccccacctgatgcaggagcacatgggcaccaacgtgatcgtggccaacaccatgcccacccacctgagcaacggccagatgtgcgagtggcccagacccagaggccaggccgccacccccgagaccccccagcccagcccccccggcggcagcggcagcgagccctacaagctgctgcccggcgccgtggccaccatcgtgaagcccctgagcgccatcccccagcccaccatcaccaagcaggaggtgatctgaggactagtccctgttcccagagcccacttttttttctttttttgaaataaaatagcctgtctttcagatctcaaaggctcttttcagagccaccaaaaaaaaaaaaaaaaaaaaaaaaaaaaaaaaaaaaaaaaaaaaaaaaaaaaaaaaaaaaaaaaaaaaaaaaaaaaaaaaaaaaaaaaaaaaaaaaaaaaa

SEQ ID NO: 3997 - RNA, 1586 nt, synthetic construct
  misc_feature 1..1586: note = mRNA a-1 (hSL-A100) (opt4) from Homo sapiens__NP_000448.3__HNF4A(39-474)(S167A)
  source 1..1586: mol_type = other RNA
aggagagtcccgcagtcggcgtccagcggctctgcttgttcgtgtgtgtgtcgttgcaggccttattcaagcttaccatggacaccagccccagcgagggcaccaacctgaacgcccccaacagcctgggcgtgagcgccctgtgcgccatctgcggcgacagagccaccggcaagcactacggcgccagcagctgcgacggctgcaagggcttcttcagaagaagcgtgagaaagaaccacatgtacagctgcagattcagcagacagtgcgtggtggacaaggacaagagaaaccagtgcagatactgcagactgaagaagtgcttcagagccggcatgaagaaggaggccgtgcagaacgagagagacagaatcagcaccagaagaagcagctacgaggacagcagcctgcccagcatcaacgccctgctgcaggccgaggtgctgagcagacagatcaccgcccccgtgagcggcatcaacggcgacatcagagccaagaagatcgccagcatcgccgacgtgtgcgagagcatgaaggagcagctgctggtgctggtggagtgggccaagtacatccccgccttctgcgagctgcccctggacgaccaggtggccctgctgagagcccacgccggcgagcacctgctgctgggcgccaccaagagaagcatggtgttcaaggacgtgctgctgctgggcaacgactacatcgtgcccagacactgccccgagctggccgagatgagcagagtgagcatcagaatcctggacgagctggtgctgcccttccaggagctgcagatcgacgacaacgagtacgcctacctgaaggccatcatcttcttcgaccccgacgccaagggcctgagcgaccccggcaagatcaagagactgagaagccaggtgcaggtgagcctggaggactacatcaacgacagacagtacgacagcagaggcagattcggcgagctgctgctgctgctgcccaccctgcagagcatcacctggcagatgatcgagcagatccagttcatcaagctgttcggcatggccaagatcgacaacctgctgcaggagatgctgctgggcggcagccccagcgacgccccccacgcccaccaccccctgcacccccacctgatgcaggagcacatgggcaccaacgtgatcgtggccaacaccatgcccacccacctgagcaacggccagatgtgcgagtggcccagacccagaggccaggccgccacccccgagaccccccagcccagcccccccggcggcagcggcagcgagccctacaagctgctgcccggcgccgtggccaccatcgtgaagcccctgagcgccatcccccagcccaccatcaccaagcaggaggtgatctgaggactagtccctgttcccagagcccacttttttttctttttttgaaataaaatagcctgtctttcagatctcaaaggctcttttcagagccaccaaaaaaaaaaaaaaaaaaaaaaaaaaaaaaaaaaaaaaaaaaaaaaaaaaaaaaaaaaaaaaaaaaaaaaaaaaaaaaaaaaaaaaaaaaaaaaaaaaaaa

SEQ ID NO: 3998 - RNA, 1586 nt, synthetic construct
  misc_feature 1..1586: note = mRNA a-1 (hSL-A100) (opt4) from Homo sapiens__NP_000448.3__HNF4A(39-474)(S167A_S378A_T429A_T432A _S436A)
  source 1..1586: mol_type = other RNA
aggagagtcccgcagtcggcgtccagcggctctgcttgttcgtgtgtgtgtcgttgcaggccttattcaagcttaccatggacaccagccccagcgagggcaccaacctgaacgcccccaacagcctgggcgtgagcgccctgtgcgccatctgcggcgacagagccaccggcaagcactacggcgccagcagctgcgacggctgcaagggcttcttcagaagaagcgtgagaaagaaccacatgtacagctgcagattcagcagacagtgcgtggtggacaaggacaagagaaaccagtgcagatactgcagactgaagaagtgcttcagagccggcatgaagaaggaggccgtgcagaacgagagagacagaatcagcaccagaagaagcagctacgaggacagcagcctgcccagcatcaacgccctgctgcaggccgaggtgctgagcagacagatcaccgcccccgtgagcggcatcaacggcgacatcagagccaagaagatcgccagcatcgccgacgtgtgcgagagcatgaaggagcagctgctggtgctggtggagtgggccaagtacatccccgccttctgcgagctgcccctggacgaccaggtggccctgctgagagcccacgccggcgagcacctgctgctgggcgccaccaagagaagcatggtgttcaaggacgtgctgctgctgggcaacgactacatcgtgcccagacactgccccgagctggccgagatgagcagagtgagcatcagaatcctggacgagctggtgctgcccttccaggagctgcagatcgacgacaacgagtacgcctacctgaaggccatcatcttcttcgaccccgacgccaagggcctgagcgaccccggcaagatcaagagactgagaagccaggtgcaggtgagcctggaggactacatcaacgacagacagtacgacagcagaggcagattcggcgagctgctgctgctgctgcccaccctgcagagcatcacctggcagatgatcgagcagatccagttcatcaagctgttcggcatggccaagatcgacaacctgctgcaggagatgctgctgggcggcgcccccagcgacgccccccacgcccaccaccccctgcacccccacctgatgcaggagcacatgggcaccaacgtgatcgtggccaacaccatgcccacccacctgagcaacggccagatgtgcgagtggcccagacccagaggccaggccgccgcccccgaggccccccagcccgccccccccggcggcagcggcagcgagccctacaagctgctgcccggcgccgtggccaccatcgtgaagcccctgagcgccatcccccagcccaccatcaccaagcaggaggtgatctgaggactagtccctgttcccagagcccacttttttttctttttttgaaataaaatagcctgtctttcagatctcaaaggctcttttcagagccaccaaaaaaaaaaaaaaaaaaaaaaaaaaaaaaaaaaaaaaaaaaaaaaaaaaaaaaaaaaaaaaaaaaaaaaaaaaaaaaaaaaaaaaaaaaaaaaaaaaaaa

SEQ ID NO: 3999 - RNA, 1586 nt, synthetic construct
  misc_feature 1..1586: note = mRNA a-1 (hSL-A100) (opt4) from Homo sapiens__NP_000448.3__HNF4A(39-474)(S167E_S378E_T429E_T432E _S436E)
  source 1..1586: mol_type = other RNA
aggagagtcccgcagtcggcgtccagcggctctgcttgttcgtgtgtgtgtcgttgcaggccttattcaagcttaccatggacaccagccccagcgagggcaccaacctgaacgcccccaacagcctgggcgtgagcgccctgtgcgccatctgcggcgacagagccaccggcaagcactacggcgccagcagctgcgacggctgcaagggcttcttcagaagaagcgtgagaaagaaccacatgtacagctgcagattcagcagacagtgcgtggtggacaaggacaagagaaaccagtgcagatactgcagactgaagaagtgcttcagagccggcatgaagaaggaggccgtgcagaacgagagagacagaatcagcaccagaagaagcagctacgaggacagcagcctgcccagcatcaacgccctgctgcaggccgaggtgctgagcagacagatcaccgagcccgtgagcggcatcaacggcgacatcagagccaagaagatcgccagcatcgccgacgtgtgcgagagcatgaaggagcagctgctggtgctggtggagtgggccaagtacatccccgccttctgcgagctgcccctggacgaccaggtggccctgctgagagcccacgccggcgagcacctgctgctgggcgccaccaagagaagcatggtgttcaaggacgtgctgctgctgggcaacgactacatcgtgcccagacactgccccgagctggccgagatgagcagagtgagcatcagaatcctggacgagctggtgctgcccttccaggagctgcagatcgacgacaacgagtacgcctacctgaaggccatcatcttcttcgaccccgacgccaagggcctgagcgaccccggcaagatcaagagactgagaagccaggtgcaggtgagcctggaggactacatcaacgacagacagtacgacagcagaggcagattcggcgagctgctgctgctgctgcccaccctgcagagcatcacctggcagatgatcgagcagatccagttcatcaagctgttcggcatggccaagatcgacaacctgctgcaggagatgctgctgggcggcgagcccagcgacgccccccacgcccaccaccccctgcacccccacctgatgcaggagcacatgggcaccaacgtgatcgtggccaacaccatgcccacccacctgagcaacggccagatgtgcgagtggcccagacccagaggccaggccgccgagcccgaggagccccagcccgagccccccggcggcagcggcagcgagccctacaagctgctgcccggcgccgtggccaccatcgtgaagcccctgagcgccatcccccagcccaccatcaccaagcaggaggtgatctgaggactagtccctgttcccagagcccacttttttttctttttttgaaataaaatagcctgtctttcagatctcaaaggctcttttcagagccaccaaaaaaaaaaaaaaaaaaaaaaaaaaaaaaaaaaaaaaaaaaaaaaaaaaaaaaaaaaaaaaaaaaaaaaaaaaaaaaaaaaaaaaaaaaaaaaaaaaaaa

SEQ ID NO: 4000 - RNA, 1586 nt, synthetic construct
  misc_feature 1..1586: note = mRNA a-1 (hSL-A100) (opt4) from Homo sapiens__NP_000448.3__HNF4A(39-474)(S87A)
  source 1..1586: mol_type = other RNA
aggagagtcccgcagtcggcgtccagcggctctgcttgttcgtgtgtgtgtcgttgcaggccttattcaagcttaccatggacaccagccccagcgagggcaccaacctgaacgcccccaacagcctgggcgtgagcgccctgtgcgccatctgcggcgacagagccaccggcaagcactacggcgccagcagctgcgacggctgcaagggcttcttcagaagagccgtgagaaagaaccacatgtacagctgcagattcagcagacagtgcgtggtggacaaggacaagagaaaccagtgcagatactgcagactgaagaagtgcttcagagccggcatgaagaaggaggccgtgcagaacgagagagacagaatcagcaccagaagaagcagctacgaggacagcagcctgcccagcatcaacgccctgctgcaggccgaggtgctgagcagacagatcaccagccccgtgagcggcatcaacggcgacatcagagccaagaagatcgccagcatcgccgacgtgtgcgagagcatgaaggagcagctgctggtgctggtggagtgggccaagtacatccccgccttctgcgagctgcccctggacgaccaggtggccctgctgagagcccacgccggcgagcacctgctgctgggcgccaccaagagaagcatggtgttcaaggacgtgctgctgctgggcaacgactacatcgtgcccagacactgccccgagctggccgagatgagcagagtgagcatcagaatcctggacgagctggtgctgcccttccaggagctgcagatcgacgacaacgagtacgcctacctgaaggccatcatcttcttcgaccccgacgccaagggcctgagcgaccccggcaagatcaagagactgagaagccaggtgcaggtgagcctggaggactacatcaacgacagacagtacgacagcagaggcagattcggcgagctgctgctgctgctgcccaccctgcagagcatcacctggcagatgatcgagcagatccagttcatcaagctgttcggcatggccaagatcgacaacctgctgcaggagatgctgctgggcggcagccccagcgacgccccccacgcccaccaccccctgcacccccacctgatgcaggagcacatgggcaccaacgtgatcgtggccaacaccatgcccacccacctgagcaacggccagatgtgcgagtggcccagacccagaggccaggccgccacccccgagaccccccagcccagcccccccggcggcagcggcagcgagccctacaagctgctgcccggcgccgtggccaccatcgtgaagcccctgagcgccatcccccagcccaccatcaccaagcaggaggtgatctgaggactagtccctgttcccagagcccacttttttttctttttttgaaataaaatagcctgtctttcagatctcaaaggctcttttcagagccaccaaaaaaaaaaaaaaaaaaaaaaaaaaaaaaaaaaaaaaaaaaaaaaaaaaaaaaaaaaaaaaaaaaaaaaaaaaaaaaaaaaaaaaaaaaaaaaaaaaaaa

SEQ ID NO: 4001 - RNA, 1586 nt, synthetic construct
  misc_feature 1..1586: note = mRNA a-1 (hSL-A100) (opt4) from Homo sapiens__NP_000448.3__HNF4A(39-474)(S87E)
  source 1..1586: mol_type = other RNA
aggagagtcccgcagtcggcgtccagcggctctgcttgttcgtgtgtgtgtcgttgcaggccttattcaagcttaccatggacaccagccccagcgagggcaccaacctgaacgcccccaacagcctgggcgtgagcgccctgtgcgccatctgcggcgacagagccaccggcaagcactacggcgccagcagctgcgacggctgcaagggcttcttcagaagagaggtgagaaagaaccacatgtacagctgcagattcagcagacagtgcgtggtggacaaggacaagagaaaccagtgcagatactgcagactgaagaagtgcttcagagccggcatgaagaaggaggccgtgcagaacgagagagacagaatcagcaccagaagaagcagctacgaggacagcagcctgcccagcatcaacgccctgctgcaggccgaggtgctgagcagacagatcaccagccccgtgagcggcatcaacggcgacatcagagccaagaagatcgccagcatcgccgacgtgtgcgagagcatgaaggagcagctgctggtgctggtggagtgggccaagtacatccccgccttctgcgagctgcccctggacgaccaggtggccctgctgagagcccacgccggcgagcacctgctgctgggcgccaccaagagaagcatggtgttcaaggacgtgctgctgctgggcaacgactacatcgtgcccagacactgccccgagctggccgagatgagcagagtgagcatcagaatcctggacgagctggtgctgcccttccaggagctgcagatcgacgacaacgagtacgcctacctgaaggccatcatcttcttcgaccccgacgccaagggcctgagcgaccccggcaagatcaagagactgagaagccaggtgcaggtgagcctggaggactacatcaacgacagacagtacgacagcagaggcagattcggcgagctgctgctgctgctgcccaccctgcagagcatcacctggcagatgatcgagcagatccagttcatcaagctgttcggcatggccaagatcgacaacctgctgcaggagatgctgctgggcggcagccccagcgacgccccccacgcccaccaccccctgcacccccacctgatgcaggagcacatgggcaccaacgtgatcgtggccaacaccatgcccacccacctgagcaacggccagatgtgcgagtggcccagacccagaggccaggccgccacccccgagaccccccagcccagcccccccggcggcagcggcagcgagccctacaagctgctgcccggcgccgtggccaccatcgtgaagcccctgagcgccatcccccagcccaccatcaccaagcaggaggtgatctgaggactagtccctgttcccagagcccacttttttttctttttttgaaataaaatagcctgtctttcagatctcaaaggctcttttcagagccaccaaaaaaaaaaaaaaaaaaaaaaaaaaaaaaaaaaaaaaaaaaaaaaaaaaaaaaaaaaaaaaaaaaaaaaaaaaaaaaaaaaaaaaaaaaaaaaaaaaaaa

SEQ ID NO: 4002 - RNA, 1586 nt, synthetic construct; identical to SEQ ID NO: 3989
  misc_feature 1..1586: note = mRNA a-1 (hSL-A100) (opt4) from Homo sapiens__NP_000448.3__HNF4A(39-474)(R2V)
  source 1..1586: mol_type = other RNA

SEQ ID NO: 4003 - RNA, 1586 nt, synthetic construct; identical to SEQ ID NO: 3989
  misc_feature 1..1586: note = mRNA a-1 (hSL-A100) (opt4) from Homo sapiens__NP_000448.3__HNF4A(39-474)(R2V_K5V)
  source 1..1586: mol_type = other RNA

SEQ ID NO: 4004 - RNA, 1586 nt, synthetic construct
  misc_feature 1..1586: note = mRNA a-1 (hSL-A100) (opt4) from Homo sapiens__NP_000448.3__HNF4A(39-474)(K179R_K180R)
  source 1..1586: mol_type = other RNA
aggagagtcccgcagtcggcgtccagcggctctgcttgttcgtgtgtgtgtcgttgcaggccttattcaagcttaccatggacaccagccccagcgagggcaccaacctgaacgcccccaacagcctgggcgtgagcgccctgtgcgccatctgcggcgacagagccaccggcaagcactacggcgccagcagctgcgacggctgcaagggcttcttcagaagaagcgtgagaaagaaccacatgtacagctgcagattcagcagacagtgcgtggtggacaaggacaagagaaaccagtgcagatactgcagactgaagaagtgcttcagagccggcatgaagaaggaggccgtgcagaacgagagagacagaatcagcaccagaagaagcagctacgaggacagcagcctgcccagcatcaacgccctgctgcaggccgaggtgctgagcagacagatcaccagccccgtgagcggcatcaacggcgacatcagagccagaagaatcgccagcatcgccgacgtgtgcgagagcatgaaggagcagctgctggtgctggtggagtgggccaagtacatccccgccttctgcgagctgcccctggacgaccaggtggccctgctgagagcccacgccggcgagcacctgctgctgggcgccaccaagagaagcatggtgttcaaggacgtgctgctgctgggcaacgactacatcgtgcccagacactgccccgagctggccgagatgagcagagtgagcatcagaatcctggacgagctggtgctgcccttccaggagctgcagatcgacgacaacgagtacgcctacctgaaggccatcatcttcttcgaccccgacgccaagggcctgagcgaccccggcaagatcaagagactgagaagccaggtgcaggtgagcctggaggactacatcaacgacagacagtacgacagcagaggcagattcggcgagctgctgctgctgctgcccaccctgcagagcatcacctggcagatgatcgagcagatccagttcatcaagctgttcggcatggccaagatcgacaacctgctgcaggagatgctgctgggcggcagccccagcgacgccccccacgcccaccaccccctgcacccccacctgatgcaggagcacatgggcaccaacgtgatcgtggccaacaccatgcccacccacctgagcaacggccagatgtgcgagtggcccagacccagaggccaggccgccacccccgagaccccccagcccagcccccccggcggcagcggcagcgagccctacaagctgctgcccggcgccgtggccaccatcgtgaagcccctgagcgccatcccccagcccaccatcaccaagcaggaggtgatctgaggactagtccctgttcccagagcccacttttttttctttttttgaaataaaatagcctgtctttcagatctcaaaggctcttttcagagccaccaaaaaaaaaaaaaaaaaaaaaaaaaaaaaaaaaaaaaaaaaaaaaaaaaaaaaaaaaaaaaaaaaaaaaaaaaaaaaaaaaaaaaaaaaaaaaaaaaaaaa

SEQ ID NO: 4005 - RNA, 1586 nt, synthetic construct
  misc_feature 1..1586: note = mRNA a-1 (hSL-A100) (opt4) from Homo sapiens__NP_000448.3__HNF4A(39-474)(K234R)
  source 1..1586: mol_type = other RNA
aggagagtcccgcagtcggcgtccagcggctctgcttgttcgtgtgtgtgtcgttgcaggccttattcaagcttaccatggacaccagccccagcgagggcaccaacctgaacgcccccaacagcctgggcgtgagcgccctgtgcgccatctgcggcgacagagccaccggcaagcactacggcgccagcagctgcgacggctgcaagggcttcttcagaagaagcgtgagaaagaaccacatgtacagctgcagattcagcagacagtgcgtggtggacaaggacaagagaaaccagtgcagatactgcagactgaagaagtgcttcagagccggcatgaagaaggaggccgtgcagaacgagagagacagaatcagcaccagaagaagcagctacgaggacagcagcctgcccagcatcaacgccctgctgcaggccgaggtgctgagcagacagatcaccagccccgtgagcggcatcaacggcgacatcagagccaagaagatcgccagcatcgccgacgtgtgcgagagcatgaaggagcagctgctggtgctggtggagtgggccaagtacatccccgccttctgcgagctgcccctggacgaccaggtggccctgctgagagcccacgccggcgagcacctgctgctgggcgccaccagaagaagcatggtgttcaaggacgtgctgctgctgggcaacgactacatcgtgcccagacactgccccgagctggccgagatgagcagagtgagcatcagaatcctggacgagctggtgctgcccttccaggagctgcagatcgacgacaacgagtacgcctacctgaaggccatcatcttcttcgaccccgacgccaagggcctgagcgaccccggcaagatcaagagactgagaagccaggtgcaggtgagcctggaggactacatcaacgacagacagtacgacagcagaggcagattcggcgagctgctgctgctgctgcccaccctgcagagcatcacctggcagatgatcgagcagatccagttcatcaagctgttcggcatggccaagatcgacaacctgctgcaggagatgctgctgggcggcagccccagcgacgccccccacgcccaccaccccctgcacccccacctgatgcaggagcacatgggcaccaacgtgatcgtggccaacaccatgcccacccacctgagcaacggccagatgtgcgagtggcccagacccagaggccaggccgccacccccgagaccccccagcccagcccccccggcggcagcggcagcgagccctacaagctgctgcccggcgccgtggccaccatcgtgaagcccctgagcgccatcccccagcccaccatcaccaagcaggaggtgatctgaggactagtccctgttcccagagcccacttttttttctttttttgaaataaaatagcctgtctttcagatctcaaaggctcttttcagagccaccaaaaaaaaaaaaaaaaaaaaaaaaaaaaaaaaaaaaaaaaaaaaaaaaaaaaaaaaaaaaaaaaaaaaaaaaaaaaaaaaaaaaaaaaaaaaaaaaaaaaa

SEQ ID NO: 4006 - RNA, 1586 nt, synthetic construct
  misc_feature 1..1586: note = mRNA a-1 (hSL-A100) (opt4) from Homo sapiens__NP_000448.3__HNF4A(39-474)(K300R)
  source 1..1586: mol_type = other RNA
aggagagtcccgcagtcggcgtccagcggctctgcttgttcgtgtgtgtgtcgttgcaggccttattcaagcttaccatggacaccagccccagcgagggcaccaacctgaacgcccccaacagcctgggcgtgagcgccctgtgcgccatctgcggcgacagagccaccggcaagcactacggcgccagcagctgcgacggctgcaagggcttcttcagaagaagcgtgagaaagaaccacatgtacagctgcagattcagcagacagtgcgtggtggacaaggacaagagaaaccagtgcagatactgcagactgaagaagtgcttcagagccggcatgaagaaggaggccgtgcagaacgagagagacagaatcagcaccagaagaagcagctacgaggacagcagcctgcccagcatcaacgccctgctgcaggccgaggtgctgagcagacagatcaccagccccgtgagcggcatcaacggcgacatcagagccaagaagatcgccagcatcgccgacgtgtgcgagagcatgaaggagcagctgctggtgctggtggagtgggccaagtacatccccgccttctgcgagctgcccctggacgaccaggtggccctgctgagagcccacgccggcgagcacctgctgctgggcgccaccaagagaagcatggtgttcaaggacgtgctgctgctgggcaacgactacatcgtgcccagacactgccccgagctggccgagatgagcagagtgagcatcagaatcctggacgagctggtgctgcccttccaggagctgcagatcgacgacaacgagtacgcctacctgaaggccatcatcttcttcgaccccgacgccagaggcctgagcgaccccggcaagatcaagagactgagaagccaggtgcaggtgagcctggaggactacatcaacgacagacagtacgacagcagaggcagattcggcgagctgctgctgctgctgcccaccctgcagagcatcacctggcagatgatcgagcagatccagttcatcaagctgttcggcatggccaagatcgacaacctgctgcaggagatgctgctgggcggcagccccagcgacgccccccacgcccaccaccccctgcacccccacctgatgcaggagcacatgggcaccaacgtgatcgtggccaacaccatgcccacccacctgagcaacggccagatgtgcgagtggcccagacccagaggccaggccgccacccccgagaccccccagcccagcccccccggcggcagcggcagcgagccctacaagctgctgcccggcgccgtggccaccatcgtgaagcccctgagcgccatcccccagcccaccatcaccaagcaggaggtgatctgaggactagtccctgttcccagagcccacttttttttctttttttgaaataaaatagcctgtctttcagatctcaaaggctcttttcagagccaccaaaaaaaaaaaaaaaaaaaaaaaaaaaaaaaaaaaaaaaaaaaaaaaaaaaaaaaaaaaaaaaaaaaaaaaaaaaaaaaaaaaaaaaaaaaaaaaaaaaaa

SEQ ID NO: 4007 - RNA, 1586 nt, synthetic construct
  misc_feature 1..1586: note = mRNA a-1 (hSL-A100) (opt4) from Homo sapiens__NP_000448.3__HNF4A(39-474)(K300R_K307R_K309R)
  source 1..1586: mol_type = other RNA
aggagagtcccgcagtcggcgtccagcggctctgcttgttcgtgtgtgtgtcgttgcaggccttattcaagcttaccatggacaccagccccagcgagggcaccaacctgaacgcccccaacagcctgggcgtgagcgccctgtgcgccatctgcggcgacagagccaccggcaagcactacggcgccagcagctgcgacggctgcaagggcttcttcagaagaagcgtgagaaagaaccacatgtacagctgcagattcagcagacagtgcgtggtggacaaggacaagagaaaccagtgcagatactgcagactgaagaagtgcttcagagccggcatgaagaaggaggccgtgcagaacgagagagacagaatcagcaccagaagaagcagctacgaggacagcagcctgcccagcatcaacgccctgctgcaggccgaggtgctgagcagacagatcaccagccccgtgagcggcatcaacggcgacatcagagccaagaagatcgccagcatcgccgacgtgtgcgagagcatgaaggagcagctgctggtgctggtggagtgggccaagtacatccccgccttctgcgagctgcccctggacgaccaggtggccctgctgagagcccacgccggcgagcacctgctgctgggcgccaccaagagaagcatggtgttcaaggacgtgctgctgctgggcaacgactacatcgtgcccagacactgccccgagctggccgagatgagcagagtgagcatcagaatcctggacgagctggtgctgcccttccaggagctgcagatcgacgacaacgagtacgcctacctgaaggccatcatcttcttcgaccccgacgccagaggcctgagcgaccccggcagaatcagaagactgagaagccaggtgcaggtgagcctggaggactacatcaacgacagacagtacgacagcagaggcagattcggcgagctgctgctgctgctgcccaccctgcagagcatcacctggcagatgatcgagcagatccagttcatcaagctgttcggcatggccaagatcgacaacctgctgcaggagatgctgctgggcggcagccccagcgacgccccccacgcccaccaccccctgcacccccacctgatgcaggagcacatgggcaccaacgtgatcgtggccaacaccatgcccacccacctgagcaacggccagatgtgcgagtggcccagacccagaggccaggccgccacccccgagaccccccagcccagcccccccggcggcagcggcagcgagccctacaagctgctgcccggcgccgtggccaccatcgtgaagcccctgagcgccatcccccagcccaccatcaccaagcaggaggtgatctgaggactagtccctgttcccagagcccacttttttttctttttttgaaataaaatagcctgtctttcagatctcaaaggctcttttcagagccaccaaaaaaaaaaaaaaaaaaaaaaaaaaaaaaaaaaaaaaaaaaaaaaaaaaaaaaaaaaaaaaaaaaaaaaaaaaaaaaaaaaaaaaaaaaaaaaaaaaaaa

SEQ ID NO: 4008 - RNA, 1586 nt, synthetic construct
  misc_feature 1..1586: note = mRNA a-1 (hSL-A100) (opt4) from Homo sapiens__NP_000448.3__HNF4A(39-474)(K447R_K470R)
  source 1..1586: mol_type = other RNA
aggagagtcccgcagtcggcgtccagcggctctgcttgttcgtgtgtgtgtcgttgcaggccttattcaagcttaccatggacaccagccccagcgagggcaccaacctgaacgcccccaacagcctgggcgtgagcgccctgtgcgccatctgcggcgacagagccaccggcaagcactacggcgccagcagctgcgacggctgcaagggcttcttcagaagaagcgtgagaaagaaccacatgtacagctgcagattcagcagacagtgcgtggtggacaaggacaagagaaaccagtgcagatactgcagactgaagaagtgcttcagagccggcatgaagaaggaggccgtgcagaacgagagagacagaatcagcaccagaagaagcagctacgaggacagcagcctgcccagcatcaacgccctgctgcaggccgaggtgctgagcagacagatcaccagccccgtgagcggcatcaacggcgacatcagagccaagaagatcgccagcatcgccgacgtgtgcgagagcatgaaggagcagctgctggtgctggtggagtgggccaagtacatccccgccttctgcgagctgcccctggacgaccaggtggccctgctgagagcccacgccggcgagcacctgctgctgggcgccaccaagagaagcatggtgttcaaggacgtgctgctgctgggcaacgactacatcgtgcccagacactgccccgagctggccgagatgagcagagtgagcatcagaatcctggacgagctggtgctgcccttccaggagctgcagatcgacgacaacgagtacgcctacctgaaggccatcatcttcttcgaccccgacgccaagggcctgagcgaccccggcaagatcaagagactgagaagccaggtgcaggtgagcctggaggactacatcaacgacagacagtacgacagcagaggcagattcggcgagctgctgctgctgctgcccaccctgcagagcatcacctggcagatgatcgagcagatccagttcatcaagctgttcggcatggccaagatcgacaacctgctgcaggagatgctgctgggcggcagccccagcgacgccccccacgcccaccaccccctgcacccccacctgatgcaggagcacatgggcaccaacgtgatcgtggccaacaccatgcccacccacctgagcaacggccagatgtgcgagtggcccagacccagaggccaggccgccacccccgagaccccccagcccagcccccccggcggcagcggcagcgagccctacagactgctgcccggcgccgtggccaccatcgtgaagcccctgagcgccatcccccagcccaccatcaccagacaggaggtgatctgaggactagtccctgttcccagagcccacttttttttctttttttgaaataaaatagcctgtctttcagatctcaaaggctcttttcagagccaccaaaaaaaaaaaaaaaaaaaaaaaaaaaaaaaaaaaaaaaaaaaaaaaaaaaaaaaaaaaaaaaaaaaaaaaaaaaaaaaaaaaaaaaaaaaaaaaaaaaaa

SEQ ID NO: 4009 - RNA, 1586 nt, synthetic construct
  misc_feature 1..1586: note = mRNA a-1 (hSL-A100) (opt4) from Homo sapiens__NP_000448.3__HNF4A(39-474)(K458R)
  source 1..1586: mol_type = other RNA
aggagagtcccgcagtcggcgtccagcggctctgcttgttcgtgtgtgtgtcgttgcaggccttattcaagcttaccatggacaccagccccagcgagggcaccaacctgaacgcccccaacagcctgggcgtgagcgccctgtgcgccatctgcggcgacagagccaccggcaagcactacggcgccagcagctgcgacggctgcaagggcttcttcagaagaagcgtgagaaagaaccacatgtacagctgcagattcagcagacagtgcgtggtggacaaggacaagagaaaccagtgcagatactgcagactgaagaagtgcttcagagccggcatgaagaaggaggccgtgcagaacgagagagacagaatcagcaccagaagaagcagctacgaggacagcagcctgcccagcatcaacgccctgctgcaggccgaggtgctgagcagacagatcaccagccccgtgagcggcatcaacggcgacatcagagccaagaagatcgccagcatcgccgacgtgtgcgagagcatgaaggagcagctgctggtgctggtggagtgggccaagtacatccccgccttctgcgagctgcccctggacgaccaggtggccctgctgagagcccacgccggcgagcacctgctgctgggcgccaccaagagaagcatggtgttcaaggacgtgctgctgctgggcaacgactacatcgtgcccagacactgccccgagctggccgagatgagcagagtgagcatcagaatcctggacgagctggtgctgcccttccaggagctgcagatcgacgacaacgagtacgcctacctgaaggccatcatcttcttcgaccccgacgccaagggcctgagcgaccccggcaagatcaagagactgagaagccaggtgcaggtgagcctggaggactacatcaacgacagacagtacgacagcagaggcagattcggcgagctgctgctgctgctgcccaccctgcagagcatcacctggcagatgatcgagcagatccagttcatcaagctgttcggcatggccaagatcgacaacctgctgcaggagatgctgctgggcggcagccccagcgacgccccccacgcccaccaccccctgcacccccacctgatgcaggagcacatgggcaccaacgtgatcgtggccaacaccatgcccacccacctgagcaacggccagatgtgcgagtggcccagacccagaggccaggccgccacccccgagaccccccagcccagcccccccggcggcagcggcagcgagccctacaagctgctgcccggcgccgtggccaccatcgtgagacccctgagcgccatcccccagcccaccatcaccaagcaggaggtgatctgaggactagtccctgttcccagagcccacttttttttctttttttgaaataaaatagcctgtctttcagatctcaaaggctcttttcagagccaccaaaaaaaaaaaaaaaaaaaaaaaaaaaaaaaaaaaaaaaaaaaaaaaaaaaaaaaaaaaaaaaaaaaaaaaaaaaaaaaaaaaaaaaaaaaaaaaaaaaaa

SEQ ID NO: 4010 - RNA, 1586 nt, synthetic construct
  misc_feature 1..1586: note = mRNA a-1 (hSL-A100) (opt4) from Homo sapiens__NP_000448.3__HNF4A(39-474)(K106R_K108R_K126R_K127R )
  source 1..1586: mol_type = other RNA
aggagagtcccgcagtcggcgtccagcggctctgcttgttcgtgtgtgtgtcgttgcaggccttattcaagcttaccatggacaccagccccagcgagggcaccaacctgaacgcccccaacagcctgggcgtgagcgccctgtgcgccatctgcggcgacagagccaccggcaagcactacggcgccagcagctgcgacggctgcaagggcttcttcagaagaagcgtgagaaagaaccacatgtacagctgcagattcagcagacagtgcgtggtggacagagacagaagaaaccagtgcagatactgcagactgaagaagtgcttcagagccggcatgagaagagaggccgtgcagaacgagagagacagaatcagcaccagaagaagcagctacgaggacagcagcctgcccagcatcaacgccctgctgcaggccgaggtgctgagcagacagatcaccagccccgtgagcggcatcaacggcgacatcagagccaagaagatcgccagcatcgccgacgtgtgcgagagcatgaaggagcagctgctggtgctggtggagtgggccaagtacatccccgccttctgcgagctgcccctggacgaccaggtggccctgctgagagcccacgccggcgagcacctgctgctgggcgccaccaagagaagcatggtgttcaaggacgtgctgctgctgggcaacgactacatcgtgcccagacactgccccgagctggccgagatgagcagagtgagcatcagaatcctggacgagctggtgctgcccttccaggagctgcagatcgacgacaacgagtacgcctacctgaaggccatcatcttcttcgaccccgacgccaagggcctgagcgaccccggcaagatcaagagactgagaagccaggtgcaggtgagcctggaggactacatcaacgacagacagtacgacagcagaggcagattcggcgagctgctgctgctgctgcccaccctgcagagcatcacctggcagatgatcgagcagatccagttcatcaagctgttcggcatggccaagatcgacaacctgctgcaggagatgctgctgggcggcagccccagcgacgccccccacgcccaccaccccctgcacccccacctgatgcaggagcacatgggcaccaacgtgatcgtggccaacaccatgcccacccacctgagcaacggccagatgtgcgagtggcccagacccagaggccaggccgccacccccgagaccccccagcccagcccccccggcggcagcggcagcgagccctacaagctgctgcccggcgccgtggccaccatcgtgaagcccctgagcgccatcccccagcccaccatcaccaagcaggaggtgatctgaggactagtccctgttcccagagcccacttttttttctttttttgaaataaaatagcctgtctttcagatctcaaaggctcttttcagagccaccaaaaaaaaaaaaaaaaaaaaaaaaaaaaaaaaaaaaaaaaaaaaaaaaaaaaaaaaaaaaaaaaaaaaaaaaaaaaaaaaaaaaaaaaaaaaaaaaaaaaa

SEQ ID NO: 4011 - RNA, 1586 nt, synthetic construct
  misc_feature 1..1586: note = mRNA a-1 (hSL-A100) (opt4) from Homo sapiens__NP_000448.3__HNF4A(39-474)(E285Q)
  source 1..1586: mol_type = other RNA
aggagagtcccgcagtcggcgtccagcggctctgcttgttcgtgtgtgtgtcgttgcaggccttattcaagcttaccatggacaccagccccagcgagggcaccaacctgaacgcccccaacagcctgggcgtgagcgccctgtgcgccatctgcggcgacagagccaccggcaagcactacggcgccagcagctgcgacggctgcaagggcttcttcagaagaagcgtgagaaagaaccacatgtacagctgcagattcagcagacagtgcgtggtggacaaggacaagagaaaccagtgcagatactgcagactgaagaagtgcttcagagccggcatgaagaaggaggccgtgcagaacgagagagacagaatcagcaccagaagaagcagctacgaggacagcagcctgcccagcatcaacgccctgctgcaggccgaggtgctgagcagacagatcaccagccccgtgagcggcatcaacggcgacatcagagccaagaagatcgccagcatcgccgacgtgtgcgagagcatgaaggagcagctgctggtgctggtggagtgggccaagtacatccccgccttctgcgagctgcccctggacgaccaggtggccctgctgagagcccacgccggcgagcacctgctgctgggcgccaccaagagaagcatggtgttcaaggacgtgctgctgctgggcaacgactacatcgtgcccagacactgccccgagctggccgagatgagcagagtgagcatcagaatcctggacgagctggtgctgcccttccaggagctgcagatcgacgacaaccagtacgcctacctgaaggccatcatcttcttcgaccccgacgccaagggcctgagcgaccccggcaagatcaagagactgagaagccaggtgcaggtgagcctggaggactacatcaacgacagacagtacgacagcagaggcagattcggcgagctgctgctgctgctgcccaccctgcagagcatcacctggcagatgatcgagcagatccagttcatcaagctgttcggcatggccaagatcgacaacctgctgcaggagatgctgctgggcggcagccccagcgacgccccccacgcccaccaccccctgcacccccacctgatgcaggagcacatgggcaccaacgtgatcgtggccaacaccatgcccacccacctgagcaacggccagatgtgcgagtggcccagacccagaggccaggccgccacccccgagaccccccagcccagcccccccggcggcagcggcagcgagccctacaagctgctgcccggcgccgtggccaccatcgtgaagcccctgagcgccatcccccagcccaccatcaccaagcaggaggtgatctgaggactagtccctgttcccagagcccacttttttttctttttttgaaataaaatagcctgtctttcagatctcaaaggctcttttcagagccaccaaaaaaaaaaaaaaaaaaaaaaaaaaaaaaaaaaaaaaaaaaaaaaaaaaaaaaaaaaaaaaaaaaaaaaaaaaaaaaaaaaaaaaaaaaaaaaaaaaaaa

SEQ ID NO: 4012 - RNA, 1586 nt, synthetic construct
  misc_feature 1..1586: note = mRNA a-1 (hSL-A100) (opt4) from Homo sapiens__NP_000448.3__HNF4A(39-474)(T166E)
  source 1..1586: mol_type = other RNA
aggagagtcccgcagtcggcgtccagcggctctgcttgttcgtgtgtgtgtcgttgcaggccttattcaagcttaccatggacaccagccccagcgagggcaccaacctgaacgcccccaacagcctgggcgtgagcgccctgtgcgccatctgcggcgacagagccaccggcaagcactacggcgccagcagctgcgacggctgcaagggcttcttcagaagaagcgtgagaaagaaccacatgtacagctgcagattcagcagacagtgcgtggtggacaaggacaagagaaaccagtgcagatactgcagactgaagaagtgcttcagagccggcatgaagaaggaggccgtgcagaacgagagagacagaatcagcaccagaagaagcagctacgaggacagcagcctgcccagcatcaacgccctgctgcaggccgaggtgctgagcagacagatcgagagccccgtgagcggcatcaacggcgacatcagagccaagaagatcgccagcatcgccgacgtgtgcgagagcatgaaggagcagctgctggtgctggtggagtgggccaagtacatccccgccttctgcgagctgcccctggacgaccaggtggccctgctgagagcccacgccggcgagcacctgctgctgggcgccaccaagagaagcatggtgttcaaggacgtgctgctgctgggcaacgactacatcgtgcccagacactgccccgagctggccgagatgagcagagtgagcatcagaatcctggacgagctggtgctgcccttccaggagctgcagatcgacgacaacgagtacgcctacctgaaggccatcatcttcttcgaccccgacgccaagggcctgagcgaccccggcaagatcaagagactgagaagccaggtgcaggtgagcctggaggactacatcaacgacagacagtacgacagcagaggcagattcggcgagctgctgctgctgctgcccaccctgcagagcatcacctggcagatgatcgagcagatccagttcatcaagctgttcggcatggccaagatcgacaacctgctgcaggagatgctgctgggcggcagccccagcgacgccccccacgcccaccaccccctgcacccccacctgatgcaggagcacatgggcaccaacgtgatcgtggccaacaccatgcccacccacctgagcaacggccagatgtgcgagtggcccagacccagaggccaggccgccacccccgagaccccccagcccagcccccccggcggcagcggcagcgagccctacaagctgctgcccggcgccgtggccaccatcgtgaagcccctgagcgccatcccccagcccaccatcaccaagcaggaggtgatctgaggactagtccctgttcccagagcccacttttttttctttttttgaaataaaatagcctgtctttcagatctcaaaggctcttttcagagccaccaaaaaaaaaaaaaaaaaaaaaaaaaaaaaaaaaaaaaaaaaaaaaaaaaaaaaaaaaaaaaaaaaaaaaaaaaaaaaaaaaaaaaaaaaaaaaaaaaaaaa

SEQ ID NO: 4013 - RNA, 1586 nt, synthetic construct
  misc_feature 1..1586: note = mRNA a-1 (hSL-A100) (opt4) from Homo sapiens__NP_000448.3__HNF4A(39-474)(S148A)
  source 1..1586: mol_type = other RNA
aggagagtcccgcagtcggcgtccagcggctctgcttgttcgtgtgtgtgtcgttgcaggccttattcaagcttaccatggacaccagccccagcgagggcaccaacctgaacgcccccaacagcctgggcgtgagcgccctgtgcgccatctgcggcgacagagccaccggcaagcactacggcgccagcagctgcgacggctgcaagggcttcttcagaagaagcgtgagaaagaaccacatgtacagctgcagattcagcagacagtgcgtggtggacaaggacaagagaaaccagtgcagatactgcagactgaagaagtgcttcagagccggcatgaagaaggaggccgtgcagaacgagagagacagaatcagcaccagaagaagcagctacgaggacagcgccctgcccagcatcaacgccctgctgcaggccgaggtgctgagcagacagatcaccagccccgtgagcggcatcaacggcgacatcagagccaagaagatcgccagcatcgccgacgtgtgcgagagcatgaaggagcagctgctggtgctggtggagtgggccaagtacatccccgccttctgcgagctgcccctggacgaccaggtggccctgctgagagcccacgccggcgagcacctgctgctgggcgccaccaagagaagcatggtgttcaaggacgtgctgctgctgggcaacgactacatcgtgcccagacactgccccgagctggccgagatgagcagagtgagcatcagaatcctggacgagctggtgctgcccttccaggagctgcagatcgacgacaacgagtacgcctacctgaaggccatcatcttcttcgaccccgacgccaagggcctgagcgaccccggcaagatcaagagactgagaagccaggtgcaggtgagcctggaggactacatcaacgacagacagtacgacagcagaggcagattcggcgagctgctgctgctgctgcccaccctgcagagcatcacctggcagatgatcgagcagatccagttcatcaagctgttcggcatggccaagatcgacaacctgctgcaggagatgctgctgggcggcagccccagcgacgccccccacgcccaccaccccctgcacccccacctgatgcaggagcacatgggcaccaacgtgatcgtggccaacaccatgcccacccacctgagcaacggccagatgtgcgagtggcccagacccagaggccaggccgccacccccgagaccccccagcccagcccccccggcggcagcggcagcgagccctacaagctgctgcccggcgccgtggccaccatcgtgaagcccctgagcgccatcccccagcccaccatcaccaagcaggaggtgatctgaggactagtccctgttcccagagcccacttttttttctttttttgaaataaaatagcctgtctttcagatctcaaaggctcttttcagagccaccaaaaaaaaaaaaaaaaaaaaaaaaaaaaaaaaaaaaaaaaaaaaaaaaaaaaaaaaaaaaaaaaaaaaaaaaaaaaaaaaaaaaaaaaaaaaaaaaaaaaa

SEQ ID NO: 4014 - RNA, 1586 nt, synthetic construct
  misc_feature 1..1586: note = mRNA a-1 (hSL-A100) (opt4) from Homo sapiens__NP_000448.3__HNF4A(39-474)(S148E)
  source 1..1586: mol_type = other RNA
aggagagtcccgcagtcggcgtccagcggctctgcttgttcgtgtgtgtgtcgttgcaggccttattcaagcttaccatggacaccagccccagcgagggcaccaacctgaacgcccccaacagcctgggcgtgagcgccctgtgcgccatctgcggcgacagagccaccggcaagcactacggcgccagcagctgcgacggctgcaagggcttcttcagaagaagcgtgagaaagaaccacatgtacagctgcagattcagcagacagtgcgtggtggacaaggacaagagaaaccagtgcagatactgcagactgaagaagtgcttcagagccggcatgaagaaggaggccgtgcagaacgagagagacagaatcagcaccagaagaagcagctacgaggacagcgagctgcccagcatcaacgccctgctgcaggccgaggtgctgagcagacagatcaccagccccgtgagcggcatcaacggcgacatcagagccaagaagatcgccagcatcgccgacgtgtgcgagagcatgaaggagcagctgctggtgctggtggagtgggccaagtacatccccgccttctgcgagctgcccctggacgaccaggtggccctgctgagagcccacgccggcgagcacctgctgctgggcgccaccaagagaagcatggtgttcaaggacgtgctgctgctgggcaacgactacatcgtgcccagacactgccccgagctggccgagatgagcagagtgagcatcagaatcctggacgagctggtgctgcccttccaggagctgcagatcgacgacaacgagtacgcctacctgaaggccatcatcttcttcgaccccgacgccaagggcctgagcgaccccggcaagatcaagagactgagaagccaggtgcaggtgagcctggaggactacatcaacgacagacagtacgacagcagaggcagattcggcgagctgctgctgctgctgcccaccctgcagagcatcacctggcagatgatcgagcagatccagttcatcaagctgttcggcatggccaagatcgacaacctgctgcaggagatgctgctgggcggcagccccagcgacgccccccacgcccaccaccccctgcacccccacctgatgcaggagcacatgggcaccaacgtgatcgtggccaacaccatgcccacccacctgagcaacggccagatgtgcgagtggcccagacccagaggccaggccgccacccccgagaccccccagcccagcccccccggcggcagcggcagcgagccctacaagctgctgcccggcgccgtggccaccatcgtgaagcccctgagcgccatcccccagcccaccatcaccaagcaggaggtgatctgaggactagtccctgttcccagagcccacttttttttctttttttgaaataaaatagcctgtctttcagatctcaaaggctcttttcagagccaccaaaaaaaaaaaaaaaaaaaaaaaaaaaaaaaaaaaaaaaaaaaaaaaaaaaaaaaaaaaaaaaaaaaaaaaaaaaaaaaaaaaaaaaaaaaaaaaaaaaaa

SEQ ID NO: 4015 - RNA, 1586 nt, synthetic construct
  misc_feature 1..1586: note = mRNA a-1 (hSL-A100) (opt4) from Homo sapiens__NP_000448.3__HNF4A(39-474)(S183A)
  source 1..1586: mol_type = other RNA
aggagagtcccgcagtcggcgtccagcggctctgcttgttcgtgtgtgtgtcgttgcaggccttattcaagcttaccatggacaccagccccagcgagggcaccaacctgaacgcccccaacagcctgggcgtgagcgccctgtgcgccatctgcggcgacagagccaccggcaagcactacggcgccagcagctgcgacggctgcaagggcttcttcagaagaagcgtgagaaagaaccacatgtacagctgcagattcagcagacagtgcgtggtggacaaggacaagagaaaccagtgcagatactgcagactgaagaagtgcttcagagccggcatgaagaaggaggccgtgcagaacgagagagacagaatcagcaccagaagaagcagctacgaggacagcagcctgcccagcatcaacgccctgctgcaggccgaggtgctgagcagacagatcaccagccccgtgagcggcatcaacggcgacatcagagccaagaagatcgccgccatcgccgacgtgtgcgagagcatgaaggagcagctgctggtgctggtggagtgggccaagtacatccccgccttctgcgagctgcccctggacgaccaggtggccctgctgagagcccacgccggcgagcacctgctgctgggcgccaccaagagaagcatggtgttcaaggacgtgctgctgctgggcaacgactacatcgtgcccagacactgccccgagctggccgagatgagcagagtgagcatcagaatcctggacgagctggtgctgcccttccaggagctgcagatcgacgacaacgagtacgcctacctgaaggccatcatcttcttcgaccccgacgccaagggcctgagcgaccccggcaagatcaagagactgagaagccaggtgcaggtgagcctggaggactacatcaacgacagacagtacgacagcagaggcagattcggcgagctgctgctgctgctgcccaccctgcagagcatcacctggcagatgatcgagcagatccagttcatcaagctgttcggcatggccaagatcgacaacctgctgcaggagatgctgctgggcggcagccccagcgacgccccccacgcccaccaccccctgcacccccacctgatgcaggagcacatgggcaccaacgtgatcgtggccaacaccatgcccacccacctgagcaacggccagatgtgcgagtggcccagacccagaggccaggccgccacccccgagaccccccagcccagcccccccggcggcagcggcagcgagccctacaagctgctgcccggcgccgtggccaccatcgtgaagcccctgagcgccatcccccagcccaccatcaccaagcaggaggtgatctgaggactagtccctgttcccagagcccacttttttttctttttttgaaataaaatagcctgtctttcagatctcaaaggctcttttcagagccaccaaaaaaaaaaaaaaaaaaaaaaaaaaaaaaaaaaaaaaaaaaaaaaaaaaaaaaaaaaaaaaaaaaaaaaaaaaaaaaaaaaaaaaaaaaaaaaaaaaaaa

SEQ ID NO: 4016 - RNA, 1586 nt, synthetic construct
  misc_feature 1..1586: note = mRNA a-1 (hSL-A100) (opt4) from Homo sapiens__NP_000448.3__HNF4A(39-474)(S183E)
  source 1..1586: mol_type = other RNA
aggagagtcccgcagtcggcgtccagcggctctgcttgttcgtgtgtgtgtcgttgcaggccttattcaagcttaccatggacaccagccccagcgagggcaccaacctgaacgcccccaacagcctgggcgtgagcgccctgtgcgccatctgcggcgacagagccaccggcaagcactacggcgccagcagctgcgacggctgcaagggcttcttcagaagaagcgtgagaaagaaccacatgtacagctgcagattcagcagacagtgcgtggtggacaaggacaagagaaaccagtgcagatactgcagactgaagaagtgcttcagagccggcatgaagaaggaggccgtgcagaacgagagagacagaatcagcaccagaagaagcagctacgaggacagcagcctgcccagcatcaacgccctgctgcaggccgaggtgctgagcagacagatcaccagccccgtgagcggcatcaacggcgacatcagagccaagaagatcgccgagatcgccgacgtgtgcgagagcatgaaggagcagctgctggtgctggtggagtgggccaagtacatccccgccttctgcgagctgcccctggacgaccaggtggccctgctgagagcccacgccggcgagcacctgctgctgggcgccaccaagagaagcatggtgttcaaggacgtgctgctgctgggcaacgactacatcgtgcccagacactgccccgagctggccgagatgagcagagtgagcatcagaatcctggacgagctggtgctgcccttccaggagctgcagatcgacgacaacgagtacgcctacctgaaggccatcatcttcttcgaccccgacgccaagggcctgagcgaccccggcaagatcaagagactgagaagccaggtgcaggtgagcctggaggactacatcaacgacagacagtacgacagcagaggcagattcggcgagctgctgctgctgctgcccaccctgcagagcatcacctggcagatgatcgagcagatccagttcatcaagctgttcggcatggccaagatcgacaacctgctgcaggagatgctgctgggcggcagccccagcgacgccccccacgcccaccaccccctgcacccccacctgatgcaggagcacatgggcaccaacgtgatcgtggccaacaccatgcccacccacctgagcaacggccagatgtgcgagtggcccagacccagaggccaggccgccacccccgagaccccccagcccagcccccccggcggcagcggcagcgagccctacaagctgctgcccggcgccgtggccaccatcgtgaagcccctgagcgccatcccccagcccaccatcaccaagcaggaggtgatctgaggactagtccctgttcccagagcccacttttttttctttttttgaaataaaatagcctgtctttcagatctcaaaggctcttttcagagccaccaaaaaaaaaaaaaaaaaaaaaaaaaaaaaaaaaaaaaaaaaaaaaaaaaaaaaaaaaaaaaaaaaaaaaaaaaaaaaaaaaaaaaaaaaaaaaaaaaaaaa

SEQ ID NO: 4017 - RNA, 1586 nt, synthetic construct
  misc_feature 1..1586: note = mRNA a-1 (hSL-A100) (opt4) from Homo sapiens__NP_000448.3__HNF4A(39-474)(S461A)
  source 1..1586: mol_type = other RNA
aggagagtcccgcagtcggcgtccagcggctctgcttgttcgtgtgtgtgtcgttgcaggccttattcaagcttaccatggacaccagccccagcgagggcaccaacctgaacgcccccaacagcctgggcgtgagcgccctgtgcgccatctgcggcgacagagccaccggcaagcactacggcgccagcagctgcgacggctgcaagggcttcttcagaagaagcgtgagaaagaaccacatgtacagctgcagattcagcagacagtgcgtggtggacaaggacaagagaaaccagtgcagatactgcagactgaagaagtgcttcagagccggcatgaagaaggaggccgtgcagaacgagagagacagaatcagcaccagaagaagcagctacgaggacagcagcctgcccagcatcaacgccctgctgcaggccgaggtgctgagcagacagatcaccagccccgtgagcggcatcaacggcgacatcagagccaagaagatcgccagcatcgccgacgtgtgcgagagcatgaaggagcagctgctggtgctggtggagtgggccaagtacatccccgccttctgcgagctgcccctggacgaccaggtggccctgctgagagcccacgccggcgagcacctgctgctgggcgccaccaagagaagcatggtgttcaaggacgtgctgctgctgggcaacgactacatcgtgcccagacactgccccgagctggccgagatgagcagagtgagcatcagaatcctggacgagctggtgctgcccttccaggagctgcagatcgacgacaacgagtacgcctacctgaaggccatcatcttcttcgaccccgacgccaagggcctgagcgaccccggcaagatcaagagactgagaagccaggtgcaggtgagcctggaggactacatcaacgacagacagtacgacagcagaggcagattcggcgagctgctgctgctgctgcccaccctgcagagcatcacctggcagatgatcgagcagatccagttcatcaagctgttcggcatggccaagatcgacaacctgctgcaggagatgctgctgggcggcagccccagcgacgccccccacgcccaccaccccctgcacccccacctgatgcaggagcacatgggcaccaacgtgatcgtggccaacaccatgcccacccacctgagcaacggccagatgtgcgagtggcccagacccagaggccaggccgccacccccgagaccccccagcccagcccccccggcggcagcggcagcgagccctacaagctgctgcccggcgccgtggccaccatcgtgaagcccctggccgccatcccccagcccaccatcaccaagcaggaggtgatctgaggactagtccctgttcccagagcccacttttttttctttttttgaaataaaatagcctgtctttcagatctcaaaggctcttttcagagccaccaaaaaaaaaaaaaaaaaaaaaaaaaaaaaaaaaaaaaaaaaaaaaaaaaaaaaaaaaaaaaaaaaaaaaaaaaaaaaaaaaaaaaaaaaaaaaaaaaaaaa

SEQ ID NO: 4018 - RNA, 1586 nt, synthetic construct
  misc_feature 1..1586: note = mRNA a-1 (hSL-A100) (opt4) from Homo sapiens__NP_000448.3__HNF4A(39-474)(S461E)
  source 1..1586: mol_type = other RNA
aggagagtcccgcagtcggcgtccagcggctctgcttgttcgtgtgtgtgtcgttgcaggccttattcaagcttaccatggacaccagccccagcgagggcaccaacctgaacgcccccaacagcctgggcgtgagcgccctgtgcgccatctgcggcgacagagccaccggcaagcactacggcgccagcagctgcgacggctgcaagggcttcttcagaagaagcgtgagaaagaaccacatgtacagctgcagattcagcagacagtgcgtggtggacaaggacaagagaaaccagtgcagatactgcagactgaagaagtgcttcagagccggcatgaagaaggaggccgtgcagaacgagagagacagaatcagcaccagaagaagcagctacgaggacagcagcctgcccagcatcaacgccctgctgcaggccgaggtgctgagcagacagatcaccagccccgtgagcggcatcaacggcgacatcagagccaagaagatcgccagcatcgccgacgtgtgcgagagcatgaaggagcagctgctggtgctggtggagtgggccaagtacatccccgccttctgcgagctgcccctggacgaccaggtggccctgctgagagcccacgccggcgagcacctgctgctgggcgccaccaagagaagcatggtgttcaaggacgtgctgctgctgggcaacgactacatcgtgcccagacactgccccgagctggccgagatgagcagagtgagcatcagaatcctggacgagctggtgctgcccttccaggagctgcagatcgacgacaacgagtacgcctacctgaaggccatcatcttcttcgaccccgacgccaagggcctgagcgaccccggcaagatcaagagactgagaagccaggtgcaggtgagcctggaggactacatcaacgacagacagtacgacagcagaggcagattcggcgagctgctgctgctgctgcccaccctgcagagcatcacctggcagatgatcgagcagatccagttcatcaagctgttcggcatggccaagatcgacaacctgctgcaggagatgctgctgggcggcagccccagcgacgccccccacgcccaccaccccctgcacccccacctgatgcaggagcacatgggcaccaacgtgatcgtggccaacaccatgcccacccacctgagcaacggccagatgtgcgagtggcccagacccagaggccaggccgccacccccgagaccccccagcccagcccccccggcggcagcggcagcgagccctacaagctgctgcccggcgccgtggccaccatcgtgaagcccctggaggccatcccccagcccaccatcaccaagcaggaggtgatctgaggactagtccctgttcccagagcccacttttttttctttttttgaaataaaatagcctgtctttcagatctcaaaggctcttttcagagccaccaaaaaaaaaaaaaaaaaaaaaaaaaaaaaaaaaaaaaaaaaaaaaaaaaaaaaaaaaaaaaaaaaaaaaaaaaaaaaaaaaaaaaaaaaaaaaaaaaaaaa

SEQ ID NO: 4019 - RNA, 1586 nt, synthetic construct
  misc_feature 1..1586: note = mRNA a-1 (hSL-A100) (opt4) from Homo sapiens__NP_000448.3__HNF4A(39-474)(S142A_S143A_S313A)
  source 1..1586: mol_type = other RNA
aggagagtcccgcagtcggcgtccagcggctctgcttgttcgtgtgtgtgtcgttgcaggccttattcaagcttaccatggacaccagccccagcgagggcaccaacctgaacgcccccaacagcctgggcgtgagcgccctgtgcgccatctgcggcgacagagccaccggcaagcactacggcgccagcagctgcgacggctgcaagggcttcttcagaagaagcgtgagaaagaaccacatgtacagctgcagattcagcagacagtgcgtggtggacaaggacaagagaaaccagtgcagatactgcagactgaagaagtgcttcagagccggcatgaagaaggaggccgtgcagaacgagagagacagaatcagcaccagaagagccgcctacgaggacagcagcctgcccagcatcaacgccctgctgcaggccgaggtgctgagcagacagatcaccagccccgtgagcggcatcaacggcgacatcagagccaagaagatcgccagcatcgccgacgtgtgcgagagcatgaaggagcagctgctggtgctggtggagtgggccaagtacatccccgccttctgcgagctgcccctggacgaccaggtggccctgctgagagcccacgccggcgagcacctgctgctgggcgccaccaagagaagcatggtgttcaaggacgtgctgctgctgggcaacgactacatcgtgcccagacactgccccgagctggccgagatgagcagagtgagcatcagaatcctggacgagctggtgctgcccttccaggagctgcagatcgacgacaacgagtacgcctacctgaaggccatcatcttcttcgaccccgacgccaagggcctgagcgaccccggcaagatcaagagactgagagcccaggtgcaggtgagcctggaggactacatcaacgacagacagtacgacagcagaggcagattcggcgagctgctgctgctgctgcccaccctgcagagcatcacctggcagatgatcgagcagatccagttcatcaagctgttcggcatggccaagatcgacaacctgctgcaggagatgctgctgggcggcagccccagcgacgccccccacgcccaccaccccctgcacccccacctgatgcaggagcacatgggcaccaacgtgatcgtggccaacaccatgcccacccacctgagcaacggccagatgtgcgagtggcccagacccagaggccaggccgccacccccgagaccccccagcccagcccccccggcggcagcggcagcgagccctacaagctgctgcccggcgccgtggccaccatcgtgaagcccctgagcgccatcccccagcccaccatcaccaagcaggaggtgatctgaggactagtccctgttcccagagcccacttttttttctttttttgaaataaaatagcctgtctttcagatctcaaaggctcttttcagagccaccaaaaaaaaaaaaaaaaaaaaaaaaaaaaaaaaaaaaaaaaaaaaaaaaaaaaaaaaaaaaaaaaaaaaaaaaaaaaaaaaaaaaaaaaaaaaaaaaaaaaa

SEQ ID NO: 4020 - RNA, 1586 nt, synthetic construct
  misc_feature 1..1586: note = mRNA a-1 (hSL-A100) (opt4) from Homo sapiens__NP_000448.3__HNF4A(39-474)(S142A_S143A_S313A_K458R )
  source 1..1586: mol_type = other RNA
aggagagtcccgcagtcggcgtccagcggctctgcttgttcgtgtgtgtgtcgttgcaggccttattcaagcttaccatggacaccagccccagcgagggcaccaacctgaacgcccccaacagcctgggcgtgagcgccctgtgcgccatctgcggcgacagagccaccggcaagcactacggcgccagcagctgcgacggctgcaagggcttcttcagaagaagcgtgagaaagaaccacatgtacagctgcagattcagcagacagtgcgtggtggacaaggacaagagaaaccagtgcagatactgcagactgaagaagtgcttcagagccggcatgaagaaggaggccgtgcagaacgagagagacagaatcagcaccagaagagccgcctacgaggacagcagcctgcccagcatcaacgccctgctgcaggccgaggtgctgagcagacagatcaccagccccgtgagcggcatcaacggcgacatcagagccaagaagatcgccagcatcgccgacgtgtgcgagagcatgaaggagcagctgctggtgctggtggagtgggccaagtacatccccgccttctgcgagctgcccctggacgaccaggtggccctgctgagagcccacgccggcgagcacctgctgctgggcgccaccaagagaagcatggtgttcaaggacgtgctgctgctgggcaacgactacatcgtgcccagacactgccccgagctggccgagatgagcagagtgagcatcagaatcctggacgagctggtgctgcccttccaggagctgcagatcgacgacaacgagtacgcctacctgaaggccatcatcttcttcgaccccgacgccaagggcctgagcgaccccggcaagatcaagagactgagagcccaggtgcaggtgagcctggaggactacatcaacgacagacagtacgacagcagaggcagattcggcgagctgctgctgctgctgcccaccctgcagagcatcacctggcagatgatcgagcagatccagttcatcaagctgttcggcatggccaagatcgacaacctgctgcaggagatgctgctgggcggcagccccagcgacgccccccacgcccaccaccccctgcacccccacctgatgcaggagcacatgggcaccaacgtgatcgtggccaacaccatgcccacccacctgagcaacggccagatgtgcgagtggcccagacccagaggccaggccgccacccccgagaccccccagcccagcccccccggcggcagcggcagcgagccctacaagctgctgcccggcgccgtggccaccatcgtgagacccctgagcgccatcccccagcccaccatcaccaagcaggaggtgatctgaggactagtccctgttcccagagcccacttttttttctttttttgaaataaaatagcctgtctttcagatctcaaaggctcttttcagagccaccaaaaaaaaaaaaaaaaaaaaaaaaaaaaaaaaaaaaaaaaaaaaaaaaaaaaaaaaaaaaaaaaaaaaaaaaaaaaaaaaaaaaaaaaaaaaaaaaaaaaa

SEQ ID NO: 4021 - RNA, 1586 nt, synthetic construct
  misc_feature 1..1586: note = mRNA a-1 (hSL-A100) (opt4) from Homo sapiens__NP_000448.3__HNF4A(39-474)(S142A_S143A_S167A_S313A _S378A_T429A_T432A_S436A_K458R)
  source 1..1586: mol_type = other RNA
aggagagtcccgcagtcggcgtccagcggctctgcttgttcgtgtgtgtgtcgttgcaggccttattcaagcttaccatggacaccagccccagcgagggcaccaacctgaacgcccccaacagcctgggcgtgagcgccctgtgcgccatctgcggcgacagagccaccggcaagcactacggcgccagcagctgcgacggctgcaagggcttcttcagaagaagcgtgagaaagaaccacatgtacagctgcagattcagcagacagtgcgtggtggacaaggacaagagaaaccagtgcagatactgcagactgaagaagtgcttcagagccggcatgaagaaggaggccgtgcagaacgagagagacagaatcagcaccagaagagccgcctacgaggacagcagcctgcccagcatcaacgccctgctgcaggccgaggtgctgagcagacagatcaccgcccccgtgagcggcatcaacggcgacatcagagccaagaagatcgccagcatcgccgacgtgtgcgagagcatgaaggagcagctgctggtgctggtggagtgggccaagtacatccccgccttctgcgagctgcccctggacgaccaggtggccctgctgagagcccacgccggcgagcacctgctgctgggcgccaccaagagaagcatggtgttcaaggacgtgctgctgctgggcaacgactacatcgtgcccagacactgccccgagctggccgagatgagcagagtgagcatcagaatcctggacgagctggtgctgcccttccaggagctgcagatcgacgacaacgagtacgcctacctgaaggccatcatcttcttcgaccccgacgccaagggcctgagcgaccccggcaagatcaagagactgagagcccaggtgcaggtgagcctggaggactacatcaacgacagacagtacgacagcagaggcagattcggcgagctgctgctgctgctgcccaccctgcagagcatcacctggcagatgatcgagcagatccagttcatcaagctgttcggcatggccaagatcgacaacctgctgcaggagatgctgctgggcggcgcccccagcgacgccccccacgcccaccaccccctgcacccccacctgatgcaggagcacatgggcaccaacgtgatcgtggccaacaccatgcccacccacctgagcaacggccagatgtgcgagtggcccagacccagaggccaggccgccgcccccgaggccccccagcccgccccccccggcggcagcggcagcgagccctacaagctgctgcccggcgccgtggccaccatcgtgagacccctgagcgccatcccccagcccaccatcaccaagcaggaggtgatctgaggactagtccctgttcccagagcccacttttttttctttttttgaaataaaatagcctgtctttcagatctcaaaggctcttttcagagccaccaaaaaaaaaaaaaaaaaaaaaaaaaaaaaaaaaaaaaaaaaaaaaaaaaaaaaaaaaaaaaaaaaaaaaaaaaaaaaaaaaaaaaaaaaaaaaaaaaaaaa

SEQ ID NO: 4022 - RNA, 1586 nt, synthetic construct
  misc_feature 1..1586: note = mRNA a-1 (hSL-A100) (opt4) from Homo sapiens__NP_000448.3__HNF4A(39-474)(S142A_S143A_S148A_S167A _S313A_S378A_T429A_T432A_S436A_K458R)
  source 1..1586: mol_type = other RNA
aggagagtcccgcagtcggcgtccagcggctctgcttgttcgtgtgtgtgtcgttgcaggccttattcaagcttaccatggacaccagccccagcgagggcaccaacctgaacgcccccaacagcctgggcgtgagcgccctgtgcgccatctgcggcgacagagccaccggcaagcactacggcgccagcagctgcgacggctgcaagggcttcttcagaagaagcgtgagaaagaaccacatgtacagctgcagattcagcagacagtgcgtggtggacaaggacaagagaaaccagtgcagatactgcagactgaagaagtgcttcagagccggcatgaagaaggaggccgtgcagaacgagagagacagaatcagcaccagaagagccgcctacgaggacagcgccctgcccagcatcaacgccctgctgcaggccgaggtgctgagcagacagatcaccgcccccgtgagcggcatcaacggcgacatcagagccaagaagatcgccagcatcgccgacgtgtgcgagagcatgaaggagcagctgctggtgctggtggagtgggccaagtacatccccgccttctgcgagctgcccctggacgaccaggtggccctgctgagagcccacgccggcgagcacctgctgctgggcgccaccaagagaagcatggtgttcaaggacgtgctgctgctgggcaacgactacatcgtgcccagacactgccccgagctggccgagatgagcagagtgagcatcagaatcctggacgagctggtgctgcccttccaggagctgcagatcgacgacaacgagtacgcctacctgaaggccatcatcttcttcgaccccgacgccaagggcctgagcgaccccggcaagatcaagagactgagagcccaggtgcaggtgagcctggaggactacatcaacgacagacagtacgacagcagaggcagattcggcgagctgctgctgctgctgcccaccctgcagagcatcacctggcagatgatcgagcagatccagttcatcaagctgttcggcatggccaagatcgacaacctgctgcaggagatgctgctgggcggcgcccccagcgacgccccccacgcccaccaccccctgcacccccacctgatgcaggagcacatgggcaccaacgtgatcgtggccaacaccatgcccacccacctgagcaacggccagatgtgcgagtggcccagacccagaggccaggccgccgcccccgaggccccccagcccgccccccccggcggcagcggcagcgagccctacaagctgctgcccggcgccgtggccaccatcgtgagacccctgagcgccatcccccagcccaccatcaccaagcaggaggtgatctgaggactagtccctgttcccagagcccacttttttttctttttttgaaataaaatagcctgtctttcagatctcaaaggctcttttcagagccaccaaaaaaaaaaaaaaaaaaaaaaaaaaaaaaaaaaaaaaaaaaaaaaaaaaaaaaaaaaaaaaaaaaaaaaaaaaaaaaaaaaaaaaaaaaaaaaaaaaaaa

SEQ ID NO: 4023 - RNA, 1586 nt, synthetic construct
  misc_feature 1..1586: note = mRNA a-1 (hSL-A100) (opt4) from Homo sapiens__NP_000448.3__HNF4A(39-474)(K106R_K108R_K126R_K127R _S142A_S143A_S148A_S167A_S313A_S378A_T429A_T432A_S436A_K458 R)
  source 1..1586: mol_type = other RNA
aggagagtcccgcagtcggcgtccagcggctctgcttgttcgtgtgtgtgtcgttgcaggccttattcaagcttaccatggacaccagccccagcgagggcaccaacctgaacgcccccaacagcctgggcgtgagcgccctgtgcgccatctgcggcgacagagccaccggcaagcactacggcgccagcagctgcgacggctgcaagggcttcttcagaagaagcgtgagaaagaaccacatgtacagctgcagattcagcagacagtgcgtggtggacagagacagaagaaaccagtgcagatactgcagactgaagaagtgcttcagagccggcatgagaagagaggccgtgcagaacgagagagacagaatcagcaccagaagagccgcctacgaggacagcgccctgcccagcatcaacgccctgctgcaggccgaggtgctgagcagacagatcaccgcccccgtgagcggcatcaacggcgacatcagagccaagaagatcgccagcatcgccgacgtgtgcgagagcatgaaggagcagctgctggtgctggtggagtgggccaagtacatccccgccttctgcgagctgcccctggacgaccaggtggccctgctgagagcccacgccggcgagcacctgctgctgggcgccaccaagagaagcatggtgttcaaggacgtgctgctgctgggcaacgactacatcgtgcccagacactgccccgagctggccgagatgagcagagtgagcatcagaatcctggacgagctggtgctgcccttccaggagctgcagatcgacgacaacgagtacgcctacctgaaggccatcatcttcttcgaccccgacgccaagggcctgagcgaccccggcaagatcaagagactgagagcccaggtgcaggtgagcctggaggactacatcaacgacagacagtacgacagcagaggcagattcggcgagctgctgctgctgctgcccaccctgcagagcatcacctggcagatgatcgagcagatccagttcatcaagctgttcggcatggccaagatcgacaacctgctgcaggagatgctgctgggcggcgcccccagcgacgccccccacgcccaccaccccctgcacccccacctgatgcaggagcacatgggcaccaacgtgatcgtggccaacaccatgcccacccacctgagcaacggccagatgtgcgagtggcccagacccagaggccaggccgccgcccccgaggccccccagcccgccccccccggcggcagcggcagcgagccctacaagctgctgcccggcgccgtggccaccatcgtgagacccctgagcgccatcccccagcccaccatcaccaagcaggaggtgatctgaggactagtccctgttcccagagcccacttttttttctttttttgaaataaaatagcctgtctttcagatctcaaaggctcttttcagagccaccaaaaaaaaaaaaaaaaaaaaaaaaaaaaaaaaaaaaaaaaaaaaaaaaaaaaaaaaaaaaaaaaaaaaaaaaaaaaaaaaaaaaaaaaaaaaaaaaaaaaa

SEQ ID NO: 4024 - RNA, 1586 nt, synthetic construct
  misc_feature 1..1586: note = mRNA a-1 (hSL-A100) (opt4) from Homo sapiens__NP_000448.3__HNF4A(39-474)(S142A_S143A_S148A_T166A _S167A_S313A_S378A_T429A_T432A_S436A_K458R)
  source 1..1586: mol_type = other RNA
aggagagtcccgcagtcggcgtccagcggctctgcttgttcgtgtgtgtgtcgttgcaggccttattcaagcttaccatggacaccagccccagcgagggcaccaacctgaacgcccccaacagcctgggcgtgagcgccctgtgcgccatctgcggcgacagagccaccggcaagcactacggcgccagcagctgcgacggctgcaagggcttcttcagaagaagcgtgagaaagaaccacatgtacagctgcagattcagcagacagtgcgtggtggacaaggacaagagaaaccagtgcagatactgcagactgaagaagtgcttcagagccggcatgaagaaggaggccgtgcagaacgagagagacagaatcagcaccagaagagccgcctacgaggacagcgccctgcccagcatcaacgccctgctgcaggccgaggtgctgagcagacagatcgccgcccccgtgagcggcatcaacggcgacatcagagccaagaagatcgccagcatcgccgacgtgtgcgagagcatgaaggagcagctgctggtgctggtggagtgggccaagtacatccccgccttctgcgagctgcccctggacgaccaggtggccctgctgagagcccacgccggcgagcacctgctgctgggcgccaccaagagaagcatggtgttcaaggacgtgctgctgctgggcaacgactacatcgtgcccagacactgccccgagctggccgagatgagcagagtgagcatcagaatcctggacgagctggtgctgcccttccaggagctgcagatcgacgacaacgagtacgcctacctgaaggccatcatcttcttcgaccccgacgccaagggcctgagcgaccccggcaagatcaagagactgagagcccaggtgcaggtgagcctggaggactacatcaacgacagacagtacgacagcagaggcagattcggcgagctgctgctgctgctgcccaccctgcagagcatcacctggcagatgatcgagcagatccagttcatcaagctgttcggcatggccaagatcgacaacctgctgcaggagatgctgctgggcggcgcccccagcgacgccccccacgcccaccaccccctgcacccccacctgatgcaggagcacatgggcaccaacgtgatcgtggccaacaccatgcccacccacctgagcaacggccagatgtgcgagtggcccagacccagaggccaggccgccgcccccgaggccccccagcccgccccccccggcggcagcggcagcgagccctacaagctgctgcccggcgccgtggccaccatcgtgagacccctgagcgccatcccccagcccaccatcaccaagcaggaggtgatctgaggactagtccctgttcccagagcccacttttttttctttttttgaaataaaatagcctgtctttcagatctcaaaggctcttttcagagccaccaaaaaaaaaaaaaaaaaaaaaaaaaaaaaaaaaaaaaaaaaaaaaaaaaaaaaaaaaaaaaaaaaaaaaaaaaaaaaaaaaaaaaaaaaaaaaaaaaaaaa

SEQ ID NO: 4025 - RNA, 1586 nt, synthetic construct
  misc_feature 1..1586: note = mRNA a-1 (hSL-A100) (opt4) from Homo sapiens__NP_000448.3__HNF4A(39-474)(S87A_S142A_S143A_S148A_ T166A_S167A_S313A_S378A_T429A_T432A_S436A_K458R)
  source 1..1586: mol_type = other RNA
aggagagtcccgcagtcggcgtccagcggctctgcttgttcgtgtgtgtgtcgttgcaggccttattcaagcttaccatggacaccagccccagcgagggcaccaacctgaacgcccccaacagcctgggcgtgagcgccctgtgcgccatctgcggcgacagagccaccggcaagcactacggcgccagcagctgcgacggctgcaagggcttcttcagaagagccgtgagaaagaaccacatgtacagctgcagattcagcagacagtgcgtggtggacaaggacaagagaaaccagtgcagatactgcagactgaagaagtgcttcagagccggcatgaagaaggaggccgtgcagaacgagagagacagaatcagcaccagaagagccgcctacgaggacagcgccctgcccagcatcaacgccctgctgcaggccgaggtgctgagcagacagatcgccgcccccgtgagcggcatcaacggcgacatcagagccaagaagatcgccagcatcgccgacgtgtgcgagagcatgaaggagcagctgctggtgctggtggagtgggccaagtacatccccgccttctgcgagctgcccctggacgaccaggtggccctgctgagagcccacgccggcgagcacctgctgctgggcgccaccaagagaagcatggtgttcaaggacgtgctgctgctgggcaacgactacatcgtgcccagacactgccccgagctggccgagatgagcagagtgagcatcagaatcctggacgagctggtgctgcccttccaggagctgcagatcgacgacaacgagtacgcctacctgaaggccatcatcttcttcgaccccgacgccaagggcctgagcgaccccggcaagatcaagagactgagagcccaggtgcaggtgagcctggaggactacatcaacgacagacagtacgacagcagaggcagattcggcgagctgctgctgctgctgcccaccctgcagagcatcacctggcagatgatcgagcagatccagttcatcaagctgttcggcatggccaagatcgacaacctgctgcaggagatgctgctgggcggcgcccccagcgacgccccccacgcccaccaccccctgcacccccacctgatgcaggagcacatgggcaccaacgtgatcgtggccaacaccatgcccacccacctgagcaacggccagatgtgcgagtggcccagacccagaggccaggccgccgcccccgaggccccccagcccgccccccccggcggcagcggcagcgagccctacaagctgctgcccggcgccgtggccaccatcgtgagacccctgagcgccatcccccagcccaccatcaccaagcaggaggtgatctgaggactagtccctgttcccagagcccacttttttttctttttttgaaataaaatagcctgtctttcagatctcaaaggctcttttcagagccaccaaaaaaaaaaaaaaaaaaaaaaaaaaaaaaaaaaaaaaaaaaaaaaaaaaaaaaaaaaaaaaaaaaaaaaaaaaaaaaaaaaaaaaaaaaaaaaaaaaaaa

SEQ ID NO: 4026 - RNA, 1586 nt, synthetic construct
  misc_feature 1..1586: note = mRNA a-1 (hSL-A100) (opt4) from Homo sapiens__NP_000448.3__HNF4A(39-474)(S87A_K106R_K108R_K126R_ K127R_S142A_S143A_S148A_T166A_S167A_S313A_S378A_T429A_T432A _S436A_K458R)
  source 1..1586: mol_type = other RNA
aggagagtcccgcagtcggcgtccagcggctctgcttgttcgtgtgtgtgtcgttgcaggccttattcaagcttaccatggacaccagccccagcgagggcaccaacctgaacgcccccaacagcctgggcgtgagcgccctgtgcgccatctgcggcgacagagccaccggcaagcactacggcgccagcagctgcgacggctgcaagggcttcttcagaagagccgtgagaaagaaccacatgtacagctgcagattcagcagacagtgcgtggtggacagagacagaagaaaccagtgcagatactgcagactgaagaagtgcttcagagccggcatgagaagagaggccgtgcagaacgagagagacagaatcagcaccagaagagccgcctacgaggacagcgccctgcccagcatcaacgccctgctgcaggccgaggtgctgagcagacagatcgccgcccccgtgagcggcatcaacggcgacatcagagccaagaagatcgccagcatcgccgacgtgtgcgagagcatgaaggagcagctgctggtgctggtggagtgggccaagtacatccccgccttctgcgagctgcccctggacgaccaggtggccctgctgagagcccacgccggcgagcacctgctgctgggcgccaccaagagaagcatggtgttcaaggacgtgctgctgctgggcaacgactacatcgtgcccagacactgccccgagctggccgagatgagcagagtgagcatcagaatcctggacgagctggtgctgcccttccaggagctgcagatcgacgacaacgagtacgcctacctgaaggccatcatcttcttcgaccccgacgccaagggcctgagcgaccccggcaagatcaagagactgagagcccaggtgcaggtgagcctggaggactacatcaacgacagacagtacgacagcagaggcagattcggcgagctgctgctgctgctgcccaccctgcagagcatcacctggcagatgatcgagcagatccagttcatcaagctgttcggcatggccaagatcgacaacctgctgcaggagatgctgctgggcggcgcccccagcgacgccccccacgcccaccaccccctgcacccccacctgatgcaggagcacatgggcaccaacgtgatcgtggccaacaccatgcccacccacctgagcaacggccagatgtgcgagtggcccagacccagaggccaggccgccgcccccgaggccccccagcccgccccccccggcggcagcggcagcgagccctacaagctgctgcccggcgccgtggccaccatcgtgagacccctgagcgccatcccccagcccaccatcaccaagcaggaggtgatctgaggactagtccctgttcccagagcccacttttttttctttttttgaaataaaatagcctgtctttcagatctcaaaggctcttttcagagccaccaaaaaaaaaaaaaaaaaaaaaaaaaaaaaaaaaaaaaaaaaaaaaaaaaaaaaaaaaaaaaaaaaaaaaaaaaaaaaaaaaaaaaaaaaaaaaaaaaaaaa

SEQ ID NO: 4027 - RNA, 1586 nt, synthetic construct
  misc_feature 1..1586: note = mRNA a-1 (hSL-A100) (opt4) from Homo sapiens__NP_000448.3__HNF4A(39-474)(S87A_K106R_K108R_K126R_ K127R)
  source 1..1586: mol_type = other RNA
aggagagtcccgcagtcggcgtccagcggctctgcttgttcgtgtgtgtgtcgttgcaggccttattcaagcttaccatggacaccagccccagcgagggcaccaacctgaacgcccccaacagcctgggcgtgagcgccctgtgcgccatctgcggcgacagagccaccggcaagcactacggcgccagcagctgcgacggctgcaagggcttcttcagaagagccgtgagaaagaaccacatgtacagctgcagattcagcagacagtgcgtggtggacagagacagaagaaaccagtgcagatactgcagactgaagaagtgcttcagagccggcatgagaagagaggccgtgcagaacgagagagacagaatcagcaccagaagaagcagctacgaggacagcagcctgcccagcatcaacgccctgctgcaggccgaggtgctgagcagacagatcaccagccccgtgagcggcatcaacggcgacatcagagccaagaagatcgccagcatcgccgacgtgtgcgagagcatgaaggagcagctgctggtgctggtggagtgggccaagtacatccccgccttctgcgagctgcccctggacgaccaggtggccctgctgagagcccacgccggcgagcacctgctgctgggcgccaccaagagaagcatggtgttcaaggacgtgctgctgctgggcaacgactacatcgtgcccagacactgccccgagctggccgagatgagcagagtgagcatcagaatcctggacgagctggtgctgcccttccaggagctgcagatcgacgacaacgagtacgcctacctgaaggccatcatcttcttcgaccccgacgccaagggcctgagcgaccccggcaagatcaagagactgagaagccaggtgcaggtgagcctggaggactacatcaacgacagacagtacgacagcagaggcagattcggcgagctgctgctgctgctgcccaccctgcagagcatcacctggcagatgatcgagcagatccagttcatcaagctgttcggcatggccaagatcgacaacctgctgcaggagatgctgctgggcggcagccccagcgacgccccccacgcccaccaccccctgcacccccacctgatgcaggagcacatgggcaccaacgtgatcgtggccaacaccatgcccacccacctgagcaacggccagatgtgcgagtggcccagacccagaggccaggccgccacccccgagaccccccagcccagcccccccggcggcagcggcagcgagccctacaagctgctgcccggcgccgtggccaccatcgtgaagcccctgagcgccatcccccagcccaccatcaccaagcaggaggtgatctgaggactagtccctgttcccagagcccacttttttttctttttttgaaataaaatagcctgtctttcagatctcaaaggctcttttcagagccaccaaaaaaaaaaaaaaaaaaaaaaaaaaaaaaaaaaaaaaaaaaaaaaaaaaaaaaaaaaaaaaaaaaaaaaaaaaaaaaaaaaaaaaaaaaaaaaaaaaaaa

SEQ ID NO: 4028 - RNA, 1586 nt, synthetic construct
  misc_feature 1..1586: note = mRNA a-1 (hSL-A100) (opt4) from Homo sapiens__NP_000448.3__HNF4A(39-474)(S87A_K106R_K108R_K126R_ K127R_S142A_S143A_S148A_T166A_S167A_S313A_S378A_T429A_T432A _S436A_K458R_S461A)
  source 1..1586: mol_type = other RNA
aggagagtcccgcagtcggcgtccagcggctctgcttgttcgtgtgtgtgtcgttgcaggccttattcaagcttaccatggacaccagccccagcgagggcaccaacctgaacgcccccaacagcctgggcgtgagcgccctgtgcgccatctgcggcgacagagccaccggcaagcactacggcgccagcagctgcgacggctgcaagggcttcttcagaagagccgtgagaaagaaccacatgtacagctgcagattcagcagacagtgcgtggtggacagagacagaagaaaccagtgcagatactgcagactgaagaagtgcttcagagccggcatgagaagagaggccgtgcagaacgagagagacagaatcagcaccagaagagccgcctacgaggacagcgccctgcccagcatcaacgccctgctgcaggccgaggtgctgagcagacagatcgccgcccccgtgagcggcatcaacggcgacatcagagccaagaagatcgccagcatcgccgacgtgtgcgagagcatgaaggagcagctgctggtgctggtggagtgggccaagtacatccccgccttctgcgagctgcccctggacgaccaggtggccctgctgagagcccacgccggcgagcacctgctgctgggcgccaccaagagaagcatggtgttcaaggacgtgctgctgctgggcaacgactacatcgtgcccagacactgccccgagctggccgagatgagcagagtgagcatcagaatcctggacgagctggtgctgcccttccaggagctgcagatcgacgacaacgagtacgcctacctgaaggccatcatcttcttcgaccccgacgccaagggcctgagcgaccccggcaagatcaagagactgagagcccaggtgcaggtgagcctggaggactacatcaacgacagacagtacgacagcagaggcagattcggcgagctgctgctgctgctgcccaccctgcagagcatcacctggcagatgatcgagcagatccagttcatcaagctgttcggcatggccaagatcgacaacctgctgcaggagatgctgctgggcggcgcccccagcgacgccccccacgcccaccaccccctgcacccccacctgatgcaggagcacatgggcaccaacgtgatcgtggccaacaccatgcccacccacctgagcaacggccagatgtgcgagtggcccagacccagaggccaggccgccgcccccgaggccccccagcccgccccccccggcggcagcggcagcgagccctacaagctgctgcccggcgccgtggccaccatcgtgagacccctggccgccatcccccagcccaccatcaccaagcaggaggtgatctgaggactagtccctgttcccagagcccacttttttttctttttttgaaataaaatagcctgtctttcagatctcaaaggctcttttcagagccaccaaaaaaaaaaaaaaaaaaaaaaaaaaaaaaaaaaaaaaaaaaaaaaaaaaaaaaaaaaaaaaaaaaaaaaaaaaaaaaaaaaaaaaaaaaaaaaaaaaaaa

SEQ ID NO: 4029 - RNA, 1586 nt, synthetic construct
  misc_feature 1..1586: note = mRNA a-1 (hSL-A100) (opt4) from Homo sapiens__NP_000448.3__HNF4A(39-474)(S87A_K106R_K108R_K126R_ K127R_S142A_S143A_S148A_T166A_S167A_S313A_S378A_T429A_T432A _S436A_K458R_S461E)
  source 1..1586: mol_type = other RNA
aggagagtcccgcagtcggcgtccagcggctctgcttgttcgtgtgtgtgtcgttgcaggccttattcaagcttaccatggacaccagccccagcgagggcaccaacctgaacgcccccaacagcctgggcgtgagcgccctgtgcgccatctgcggcgacagagccaccggcaagcactacggcgccagcagctgcgacggctgcaagggcttcttcagaagagccgtgagaaagaaccacatgtacagctgcagattcagcagacagtgcgtggtggacagagacagaagaaaccagtgcagatactgcagactgaagaagtgcttcagagccggcatgagaagagaggccgtgcagaacgagagagacagaatcagcaccagaagagccgcctacgaggacagcgccctgcccagcatcaacgccctgctgcaggccgaggtgctgagcagacagatcgccgcccccgtgagcggcatcaacggcgacatcagagccaagaagatcgccagcatcgccgacgtgtgcgagagcatgaaggagcagctgctggtgctggtggagtgggccaagtacatccccgccttctgcgagctgcccctggacgaccaggtggccctgctgagagcccacgccggcgagcacctgctgctgggcgccaccaagagaagcatggtgttcaaggacgtgctgctgctgggcaacgactacatcgtgcccagacactgccccgagctggccgagatgagcagagtgagcatcagaatcctggacgagctggtgctgcccttccaggagctgcagatcgacgacaacgagtacgcctacctgaaggccatcatcttcttcgaccccgacgccaagggcctgagcgaccccggcaagatcaagagactgagagcccaggtgcaggtgagcctggaggactacatcaacgacagacagtacgacagcagaggcagattcggcgagctgctgctgctgctgcccaccctgcagagcatcacctggcagatgatcgagcagatccagttcatcaagctgttcggcatggccaagatcgacaacctgctgcaggagatgctgctgggcggcgcccccagcgacgccccccacgcccaccaccccctgcacccccacctgatgcaggagcacatgggcaccaacgtgatcgtggccaacaccatgcccacccacctgagcaacggccagatgtgcgagtggcccagacccagaggccaggccgccgcccccgaggccccccagcccgccccccccggcggcagcggcagcgagccctacaagctgctgcccggcgccgtggccaccatcgtgagacccctggaggccatcccccagcccaccatcaccaagcaggaggtgatctgaggactagtccctgttcccagagcccacttttttttctttttttgaaataaaatagcctgtctttcagatctcaaaggctcttttcagagccaccaaaaaaaaaaaaaaaaaaaaaaaaaaaaaaaaaaaaaaaaaaaaaaaaaaaaaaaaaaaaaaaaaaaaaaaaaaaaaaaaaaaaaaaaaaaaaaaaaaaaa

SEQ ID NO: 4030 - RNA, 1586 nt, synthetic construct
  misc_feature 1..1586: note = mRNA a-1 (hSL-A100) (opt4) from Homo sapiens__NP_000448.3__HNF4A(39-474)(S87A_K106R_K108R_K126R_ K127R_S142A_S143A_S148E_T166A_S167E_S313A_S378E_T429E_T432E _S436E_K458R_S461E)
  source 1..1586: mol_type = other RNA
aggagagtcccgcagtcggcgtccagcggctctgcttgttcgtgtgtgtgtcgttgcaggccttattcaagcttaccatggacaccagccccagcgagggcaccaacctgaacgcccccaacagcctgggcgtgagcgccctgtgcgccatctgcggcgacagagccaccggcaagcactacggcgccagcagctgcgacggctgcaagggcttcttcagaagagccgtgagaaagaaccacatgtacagctgcagattcagcagacagtgcgtggtggacagagacagaagaaaccagtgcagatactgcagactgaagaagtgcttcagagccggcatgagaagagaggccgtgcagaacgagagagacagaatcagcaccagaagagccgcctacgaggacagcgagctgcccagcatcaacgccctgctgcaggccgaggtgctgagcagacagatcgccgagcccgtgagcggcatcaacggcgacatcagagccaagaagatcgccagcatcgccgacgtgtgcgagagcatgaaggagcagctgctggtgctggtggagtgggccaagtacatccccgccttctgcgagctgcccctggacgaccaggtggccctgctgagagcccacgccggcgagcacctgctgctgggcgccaccaagagaagcatggtgttcaaggacgtgctgctgctgggcaacgactacatcgtgcccagacactgccccgagctggccgagatgagcagagtgagcatcagaatcctggacgagctggtgctgcccttccaggagctgcagatcgacgacaacgagtacgcctacctgaaggccatcatcttcttcgaccccgacgccaagggcctgagcgaccccggcaagatcaagagactgagagcccaggtgcaggtgagcctggaggactacatcaacgacagacagtacgacagcagaggcagattcggcgagctgctgctgctgctgcccaccctgcagagcatcacctggcagatgatcgagcagatccagttcatcaagctgttcggcatggccaagatcgacaacctgctgcaggagatgctgctgggcggcgagcccagcgacgccccccacgcccaccaccccctgcacccccacctgatgcaggagcacatgggcaccaacgtgatcgtggccaacaccatgcccacccacctgagcaacggccagatgtgcgagtggcccagacccagaggccaggccgccgagcccgaggagccccagcccgagccccccggcggcagcggcagcgagccctacaagctgctgcccggcgccgtggccaccatcgtgagacccctggaggccatcccccagcccaccatcaccaagcaggaggtgatctgaggactagtccctgttcccagagcccacttttttttctttttttgaaataaaatagcctgtctttcagatctcaaaggctcttttcagagccaccaaaaaaaaaaaaaaaaaaaaaaaaaaaaaaaaaaaaaaaaaaaaaaaaaaaaaaaaaaaaaaaaaaaaaaaaaaaaaaaaaaaaaaaaaaaaaaaaaaaaa

SEQ ID NO: 4031 - RNA, 1586 nt, synthetic construct
  misc_feature 1..1586: note = mRNA a-1 (hSL-A100) (opt4) from Homo sapiens__NP_000448.3__HNF4A(39-474)(S87A_K106R_K108R_K126R_ K127R_S142A_S143A_S148A_T166A_S167A_K179R_K180R_S313A_S378A _T429A_T432A_S436A_K458R_S461E)
  source 1..1586: mol_type = other RNA
aggagagtcccgcagtcggcgtccagcggctctgcttgttcgtgtgtgtgtcgttgcaggccttattcaagcttaccatggacaccagccccagcgagggcaccaacctgaacgcccccaacagcctgggcgtgagcgccctgtgcgccatctgcggcgacagagccaccggcaagcactacggcgccagcagctgcgacggctgcaagggcttcttcagaagagccgtgagaaagaaccacatgtacagctgcagattcagcagacagtgcgtggtggacagagacagaagaaaccagtgcagatactgcagactgaagaagtgcttcagagccggcatgagaagagaggccgtgcagaacgagagagacagaatcagcaccagaagagccgcctacgaggacagcgccctgcccagcatcaacgccctgctgcaggccgaggtgctgagcagacagatcgccgcccccgtgagcggcatcaacggcgacatcagagccagaagaatcgccagcatcgccgacgtgtgcgagagcatgaaggagcagctgctggtgctggtggagtgggccaagtacatccccgccttctgcgagctgcccctggacgaccaggtggccctgctgagagcccacgccggcgagcacctgctgctgggcgccaccaagagaagcatggtgttcaaggacgtgctgctgctgggcaacgactacatcgtgcccagacactgccccgagctggccgagatgagcagagtgagcatcagaatcctggacgagctggtgctgcccttccaggagctgcagatcgacgacaacgagtacgcctacctgaaggccatcatcttcttcgaccccgacgccaagggcctgagcgaccccggcaagatcaagagactgagagcccaggtgcaggtgagcctggaggactacatcaacgacagacagtacgacagcagaggcagattcggcgagctgctgctgctgctgcccaccctgcagagcatcacctggcagatgatcgagcagatccagttcatcaagctgttcggcatggccaagatcgacaacctgctgcaggagatgctgctgggcggcgcccccagcgacgccccccacgcccaccaccccctgcacccccacctgatgcaggagcacatgggcaccaacgtgatcgtggccaacaccatgcccacccacctgagcaacggccagatgtgcgagtggcccagacccagaggccaggccgccgcccccgaggccccccagcccgccccccccggcggcagcggcagcgagccctacaagctgctgcccggcgccgtggccaccatcgtgagacccctggaggccatcccccagcccaccatcaccaagcaggaggtgatctgaggactagtccctgttcccagagcccacttttttttctttttttgaaataaaatagcctgtctttcagatctcaaaggctcttttcagagccaccaaaaaaaaaaaaaaaaaaaaaaaaaaaaaaaaaaaaaaaaaaaaaaaaaaaaaaaaaaaaaaaaaaaaaaaaaaaaaaaaaaaaaaaaaaaaaaaaaaaaa

SEQ ID NO: 4032 - RNA, 1586 nt, synthetic construct
  misc_feature 1..1586: note = mRNA a-1 (hSL-A100) (opt4) from Homo sapiens__NP_000448.3__HNF4A(39-474)(S87A_K106R_K108R_K126R_ K127R_S142A_S143A_S148A_T166A_S167A_K300R_K307R_K309R_S313A _S378A_T429A_T432A_S436A_K458R_S461E)
  source 1..1586: mol_type = other RNA
aggagagtcccgcagtcggcgtccagcggctctgcttgttcgtgtgtgtgtcgttgcaggccttattcaagcttaccatggacaccagccccagcgagggcaccaacctgaacgcccccaacagcctgggcgtgagcgccctgtgcgccatctgcggcgacagagccaccggcaagcactacggcgccagcagctgcgacggctgcaagggcttcttcagaagagccgtgagaaagaaccacatgtacagctgcagattcagcagacagtgcgtggtggacagagacagaagaaaccagtgcagatactgcagactgaagaagtgcttcagagccggcatgagaagagaggccgtgcagaacgagagagacagaatcagcaccagaagagccgcctacgaggacagcgccctgcccagcatcaacgccctgctgcaggccgaggtgctgagcagacagatcgccgcccccgtgagcggcatcaacggcgacatcagagccaagaagatcgccagcatcgccgacgtgtgcgagagcatgaaggagcagctgctggtgctggtggagtgggccaagtacatccccgccttctgcgagctgcccctggacgaccaggtggccctgctgagagcccacgccggcgagcacctgctgctgggcgccaccaagagaagcatggtgttcaaggacgtgctgctgctgggcaacgactacatcgtgcccagacactgccccgagctggccgagatgagcagagtgagcatcagaatcctggacgagctggtgctgcccttccaggagctgcagatcgacgacaacgagtacgcctacctgaaggccatcatcttcttcgaccccgacgccagaggcctgagcgaccccggcagaatcagaagactgagagcccaggtgcaggtgagcctggaggactacatcaacgacagacagtacgacagcagaggcagattcggcgagctgctgctgctgctgcccaccctgcagagcatcacctggcagatgatcgagcagatccagttcatcaagctgttcggcatggccaagatcgacaacctgctgcaggagatgctgctgggcggcgcccccagcgacgccccccacgcccaccaccccctgcacccccacctgatgcaggagcacatgggcaccaacgtgatcgtggccaacaccatgcccacccacctgagcaacggccagatgtgcgagtggcccagacccagaggccaggccgccgcccccgaggccccccagcccgccccccccggcggcagcggcagcgagccctacaagctgctgcccggcgccgtggccaccatcgtgagacccctggaggccatcccccagcccaccatcaccaagcaggaggtgatctgaggactagtccctgttcccagagcccacttttttttctttttttgaaataaaatagcctgtctttcagatctcaaaggctcttttcagagccaccaaaaaaaaaaaaaaaaaaaaaaaaaaaaaaaaaaaaaaaaaaaaaaaaaaaaaaaaaaaaaaaaaaaaaaaaaaaaaaaaaaaaaaaaaaaaaaaaaaaaa

SEQ ID NO: 4033 - RNA, 1586 nt, synthetic construct
  misc_feature 1..1586: note = mRNA a-1 (hSL-A100) (opt4) from Homo sapiens__NP_000448.3__HNF4A(39-474)(S87A_K106R_K108R_K126R_ K127R_S142A_S143A_S148A_T166A_S167A_S313A_S378A_T429A_T432A _S436A_K447R_K458R_S461E_K470R)
  source 1..1586: mol_type = other RNA
aggagagtcccgcagtcggcgtccagcggctctgcttgttcgtgtgtgtgtcgttgcaggccttattcaagcttaccatggacaccagccccagcgagggcaccaacctgaacgcccccaacagcctgggcgtgagcgccctgtgcgccatctgcggcgacagagccaccggcaagcactacggcgccagcagctgcgacggctgcaagggcttcttcagaagagccgtgagaaagaaccacatgtacagctgcagattcagcagacagtgcgtggtggacagagacagaagaaaccagtgcagatactgcagactgaagaagtgcttcagagccggcatgagaagagaggccgtgcagaacgagagagacagaatcagcaccagaagagccgcctacgaggacagcgccctgcccagcatcaacgccctgctgcaggccgaggtgctgagcagacagatcgccgcccccgtgagcggcatcaacggcgacatcagagccaagaagatcgccagcatcgccgacgtgtgcgagagcatgaaggagcagctgctggtgctggtggagtgggccaagtacatccccgccttctgcgagctgcccctggacgaccaggtggccctgctgagagcccacgccggcgagcacctgctgctgggcgccaccaagagaagcatggtgttcaaggacgtgctgctgctgggcaacgactacatcgtgcccagacactgccccgagctggccgagatgagcagagtgagcatcagaatcctggacgagctggtgctgcccttccaggagctgcagatcgacgacaacgagtacgcctacctgaaggccatcatcttcttcgaccccgacgccaagggcctgagcgaccccggcaagatcaagagactgagagcccaggtgcaggtgagcctggaggactacatcaacgacagacagtacgacagcagaggcagattcggcgagctgctgctgctgctgcccaccctgcagagcatcacctggcagatgatcgagcagatccagttcatcaagctgttcggcatggccaagatcgacaacctgctgcaggagatgctgctgggcggcgcccccagcgacgccccccacgcccaccaccccctgcacccccacctgatgcaggagcacatgggcaccaacgtgatcgtggccaacaccatgcccacccacctgagcaacggccagatgtgcgagtggcccagacccagaggccaggccgccgcccccgaggccccccagcccgccccccccggcggcagcggcagcgagccctacagactgctgcccggcgccgtggccaccatcgtgagacccctggaggccatcccccagcccaccatcaccagacaggaggtgatctgaggactagtccctgttcccagagcccacttttttttctttttttgaaataaaatagcctgtctttcagatctcaaaggctcttttcagagccaccaaaaaaaaaaaaaaaaaaaaaaaaaaaaaaaaaaaaaaaaaaaaaaaaaaaaaaaaaaaaaaaaaaaaaaaaaaaaaaaaaaaaaaaaaaaaaaaaaaaaa

SEQ ID NO: 4034 - RNA, 1586 nt, synthetic construct
  misc_feature 1..1586: note = mRNA a-1 (hSL-A100) (opt4) from Homo sapiens__NP_000448.3__HNF4A(39-474)(S87A_K106R_K108R_K126R_ K127R_S142A_S143A_S148A_T166A_S167A_K179R_K180R_K234R_K300R _K307R_K309R_S313A_S378A_T429A_T432A_S436A_K447R_K458R_S461 E_K470R)
  source 1..1586: mol_type = other RNA
aggagagtcccgcagtcggcgtccagcggctctgcttgttcgtgtgtgtgtcgttgcaggccttattcaagcttaccatggacaccagccccagcgagggcaccaacctgaacgcccccaacagcctgggcgtgagcgccctgtgcgccatctgcggcgacagagccaccggcaagcactacggcgccagcagctgcgacggctgcaagggcttcttcagaagagccgtgagaaagaaccacatgtacagctgcagattcagcagacagtgcgtggtggacagagacagaagaaaccagtgcagatactgcagactgaagaagtgcttcagagccggcatgagaagagaggccgtgcagaacgagagagacagaatcagcaccagaagagccgcctacgaggacagcgccctgcccagcatcaacgccctgctgcaggccgaggtgctgagcagacagatcgccgcccccgtgagcggcatcaacggcgacatcagagccagaagaatcgccagcatcgccgacgtgtgcgagagcatgaaggagcagctgctggtgctggtggagtgggccaagtacatccccgccttctgcgagctgcccctggacgaccaggtggccctgctgagagcccacgccggcgagcacctgctgctgggcgccaccagaagaagcatggtgttcaaggacgtgctgctgctgggcaacgactacatcgtgcccagacactgccccgagctggccgagatgagcagagtgagcatcagaatcctggacgagctggtgctgcccttccaggagctgcagatcgacgacaacgagtacgcctacctgaaggccatcatcttcttcgaccccgacgccagaggcctgagcgaccccggcagaatcagaagactgagagcccaggtgcaggtgagcctggaggactacatcaacgacagacagtacgacagcagaggcagattcggcgagctgctgctgctgctgcccaccctgcagagcatcacctggcagatgatcgagcagatccagttcatcaagctgttcggcatggccaagatcgacaacctgctgcaggagatgctgctgggcggcgcccccagcgacgccccccacgcccaccaccccctgcacccccacctgatgcaggagcacatgggcaccaacgtgatcgtggccaacaccatgcccacccacctgagcaacggccagatgtgcgagtggcccagacccagaggccaggccgccgcccccgaggccccccagcccgccccccccggcggcagcggcagcgagccctacagactgctgcccggcgccgtggccaccatcgtgagacccctggaggccatcccccagcccaccatcaccagacaggaggtgatctgaggactagtccctgttcccagagcccacttttttttctttttttgaaataaaatagcctgtctttcagatctcaaaggctcttttcagagccaccaaaaaaaaaaaaaaaaaaaaaaaaaaaaaaaaaaaaaaaaaaaaaaaaaaaaaaaaaaaaaaaaaaaaaaaaaaaaaaaaaaaaaaaaaaaaaaaaaaaaa

SEQ ID NO: 4035 - RNA, 1586 nt, synthetic construct
  misc_feature 1..1586: note = mRNA a-1 (hSL-A100) (opt4) from Homo sapiens__NP_000448.3__HNF4A(39-474)(S87A_S95A_S99A_K106R_K1 08R_K126R_K127R_S142A_S143A_S148A_T166A_S167A_S313A_S378A_T 429A_T432A_S436A_K458R_S461E)
  source 1..1586: mol_type = other RNA
aggagagtcccgcagtcggcgtccagcggctctgcttgttcgtgtgtgtgtcgttgcaggccttattcaagcttaccatggacaccagccccagcgagggcaccaacctgaacgcccccaacagcctgggcgtgagcgccctgtgcgccatctgcggcgacagagccaccggcaagcactacggcgccagcagctgcgacggctgcaagggcttcttcagaagagccgtgagaaagaaccacatgtacgcctgcagattcgccagacagtgcgtggtggacagagacagaagaaaccagtgcagatactgcagactgaagaagtgcttcagagccggcatgagaagagaggccgtgcagaacgagagagacagaatcagcaccagaagagccgcctacgaggacagcgccctgcccagcatcaacgccctgctgcaggccgaggtgctgagcagacagatcgccgcccccgtgagcggcatcaacggcgacatcagagccaagaagatcgccagcatcgccgacgtgtgcgagagcatgaaggagcagctgctggtgctggtggagtgggccaagtacatccccgccttctgcgagctgcccctggacgaccaggtggccctgctgagagcccacgccggcgagcacctgctgctgggcgccaccaagagaagcatggtgttcaaggacgtgctgctgctgggcaacgactacatcgtgcccagacactgccccgagctggccgagatgagcagagtgagcatcagaatcctggacgagctggtgctgcccttccaggagctgcagatcgacgacaacgagtacgcctacctgaaggccatcatcttcttcgaccccgacgccaagggcctgagcgaccccggcaagatcaagagactgagagcccaggtgcaggtgagcctggaggactacatcaacgacagacagtacgacagcagaggcagattcggcgagctgctgctgctgctgcccaccctgcagagcatcacctggcagatgatcgagcagatccagttcatcaagctgttcggcatggccaagatcgacaacctgctgcaggagatgctgctgggcggcgcccccagcgacgccccccacgcccaccaccccctgcacccccacctgatgcaggagcacatgggcaccaacgtgatcgtggccaacaccatgcccacccacctgagcaacggccagatgtgcgagtggcccagacccagaggccaggccgccgcccccgaggccccccagcccgccccccccggcggcagcggcagcgagccctacaagctgctgcccggcgccgtggccaccatcgtgagacccctggaggccatcccccagcccaccatcaccaagcaggaggtgatctgaggactagtccctgttcccagagcccacttttttttctttttttgaaataaaatagcctgtctttcagatctcaaaggctcttttcagagccaccaaaaaaaaaaaaaaaaaaaaaaaaaaaaaaaaaaaaaaaaaaaaaaaaaaaaaaaaaaaaaaaaaaaaaaaaaaaaaaaaaaaaaaaaaaaaaaaaaaaaa

SEQ ID NO: 4036 - RNA, 1586 nt, synthetic construct
  misc_feature 1..1586: note = mRNA a-1 (hSL-A100) (opt4) from Homo sapiens__NP_000448.3__HNF4A(39-474)(S87A_K106R_K108R_K126R_ K127R_S138A_T139A_S142A_S143A_S148A_T166A_S167A_S313A_S378A _T429A_T432A_S436A_K458R_S461E)
  source 1..1586: mol_type = other RNA
aggagagtcccgcagtcggcgtccagcggctctgcttgttcgtgtgtgtgtcgttgcaggccttattcaagcttaccatggacaccagccccagcgagggcaccaacctgaacgcccccaacagcctgggcgtgagcgccctgtgcgccatctgcggcgacagagccaccggcaagcactacggcgccagcagctgcgacggctgcaagggcttcttcagaagagccgtgagaaagaaccacatgtacagctgcagattcagcagacagtgcgtggtggacagagacagaagaaaccagtgcagatactgcagactgaagaagtgcttcagagccggcatgagaagagaggccgtgcagaacgagagagacagaatcgccgccagaagagccgcctacgaggacagcgccctgcccagcatcaacgccctgctgcaggccgaggtgctgagcagacagatcgccgcccccgtgagcggcatcaacggcgacatcagagccaagaagatcgccagcatcgccgacgtgtgcgagagcatgaaggagcagctgctggtgctggtggagtgggccaagtacatccccgccttctgcgagctgcccctggacgaccaggtggccctgctgagagcccacgccggcgagcacctgctgctgggcgccaccaagagaagcatggtgttcaaggacgtgctgctgctgggcaacgactacatcgtgcccagacactgccccgagctggccgagatgagcagagtgagcatcagaatcctggacgagctggtgctgcccttccaggagctgcagatcgacgacaacgagtacgcctacctgaaggccatcatcttcttcgaccccgacgccaagggcctgagcgaccccggcaagatcaagagactgagagcccaggtgcaggtgagcctggaggactacatcaacgacagacagtacgacagcagaggcagattcggcgagctgctgctgctgctgcccaccctgcagagcatcacctggcagatgatcgagcagatccagttcatcaagctgttcggcatggccaagatcgacaacctgctgcaggagatgctgctgggcggcgcccccagcgacgccccccacgcccaccaccccctgcacccccacctgatgcaggagcacatgggcaccaacgtgatcgtggccaacaccatgcccacccacctgagcaacggccagatgtgcgagtggcccagacccagaggccaggccgccgcccccgaggccccccagcccgccccccccggcggcagcggcagcgagccctacaagctgctgcccggcgccgtggccaccatcgtgagacccctggaggccatcccccagcccaccatcaccaagcaggaggtgatctgaggactagtccctgttcccagagcccacttttttttctttttttgaaataaaatagcctgtctttcagatctcaaaggctcttttcagagccaccaaaaaaaaaaaaaaaaaaaaaaaaaaaaaaaaaaaaaaaaaaaaaaaaaaaaaaaaaaaaaaaaaaaaaaaaaaaaaaaaaaaaaaaaaaaaaaaaaaaaa

SEQ ID NO: 4037 - RNA, 1586 nt, synthetic construct
  misc_feature 1..1586: note = mRNA a-1 (hSL-A100) (opt4) from Homo sapiens__NP_000448.3__HNF4A(39-474)(S87A_S95A_S99A_K106R_K1 08R_K126R_K127R_S138A_T139A_S142A_S143A_S148A_T166A_S167A_S 313A_S378A_T429A_T432A_S436A_K458R_S461E)
  source 1..1586: mol_type = other RNA
aggagagtcccgcagtcggcgtccagcggctctgcttgttcgtgtgtgtgtcgttgcaggccttattcaagcttaccatggacaccagccccagcgagggcaccaacctgaacgcccccaacagcctgggcgtgagcgccctgtgcgccatctgcggcgacagagccaccggcaagcactacggcgccagcagctgcgacggctgcaagggcttcttcagaagagccgtgagaaagaaccacatgtacgcctgcagattcgccagacagtgcgtggtggacagagacagaagaaaccagtgcagatactgcagactgaagaagtgcttcagagccggcatgagaagagaggccgtgcagaacgagagagacagaatcgccgccagaagagccgcctacgaggacagcgccctgcccagcatcaacgccctgctgcaggccgaggtgctgagcagacagatcgccgcccccgtgagcggcatcaacggcgacatcagagccaagaagatcgccagcatcgccgacgtgtgcgagagcatgaaggagcagctgctggtgctggtggagtgggccaagtacatccccgccttctgcgagctgcccctggacgaccaggtggccctgctgagagcccacgccggcgagcacctgctgctgggcgccaccaagagaagcatggtgttcaaggacgtgctgctgctgggcaacgactacatcgtgcccagacactgccccgagctggccgagatgagcagagtgagcatcagaatcctggacgagctggtgctgcccttccaggagctgcagatcgacgacaacgagtacgcctacctgaaggccatcatcttcttcgaccccgacgccaagggcctgagcgaccccggcaagatcaagagactgagagcccaggtgcaggtgagcctggaggactacatcaacgacagacagtacgacagcagaggcagattcggcgagctgctgctgctgctgcccaccctgcagagcatcacctggcagatgatcgagcagatccagttcatcaagctgttcggcatggccaagatcgacaacctgctgcaggagatgctgctgggcggcgcccccagcgacgccccccacgcccaccaccccctgcacccccacctgatgcaggagcacatgggcaccaacgtgatcgtggccaacaccatgcccacccacctgagcaacggccagatgtgcgagtggcccagacccagaggccaggccgccgcccccgaggccccccagcccgccccccccggcggcagcggcagcgagccctacaagctgctgcccggcgccgtggccaccatcgtgagacccctggaggccatcccccagcccaccatcaccaagcaggaggtgatctgaggactagtccctgttcccagagcccacttttttttctttttttgaaataaaatagcctgtctttcagatctcaaaggctcttttcagagccaccaaaaaaaaaaaaaaaaaaaaaaaaaaaaaaaaaaaaaaaaaaaaaaaaaaaaaaaaaaaaaaaaaaaaaaaaaaaaaaaaaaaaaaaaaaaaaaaaaaaaa

SEQ ID NO: 4038 - RNA, 1586 nt, synthetic construct
  misc_feature 1..1586: note = mRNA a-1 (hSL-A100) (opt5) from Homo sapiens__NP_000448.3__HNF4A(39-474)
  source 1..1586: mol_type = other RNA
aggagagtcccgcagtcggcgtccagcggctctgcttgttcgtgtgtgtgtcgttgcaggccttattcaagcttaccatggacacatctcctagcgaggggaccaacctcaatgctccgaactccctgggagtgtctgccctttgcgccatctgtggcgatcgggctacagggaaacactacggagccagctcctgcgacggctgtaaggggtttttccgcagatctgtgcggaaaaatcatatgtatagctgccgcttttccagacaatgtgtcgtggataaggacaaacggaaccagtgccgctactgtagactgaagaagtgcttccgggctggaatgaaaaaggaagccgttcagaatgagcgcgatagaattagcacccggcgcagctcctatgaagacagctctctcccctccatcaacgcgctgctgcaggccgaggtgctcagcagacaaattacatctcctgtctccggcatcaatggcgatattcgggctaaaaagatcgccagcatcgctgacgtgtgtgagtccatgaaagaacagctgcttgttctggtggagtgggccaagtacattcccgcgttttgcgaactccctctggatgaccaggtcgcccttctgcgcgctcacgccggggagcatctcctgctgggagctaccaagagatctatggtgttcaaagacgtgctcctgcttggcaacgattatatcgtcccccggcactgtcctgagctggccgaaatgagcagagtttccattcgcatcctcgacgagctggtgcttccgtttcaggaactgcaaattgatgacaatgagtacgcctacctcaaggctatcattttctttgatcccgacgcgaaagggctgagcgatcctggaaagatcaaacggctgagatctcaggtgcaggtctccctcgaagactatatcaacgatcgccagtacgacagccggggcagattcggggagctgcttctgctcctgcccacgcttcaatctattacctggcagatgatcgagcagattcaatttatcaagctgttcggaatggccaaaattgataatctcctgcaggaaatgctgctcggcggcagcccttccgacgctccccatgcccaccacccgctgcatcctcaccttatgcaggagcatatggggacaaacgtgatcgttgccaataccatgcccacacacctgtctaacggacagatgtgcgaatggcctcgcccccggggccaagctgccacccccgagacgcctcagccgtctccccctgggggatccggcagcgaaccctataagctcctgcctggggcggtggctacaatcgtcaagcccctgtctgccattccgcagcctaccatcacaaaacaggaggtgatttgaggactagtccctgttcccagagcccacttttttttctttttttgaaataaaatagcctgtctttcagatctcaaaggctcttttcagagccaccaaaaaaaaaaaaaaaaaaaaaaaaaaaaaaaaaaaaaaaaaaaaaaaaaaaaaaaaaaaaaaaaaaaaaaaaaaaaaaaaaaaaaaaaaaaaaaaaaaaaa

SEQ ID NO: 4039 - RNA, 1586 nt, synthetic construct
  misc_feature 1..1586: note = mRNA a-1 (hSL-A100) (opt5) from Homo sapiens__NP_000448.3__HNF4A(39-474)(S313A)
  source 1..1586: mol_type = other RNA
aggagagtcccgcagtcggcgtccagcggctctgcttgttcgtgtgtgtgtcgttgcaggccttattcaagcttaccatggacacatctcctagcgaggggaccaacctcaatgctccgaactccctgggagtgtctgccctttgcgccatctgtggcgatcgggctacagggaaacactacggagccagctcctgcgacggctgtaaggggtttttccgcagatctgtgcggaaaaatcatatgtatagctgccgcttttccagacaatgtgtcgtggataaggacaaacggaaccagtgccgctactgtagactgaagaagtgcttccgggctggaatgaaaaaggaagccgttcagaatgagcgcgatagaattagcacccggagatcttcctatgaagacagctctctcccctccatcaacgcgctgctgcaggccgaggtgctcagccgccaaattacatctcctgtctccggcatcaatggcgatattcgggctaaaaagatcgccagcatcgctgacgtgtgtgagtccatgaaagaacagctgcttgttctggtggagtgggccaagtacattcccgcgttttgcgaactccctctggatgaccaggtcgcccttctgcgcgctcacgccggggagcatctcctgctgggagctaccaagagatctatggtgttcaaagacgtgctcctgcttggcaacgattatatcgtcccccggcactgtcctgagctggccgaaatgagcagagtttccattcgcatcctcgacgagctggtgcttccgtttcaggaactgcaaattgatgacaatgagtacgcctacctcaaggctatcattttctttgatcccgacgcgaaagggctgagcgatcctggaaagatcaaacggctgagagcccaggtgcaggtctctctcgaagactatatcaacgatcgccagtacgactcccggggcagattcggggagctgcttctgctcctgcccacgcttcaaagcattacctggcagatgatcgagcagattcaatttatcaagctgttcggaatggctaaaattgataatctcctgcaggaaatgctgctcggcggctctcctagcgacgctccccatgcccaccacccgctgcatcctcaccttatgcaggagcatatggggacaaacgtgatcgttgccaataccatgcccacacacctgtccaacggacagatgtgcgaatggcctcgcccccggggccaagccgcgacccccgagacgcctcagccgtctccccctgggggaagcggctccgaaccctataagctcctgcctggggctgtggccacaatcgtcaagcccctgagcgccattccgcagcctaccatcacaaaacaggaggtgatttgaggactagtccctgttcccagagcccacttttttttctttttttgaaataaaatagcctgtctttcagatctcaaaggctcttttcagagccaccaaaaaaaaaaaaaaaaaaaaaaaaaaaaaaaaaaaaaaaaaaaaaaaaaaaaaaaaaaaaaaaaaaaaaaaaaaaaaaaaaaaaaaaaaaaaaaaaaaaaa

SEQ ID NO: 4040 - RNA, 1586 nt, synthetic construct
  misc_feature 1..1586: note = mRNA a-1 (hSL-A100) (opt5) from Homo sapiens__NP_000448.3__HNF4A(39-474)(S313E)
  source 1..1586: mol_type = other RNA
aggagagtcccgcagtcggcgtccagcggctctgcttgttcgtgtgtgtgtcgttgcaggccttattcaagcttaccatggacacatctcctagcgaggggaccaacctcaatgctccgaactccctgggagtgtctgccctttgcgccatctgtggcgatcgggctacagggaaacactacggagccagctcctgcgacggctgtaaggggtttttccgcagatctgtgcggaaaaatcatatgtatagctgccgcttttccagacaatgtgtcgtggataaggacaaacggaaccagtgccgctactgtagactgaagaagtgcttccgggctggaatgaaaaaggaagccgttcagaatgagcgcgatagaattagcacccggagatcttcctatgaagacagctctctcccctccatcaacgcgctgctgcaggccgaggtgctcagccgccaaattacatctcctgtctccggcatcaatggcgatattcgggctaaaaagatcgccagcatcgctgacgtgtgtgagtccatgaaagaacagctgcttgttctggtggagtgggccaagtacattcccgcgttttgcgaactccctctggatgaccaggtcgcccttctgcgcgctcacgccggggagcatctcctgctgggagctaccaagagatctatggtgttcaaagacgtgctcctgcttggcaacgattatatcgtcccccggcactgtcctgagctggccgaaatgagcagagtttccattcgcatcctcgacgagctggtgcttccgtttcaggaactgcaaattgatgacaatgagtacgcctacctcaaggctatcattttctttgatcccgacgcgaaagggctgagcgatcctggaaagatcaaacggctgagagaacaggtgcaggtctctctcgaggactatatcaacgatcgccagtacgactcccggggcagattcggggagctgcttctgctcctgcccacgcttcaaagcattacctggcagatgatcgaacagattcaatttatcaagctgttcggaatggccaaaattgataatctcctgcaggagatgctgctcggcggctctcctagcgacgctccccatgcccaccacccgctgcatcctcaccttatgcaggaacatatggggacaaacgtgatcgttgccaataccatgcccacacacctgtccaacggacagatgtgcgagtggcctcgcccccggggccaagctgccacccccgaaacgcctcagccgtctccccctgggggaagcggctccgagccctataagctcctgcctggggcggtggctacaatcgtcaagcccctgagcgccattccgcagcctaccatcacaaaacaggaggtgatttgaggactagtccctgttcccagagcccacttttttttctttttttgaaataaaatagcctgtctttcagatctcaaaggctcttttcagagccaccaaaaaaaaaaaaaaaaaaaaaaaaaaaaaaaaaaaaaaaaaaaaaaaaaaaaaaaaaaaaaaaaaaaaaaaaaaaaaaaaaaaaaaaaaaaaaaaaaaaaa

SEQ ID NO: 4041 - RNA, 1586 nt, synthetic construct
  misc_feature 1..1586: note = mRNA a-1 (hSL-A100) (opt5) from Homo sapiens__NP_000448.3__HNF4A(39-474)(S142A_S143A)
  source 1..1586: mol_type = other RNA
aggagagtcccgcagtcggcgtccagcggctctgcttgttcgtgtgtgtgtcgttgcaggccttattcaagcttaccatggacacatctcctagcgaggggaccaacctcaatgctccgaactccctgggagtgtctgccctttgcgccatctgtggcgatcgggctacagggaaacactacggagccagctcctgcgacggctgtaaggggtttttccgcagatctgtgcggaaaaatcatatgtatagctgccgcttttccagacaatgtgtcgtggataaggacaaacggaaccagtgccgctactgtagactgaagaagtgcttccgggctggaatgaaaaaggaagccgttcagaatgagcgcgatagaattagcacccggcgcgcggcctatgaagactcttccctccccagcatcaacgctctgctgcaggccgaggtgctctctagacaaattacatcccctgtcagcggcatcaatggcgatattcgggctaaaaagatcgcctctatcgcggacgtgtgtgagtccatgaaagaacagctgcttgttctggtggagtgggccaagtacattcccgctttttgcgaactccctctggatgaccaggtcgcccttctgcgcgctcacgccggggagcatctcctgctgggagccaccaagagaagcatggtgttcaaagacgtgctcctgcttggcaacgattatatcgtcccccggcactgtcctgagctggctgaaatgtccagagtttctattcgcatcctcgacgagctggtgcttccgtttcaggaactgcaaattgatgacaatgagtacgcgtacctcaaggccatcattttctttgatcccgacgctaaagggctgagcgatcctggaaagatcaaacggctgagatcccaggtgcaggtcagcctcgaagactatatcaacgatcgccagtacgactctcggggcagattcggggagctgcttctgctcctgcccacgcttcaatccattacctggcagatgatcgagcagattcaatttatcaagctgttcggaatggccaaaattgataatctcctgcaggaaatgctgctcggcggcagcccttctgacgctccccatgcccaccacccgctgcatcctcaccttatgcaggagcatatggggacaaacgtgatcgttgccaataccatgcccacacacctgagcaacggacagatgtgcgaatggcctcgcccccggggccaagcggctacccccgagacgcctcagccgtctccccctgggggatccggcagcgaaccctataagctcctgcctggggccgtggccacaatcgtcaagcccctgtccgctattccgcagcctaccatcacaaaacaggaggtgatttgaggactagtccctgttcccagagcccacttttttttctttttttgaaataaaatagcctgtctttcagatctcaaaggctcttttcagagccaccaaaaaaaaaaaaaaaaaaaaaaaaaaaaaaaaaaaaaaaaaaaaaaaaaaaaaaaaaaaaaaaaaaaaaaaaaaaaaaaaaaaaaaaaaaaaaaaaaaaaa

SEQ ID NO: 4042 - RNA, 1586 nt, synthetic construct
  misc_feature 1..1586: note = mRNA a-1 (hSL-A100) (opt5) from Homo sapiens__NP_000448.3__HNF4A(39-474)(S142E_S143E)
  source 1..1586: mol_type = other RNA
aggagagtcccgcagtcggcgtccagcggctctgcttgttcgtgtgtgtgtcgttgcaggccttattcaagcttaccatggacacatctcctagcgaggggaccaacctcaatgctccgaactccctgggagtgtctgccctttgcgccatctgtggcgatcgggctacagggaaacactacggagccagctcctgcgacggctgtaaggggtttttccgcagatctgtgcggaaaaatcatatgtatagctgccgcttttccagacaatgtgtcgtggataaggacaaacggaaccagtgccgctactgtagactgaagaagtgcttccgggctggaatgaaaaaggaagccgttcagaatgagcgcgatagaattagcacccggcgcgaagagtatgaggactcttccctccccagcatcaacgcgctgctgcaggccgaagtgctctctagacaaattacatcccctgtcagcggcatcaatggcgatattcgggctaaaaagatcgcctctatcgctgacgtgtgtgagtccatgaaagaacagctgcttgttctggtggagtgggccaagtacattcccgcgttttgcgagctccctctggatgaccaggtcgcccttctgcgcgctcacgccggggaacatctcctgctgggagctaccaagagaagcatggtgttcaaagacgtgctcctgcttggcaacgattatatcgtcccccggcactgtcctgagctggccgaaatgtccagagtttctattcgcatcctcgacgagctggtgcttccgtttcaggaactgcaaattgatgacaatgagtacgcctacctcaaggctatcattttctttgatcccgacgcgaaagggctgagcgatcctggaaagatcaaacggctgagatcccaggtgcaggtcagcctcgaggactatatcaacgatcgccagtacgactctcggggcagattcggggaactgcttctgctcctgcccacgcttcaatccattacctggcagatgatcgagcagattcaatttatcaagctgttcggaatggccaaaattgataatctcctgcaggaaatgctgctcggcggcagcccttctgacgctccccatgcccaccacccgctgcatcctcaccttatgcaggagcatatggggacaaacgtgatcgttgccaataccatgcccacacacctgagcaacggacagatgtgcgaatggcctcgcccccggggccaagctgccacccccgagacgcctcagccgtctccccctgggggatccggcagcgagccctataagctcctgcctggggcggtggctacaatcgtcaagcccctgtccgccattccgcagcctaccatcacaaaacaggaagtgatttgaggactagtccctgttcccagagcccacttttttttctttttttgaaataaaatagcctgtctttcagatctcaaaggctcttttcagagccaccaaaaaaaaaaaaaaaaaaaaaaaaaaaaaaaaaaaaaaaaaaaaaaaaaaaaaaaaaaaaaaaaaaaaaaaaaaaaaaaaaaaaaaaaaaaaaaaaaaaaa

SEQ ID NO: 4043 - RNA, 1586 nt, synthetic construct
  misc_feature 1..1586: note = mRNA a-1 (hSL-A100) (opt5) from Homo sapiens__NP_000448.3__HNF4A(39-474)(S143A)
  source 1..1586: mol_type = other RNA
aggagagtcccgcagtcggcgtccagcggctctgcttgttcgtgtgtgtgtcgttgcaggccttattcaagcttaccatggacacatctcctagcgaggggaccaacctcaatgctccgaactccctgggagtgtctgccctttgcgccatctgtggcgatcgggctacagggaaacactacggagccagctcctgcgacggctgtaaggggtttttccgcagatctgtgcggaaaaatcatatgtatagctgccgcttttccagacaatgtgtcgtggataaggacaaacggaaccagtgccgctactgtagactgaagaagtgcttccgggctggaatgaaaaaggaagccgttcagaatgagcgcgatagaattagcacccggcgctctgcgtatgaagactccagcctcccctctatcaacgccctgctgcaggctgaggtgctctccagacaaattacaagccctgtctctggcatcaatggcgatattcgggccaaaaagatcgcttccatcgccgacgtgtgtgagagcatgaaagaacagctgcttgttctggtggagtgggcgaagtacattcccgccttttgcgaactccctctggatgaccaggtcgcccttctgcgcgcccacgctggggagcatctcctgctgggagccaccaagagatccatggtgttcaaagacgtgctcctgcttggcaacgattatatcgtcccccggcactgtcctgagctggccgaaatgtctagagttagcattcgcatcctcgacgagctggtgcttccgtttcaggaactgcaaattgatgacaatgagtacgcttacctcaaggcgatcattttctttgatcccgacgccaaagggctgtccgatcctggaaagatcaaacggctgagaagccaggtgcaggtctctctcgaagactatatcaacgatcgccagtacgactcccggggcagattcggggagctgcttctgctcctgcccacgcttcaaagcattacctggcagatgatcgagcagattcaatttatcaagctgttcggaatggctaaaattgataatctcctgcaggaaatgctgctcggcggctctcctagcgacgctccccatgcccaccacccgctgcatcctcaccttatgcaggagcatatggggacaaacgtgatcgttgctaataccatgcccacacacctgtccaacggacagatgtgcgaatggcctcgcccccggggccaagccgcgacccccgagacgcctcagccgtctccccctgggggaagcggctccgaaccctataagctcctgcctggggctgtggccacaatcgtcaagcccctgagcgccattccgcagcctaccatcacaaaacaggaggtgatttgaggactagtccctgttcccagagcccacttttttttctttttttgaaataaaatagcctgtctttcagatctcaaaggctcttttcagagccaccaaaaaaaaaaaaaaaaaaaaaaaaaaaaaaaaaaaaaaaaaaaaaaaaaaaaaaaaaaaaaaaaaaaaaaaaaaaaaaaaaaaaaaaaaaaaaaaaaaaaa

SEQ ID NO: 4044 - RNA, 1586 nt, synthetic construct
  misc_feature 1..1586: note = mRNA a-1 (hSL-A100) (opt5) from Homo sapiens__NP_000448.3__HNF4A(39-474)(T166A)
  source 1..1586: mol_type = other RNA
aggagagtcccgcagtcggcgtccagcggctctgcttgttcgtgtgtgtgtcgttgcaggccttattcaagcttaccatggacacatctcctagcgaggggaccaacctcaatgctccgaactccctgggagtgtctgccctttgcgccatctgtggcgatcgggctacagggaaacactacggagccagctcctgcgacggctgtaaggggtttttccgcagatctgtgcggaaaaatcatatgtatagctgccgcttttccagacaatgtgtcgtggataaggacaaacggaaccagtgccgctactgtagactgaagaagtgcttccgggctggaatgaaaaaggaagccgttcagaatgagcgcgatagaattagcacccggcgcagctcctatgaagacagctctctcccctccatcaacgcgctgctgcaggccgaggtgctcagcagacaaattgcttctcctgtctccggcatcaatggcgatattcgggccaaaaagatcgctagcatcgccgacgtgtgtgagtccatgaaagaacagctgcttgttctggtggagtgggcgaagtacattcccgccttttgcgaactccctctggatgaccaggtcgcccttctgcgcgcccacgctggggagcatctcctgctgggagccacaaagagatctatggtgttcaaagacgtgctcctgcttggcaacgattatatcgtcccccggcactgtcctgagctggccgaaatgagcagagtttccattcgcatcctcgacgagctggtgcttccgtttcaggaactgcaaattgatgacaatgagtacgcttacctcaaggcgatcattttctttgatcccgacgccaaagggctgagcgatcctggaaagatcaaacggctgagatctcaggtgcaggtctccctcgaagactatatcaacgatcgccagtacgacagccggggcagattcggggagctgcttctgctcctgcccacccttcaatctattacgtggcagatgatcgagcagattcaatttatcaagctgttcggaatggctaaaattgataatctcctgcaggaaatgctgctcggcggcagcccttccgacgctccccatgcccaccacccgctgcatcctcaccttatgcaggagcatatggggaccaacgtgatcgttgctaatacaatgcccacccacctgtctaacggacagatgtgcgaatggcctcgcccccggggccaagccgcgacacccgagacccctcagccgtctccccctgggggatccggcagcgaaccctataagctcctgcctggggctgtggccacgatcgtcaagcccctgtctgccattccgcagcctacaatcaccaaacaggaggtgatttgaggactagtccctgttcccagagcccacttttttttctttttttgaaataaaatagcctgtctttcagatctcaaaggctcttttcagagccaccaaaaaaaaaaaaaaaaaaaaaaaaaaaaaaaaaaaaaaaaaaaaaaaaaaaaaaaaaaaaaaaaaaaaaaaaaaaaaaaaaaaaaaaaaaaaaaaaaaaaa

SEQ ID NO: 4045 - RNA, 1586 nt, synthetic construct
  misc_feature 1..1586: note = mRNA a-1 (hSL-A100) (opt5) from Homo sapiens__NP_000448.3__HNF4A(39-474)(S167E)
  source 1..1586: mol_type = other RNA
aggagagtcccgcagtcggcgtccagcggctctgcttgttcgtgtgtgtgtcgttgcaggccttattcaagcttaccatggacacatctcctagcgaggggaccaacctcaatgctccgaactccctgggagtgtctgccctttgcgccatctgtggcgatcgggctacagggaaacactacggagccagctcctgcgacggctgtaaggggtttttccgcagatctgtgcggaaaaatcatatgtatagctgccgcttttccagacaatgtgtcgtggataaggacaaacggaaccagtgccgctactgtagactgaagaagtgcttccgggctggaatgaaaaaggaagccgttcagaatgagcgcgatagaattagcacccggagatcttcctatgaagacagctctctcccctccatcaacgcgctgctgcaggccgaggtgctcagccgccaaattacagagcctgtctctggcatcaatggcgatattcgggctaaaaagatcgcctccatcgctgacgtgtgtgaaagcatgaaagagcagctgcttgttctggtggaatgggccaagtacattcccgcgttttgcgagctccctctggatgaccaggtcgcccttctgcgcgctcacgccggggagcatctcctgctgggagctaccaagagatccatggtgttcaaagacgtgctcctgcttggcaacgattatatcgtcccccggcactgtcctgaactggccgagatgtctagagttagcattcgcatcctcgacgaactggtgcttccgtttcaggagctgcaaattgatgacaatgaatacgcctacctcaaggctatcattttctttgatcccgacgcgaaagggctgtccgatcctggaaagatcaaacggctgagaagccaggtgcaggtctctctcgaggactatatcaacgatcgccagtacgactcccggggcagattcggggagctgcttctgctcctgcccacgcttcaaagcattacctggcagatgatcgaacagattcaatttatcaagctgttcggaatggccaaaattgataatctcctgcaggagatgctgctcggcggctctcctagcgacgctccccatgcccaccacccgctgcatcctcaccttatgcaggaacatatggggacaaacgtgatcgttgccaataccatgcccacacacctgtccaacggacagatgtgcgagtggcctcgcccccggggccaagctgccacccccgaaacgcctcagccgtctccccctgggggaagcggctccgagccctataagctcctgcctggggcggtggctacaatcgtcaagcccctgagcgccattccgcagcctaccatcacaaaacaggaggtgatttgaggactagtccctgttcccagagcccacttttttttctttttttgaaataaaatagcctgtctttcagatctcaaaggctcttttcagagccaccaaaaaaaaaaaaaaaaaaaaaaaaaaaaaaaaaaaaaaaaaaaaaaaaaaaaaaaaaaaaaaaaaaaaaaaaaaaaaaaaaaaaaaaaaaaaaaaaaaaaa

SEQ ID NO: 4046 - RNA, 1586 nt, synthetic construct
  misc_feature 1..1586: note = mRNA a-1 (hSL-A100) (opt5) from Homo sapiens__NP_000448.3__HNF4A(39-474)(S167A)
  source 1..1586: mol_type = other RNA
aggagagtcccgcagtcggcgtccagcggctctgcttgttcgtgtgtgtgtcgttgcaggccttattcaagcttaccatggacacatctcctagcgaggggaccaacctcaatgctccgaactccctgggagtgtctgccctttgcgccatctgtggcgatcgggctacagggaaacactacggagccagctcctgcgacggctgtaaggggtttttccgcagatctgtgcggaaaaatcatatgtatagctgccgcttttccagacaatgtgtcgtggataaggacaaacggaaccagtgccgctactgtagactgaagaagtgcttccgggctggaatgaaaaaggaagccgttcagaatgagcgcgatagaattagcacccggagatcttcctatgaagacagctctctcccctccatcaacgcgctgctgcaggccgaggtgctcagccgccaaattacagctcctgtctctggcatcaatggcgatattcgggccaaaaagatcgcttccatcgccgacgtgtgtgagagcatgaaagaacagctgcttgttctggtggagtgggcgaagtacattcccgccttttgcgaactccctctggatgaccaggtcgcccttctgcgcgcccacgctggggagcatctcctgctgggagccaccaagagatccatggtgttcaaagacgtgctcctgcttggcaacgattatatcgtcccccggcactgtcctgagctggccgaaatgtctagagttagcattcgcatcctcgacgagctggtgcttccgtttcaggaactgcaaattgatgacaatgagtacgcttacctcaaggcgatcattttctttgatcccgacgccaaagggctgtccgatcctggaaagatcaaacggctgagaagccaggtgcaggtctctctcgaagactatatcaacgatcgccagtacgactcccggggcagattcggggagctgcttctgctcctgcccacgcttcaaagcattacctggcagatgatcgagcagattcaatttatcaagctgttcggaatggctaaaattgataatctcctgcaggaaatgctgctcggcggctctcctagcgacgctccccatgcccaccacccgctgcatcctcaccttatgcaggagcatatggggacaaacgtgatcgttgctaataccatgcccacacacctgtccaacggacagatgtgcgaatggcctcgcccccggggccaagccgcgacccccgagacgcctcagccgtctccccctgggggaagcggctccgaaccctataagctcctgcctggggctgtggccacaatcgtcaagcccctgagcgccattccgcagcctaccatcacaaaacaggaggtgatttgaggactagtccctgttcccagagcccacttttttttctttttttgaaataaaatagcctgtctttcagatctcaaaggctcttttcagagccaccaaaaaaaaaaaaaaaaaaaaaaaaaaaaaaaaaaaaaaaaaaaaaaaaaaaaaaaaaaaaaaaaaaaaaaaaaaaaaaaaaaaaaaaaaaaaaaaaaaaaa

SEQ ID NO: 4047 - RNA, 1586 nt, synthetic construct
  misc_feature 1..1586: note = mRNA a-1 (hSL-A100) (opt5) from Homo sapiens__NP_000448.3__HNF4A(39-474)(S167A_S378A_T429A_T432A _S436A)
  source 1..1586: mol_type = other RNA
aggagagtcccgcagtcggcgtccagcggctctgcttgttcgtgtgtgtgtcgttgcaggccttattcaagcttaccatggacacatctcctagcgaggggaccaacctcaatgctccgaactccctgggagtgtctgccctttgcgccatctgtggcgatcgggctacagggaaacactacggagccagctcctgcgacggctgtaaggggtttttccgcagatctgtgcggaaaaatcatatgtatagctgccgcttttccagacaatgtgtcgtggataaggacaaacggaaccagtgccgctactgtagactgaagaagtgcttccgggctggaatgaaaaaggaagccgttcagaatgagcgcgatagaattagcacccggagatcttcctatgaagacagctctctcccctccatcaacgcgctgctgcaggccgaggtgctcagccgccaaattacagctcctgtctctggcatcaatggcgatattcgggccaaaaagatcgcttccatcgccgacgtgtgtgagagcatgaaagaacagctgcttgttctggtggagtgggcgaagtacattcccgccttttgcgaactccctctggatgaccaggtcgcccttctgcgcgcccacgctggggagcatctcctgctgggagccaccaagagatccatggtgttcaaagacgtgctcctgcttggcaacgattatatcgtcccccggcactgtcctgagctggccgaaatgtctagagttagcattcgcatcctcgacgagctggtgcttccgtttcaggaactgcaaattgatgacaatgagtacgcttacctcaaggcgatcattttctttgatcccgacgccaaagggctgtccgatcctggaaagatcaaacggctgagaagccaggtgcaggtctctctcgaagactatatcaacgatcgccagtacgactcccggggcagattcggggagctgcttctgctcctgcccacgcttcaaagcattacctggcagatgatcgagcagattcaatttatcaagctgttcggaatggctaaaattgataatctcctgcaggaaatgctgctcggcggcgccccttctgacgctccccatgctcaccacccgctgcatcctcaccttatgcaggagcatatggggacaaacgtgatcgttgccaataccatgcccacacacctgagcaacggacagatgtgcgaatggcctcgcccccggggccaagcggctgcccccgaggcccctcagccggctccccctgggggatccggctctgaaccctataagctcctgcctggggccgtggctaccatcgtcaagcccctgagcgccattccgcagcctacgatcacaaaacaggaggtgatttgaggactagtccctgttcccagagcccacttttttttctttttttgaaataaaatagcctgtctttcagatctcaaaggctcttttcagagccaccaaaaaaaaaaaaaaaaaaaaaaaaaaaaaaaaaaaaaaaaaaaaaaaaaaaaaaaaaaaaaaaaaaaaaaaaaaaaaaaaaaaaaaaaaaaaaaaaaaaaa

SEQ ID NO: 4048 - RNA, 1586 nt, synthetic construct
  misc_feature 1..1586: note = mRNA a-1 (hSL-A100) (opt5) from Homo sapiens__NP_000448.3__HNF4A(39-474)(S167E_S378E_T429E_T432E _S436E)
  source 1..1586: mol_type = other RNA
aggagagtcccgcagtcggcgtccagcggctctgcttgttcgtgtgtgtgtcgttgcaggccttattcaagcttaccatggacacatctcctagcgaggggaccaacctcaatgctccgaactccctgggagtgtctgccctttgcgccatctgtggcgatcgggctacagggaaacactacggagccagctcctgcgacggctgtaaggggtttttccgcagatctgtgcggaaaaatcatatgtatagctgccgcttttccagacaatgtgtcgtggataaggacaaacggaaccagtgccgctactgtagactgaagaagtgcttccgggctggaatgaaaaaggaagccgttcagaatgagcgcgatagaattagcacccggagatcttcctatgaagacagctctctcccctccatcaacgcgctgctgcaggccgaggtgctcagccgccaaattacagagcctgtctctggcatcaatggcgatattcgggctaaaaagatcgcctccatcgctgacgtgtgtgaaagcatgaaagagcagctgcttgttctggtggaatgggccaagtacattcccgcgttttgcgagctccctctggatgaccaggtcgcccttctgcgcgctcacgccggggagcatctcctgctgggagctaccaagagatccatggtgttcaaagacgtgctcctgcttggcaacgattatatcgtcccccggcactgtcctgaactggccgagatgtctagagttagcattcgcatcctcgacgaactggtgcttccgtttcaggagctgcaaattgatgacaatgaatacgcctacctcaaggctatcattttctttgatcccgacgcgaaagggctgtccgatcctggaaagatcaaacggctgagaagccaggtgcaggtctctctcgaggactatatcaacgatcgccagtacgactcccggggcagattcggggagctgcttctgctcctgcccacgcttcaaagcattacctggcagatgatcgaacagattcaatttatcaagctgttcggaatggccaaaattgataatctcctgcaggagatgctgctcggcggcgaaccttctgacgctccccatgcccaccacccgctgcatcctcaccttatgcaggagcatatggggacaaacgtgatcgttgccaataccatgcccacacacctgagcaacggacagatgtgcgaatggcctcgcccccggggccaagctgccgagcccgaggaacctcagccggagccccctgggggatccggctctgaaccctataagctcctgcctggggcggtggctaccatcgtcaagcccctgagcgccattccgcagcctacgatcacaaaacaggaggtgatttgaggactagtccctgttcccagagcccacttttttttctttttttgaaataaaatagcctgtctttcagatctcaaaggctcttttcagagccaccaaaaaaaaaaaaaaaaaaaaaaaaaaaaaaaaaaaaaaaaaaaaaaaaaaaaaaaaaaaaaaaaaaaaaaaaaaaaaaaaaaaaaaaaaaaaaaaaaaaaa

SEQ ID NO: 4049 - RNA, 1586 nt, synthetic construct
  misc_feature 1..1586: note = mRNA a-1 (hSL-A100) (opt5) from Homo sapiens__NP_000448.3__HNF4A(39-474)(S87A)
  source 1..1586: mol_type = other RNA
aggagagtcccgcagtcggcgtccagcggctctgcttgttcgtgtgtgtgtcgttgcaggccttattcaagcttaccatggacacatctcctagcgaggggaccaacctcaatgctccgaactccctgggagtgtctgccctttgcgccatctgtggcgatcgggctacagggaaacactacggagccagctcctgcgacggctgtaaggggtttttccgcagagctgtgcggaaaaatcatatgtattcttgccgctttagcagacaatgtgtcgtggataaggacaaacggaaccagtgccgctactgtagactgaagaagtgcttccgggccggaatgaaaaaggaagcggttcagaatgagcgcgatagaatttccacccggcgcagctcttatgaagactccagcctcccctctatcaacgccctgctgcaggctgaggtgctctccagacaaattacaagccctgtctctggcatcaatggcgatattcgggccaaaaagatcgcttccatcgccgacgtgtgtgagagcatgaaagaacagctgcttgttctggtggagtgggcgaagtacattcccgccttttgcgaactccctctggatgaccaggtcgcccttctgcgcgcccacgctggggagcatctcctgctgggagccaccaagagatccatggtgttcaaagacgtgctcctgcttggcaacgattatatcgtcccccggcactgtcctgagctggccgaaatgtctagagttagcattcgcatcctcgacgagctggtgcttccgtttcaggaactgcaaattgatgacaatgagtacgcttacctcaaggcgatcattttctttgatcccgacgccaaagggctgtccgatcctggaaagatcaaacggctgagaagccaggtgcaggtctctctcgaagactatatcaacgatcgccagtacgactcccggggcagattcggggagctgcttctgctcctgcccacgcttcaaagcattacctggcagatgatcgagcagattcaatttatcaagctgttcggaatggctaaaattgataatctcctgcaggaaatgctgctcggcggctctcctagcgacgctccccatgcccaccacccgctgcatcctcaccttatgcaggagcatatggggacaaacgtgatcgttgctaataccatgcccacacacctgtccaacggacagatgtgcgaatggcctcgcccccggggccaagccgcgacccccgagacgcctcagccgtctccccctgggggaagcggctccgaaccctataagctcctgcctggggctgtggccacaatcgtcaagcccctgagcgccattccgcagcctaccatcacaaaacaggaggtgatttgaggactagtccctgttcccagagcccacttttttttctttttttgaaataaaatagcctgtctttcagatctcaaaggctcttttcagagccaccaaaaaaaaaaaaaaaaaaaaaaaaaaaaaaaaaaaaaaaaaaaaaaaaaaaaaaaaaaaaaaaaaaaaaaaaaaaaaaaaaaaaaaaaaaaaaaaaaaaaa

SEQ ID NO: 4050 - RNA, 1586 nt, synthetic construct
  misc_feature 1..1586: note = mRNA a-1 (hSL-A100) (opt5) from Homo sapiens__NP_000448.3__HNF4A(39-474)(S87E)
  source 1..1586: mol_type = other RNA
aggagagtcccgcagtcggcgtccagcggctctgcttgttcgtgtgtgtgtcgttgcaggccttattcaagcttaccatggacacatctcctagcgaggggaccaacctcaatgctccgaactccctgggagtgtctgccctttgcgccatctgtggcgatcgggctacagggaaacactacggagccagctcctgcgacggctgtaaggggtttttccgcagagaagtgcggaaaaatcatatgtattcttgccgctttagcagacaatgtgtcgtggataaggacaaacggaaccagtgccgctactgtagactgaagaagtgcttccgggctggaatgaaaaaggaggccgttcagaatgaacgcgatagaatttccacccggcgcagctcttatgaggactccagcctcccctctatcaacgcgctgctgcaggccgaggtgctctccagacaaattacaagccctgtctctggcatcaatggcgatattcgggctaaaaagatcgcctccatcgctgacgtgtgtgaaagcatgaaagagcagctgcttgttctggtggaatgggccaagtacattcccgcgttttgcgagctccctctggatgaccaggtcgcccttctgcgcgctcacgccggggagcatctcctgctgggagctaccaagagatccatggtgttcaaagacgtgctcctgcttggcaacgattatatcgtcccccggcactgtcctgaactggccgagatgtctagagttagcattcgcatcctcgacgaactggtgcttccgtttcaggagctgcaaattgatgacaatgaatacgcctacctcaaggctatcattttctttgatcccgacgcgaaagggctgtccgatcctggaaagatcaaacggctgagaagccaggtgcaggtctctctcgaggactatatcaacgatcgccagtacgactcccggggcagattcggggagctgcttctgctcctgcccacgcttcaaagcattacctggcagatgatcgaacagattcaatttatcaagctgttcggaatggccaaaattgataatctcctgcaggagatgctgctcggcggctctcctagcgacgctccccatgcccaccacccgctgcatcctcaccttatgcaggaacatatggggacaaacgtgatcgttgccaataccatgcccacacacctgtccaacggacagatgtgcgagtggcctcgcccccggggccaagctgccacccccgaaacgcctcagccgtctccccctgggggaagcggctccgagccctataagctcctgcctggggcggtggctacaatcgtcaagcccctgagcgccattccgcagcctaccatcacaaaacaggaggtgatttgaggactagtccctgttcccagagcccacttttttttctttttttgaaataaaatagcctgtctttcagatctcaaaggctcttttcagagccaccaaaaaaaaaaaaaaaaaaaaaaaaaaaaaaaaaaaaaaaaaaaaaaaaaaaaaaaaaaaaaaaaaaaaaaaaaaaaaaaaaaaaaaaaaaaaaaaaaaaaa

SEQ ID NO: 4051 - RNA, 1586 nt, synthetic construct
  misc_feature 1..1586: note = mRNA a-1 (hSL-A100) (opt5) from Homo sapiens__NP_000448.3__HNF4A(39-474)(R2V)
  source 1..1586: mol_type = other RNA
aggagagtcccgcagtcggcgtccagcggctctgcttgttcgtgtgtgtgtcgttgcaggccttattcaagcttaccatggacacatctcctagcgaggggaccaacctcaatgctccgaactccctgggagtgtctgccctttgcgccatctgtggcgatagagctacagggaaacactacggagccagctcctgcgacggctgtaaggggtttttccggcgctctgtccggaaaaatcatatgtatagctgcagattttcccgccaatgtgtggttgataaggacaaaagaaaccagtgccggtactgtcgcctgaagaagtgcttcagagctggaatgaaaaaggaagccgtgcagaatgagcgggatcgcattagcaccagacggtcttcctatgaagacagctctctcccctccatcaacgcgctgctgcaggccgaggtcctcagccgccaaattacatctcctgtgtccggcatcaatggcgatattagagctaaaaagatcgccagcatcgctgacgtttgtgagtccatgaaagaacagctgcttgtgctggtcgagtgggccaagtacattcccgcgttttgcgaactccctctggatgaccaggtggcccttctgcgggctcacgccggggagcatctcctgctgggagctaccaagcgctctatggtgttcaaagacgtcctcctgcttggcaacgattatatcgttcccagacactgtcctgagctggccgaaatgagccgggtgtccattagaatcctcgacgagctggtgcttccgtttcaggaactgcaaattgatgacaatgagtacgcctacctcaaggctatcattttctttgatcccgacgcgaaagggctgagcgatcctggaaagatcaaacgcctgcggtctcaggtccaggtgtccctcgaagactatatcaacgatagacagtacgacagccgcggccggttcggggagctgcttctgctcctgcccacgcttcaatctattacctggcagatgatcgagcagattcaatttatcaagctgttcggaatggccaaaattgataatctcctgcaggaaatgctgctcggcggcagcccttccgacgctccccatgcccaccacccgctgcatcctcaccttatgcaggagcatatggggacaaacgttatcgtggccaataccatgcccacacacctgtctaacggacagatgtgcgaatggcctagaccccgcggccaagctgccacccccgagacgcctcagccgagccctcccgggggatccggcagcgaaccctataagctcctgcctggggcggtcgctacaatcgtgaagcccctgtctgccattccgcagcctaccatcacaaaacaggaggttatttgaggactagtccctgttcccagagcccacttttttttctttttttgaaataaaatagcctgtctttcagatctcaaaggctcttttcagagccaccaaaaaaaaaaaaaaaaaaaaaaaaaaaaaaaaaaaaaaaaaaaaaaaaaaaaaaaaaaaaaaaaaaaaaaaaaaaaaaaaaaaaaaaaaaaaaaaaaaaaa

SEQ ID NO: 4052 - RNA, 1586 nt, synthetic construct
  misc_feature 1..1586: note = mRNA a-1 (hSL-A100) (opt5) from Homo sapiens__NP_000448.3__HNF4A(39-474)(R2V_K5V)
  source 1..1586: mol_type = other RNA
aggagagtcccgcagtcggcgtccagcggctctgcttgttcgtgtgtgtgtcgttgcaggccttattcaagcttaccatggacacatctcctagcgaggggaccaacctcaatgctccgaactccctgggagtgtctgccctttgcgccatctgtggcgatagagctacagggaagcactacggagccagctcctgcgacggctgtaaagggtttttccggcgctctgtgagaaagaatcatatgtatagctgccggttttcccgccaatgtgttgtggataaagacaagagaaaccagtgccggtactgtcgcctgaaaaagtgcttcagagctggaatgaagaaagaagccgtccagaatgagcgggatcgcattagcaccagacggtcttcctatgaagacagctctctcccctccatcaacgcgctgctgcaggccgaggtgctcagccgccaaattacatctcctgtttccggcatcaatggcgatattagagctaagaaaatcgccagcatcgctgacgtgtgtgagtccatgaaggaacagctgcttgtcctggtggagtgggccaaatacattcccgcgttttgcgaactccctctggatgaccaggtggcccttctgcgggctcacgccggggagcatctcctgctgggagctaccaagcgctctatggtcttcaaggacgttctcctgcttggcaacgattatatcgtgcccagacactgtcctgagctggccgaaatgagccgggtgtccattagaatcctcgacgagctggtccttccgtttcaggaactgcaaattgatgacaatgagtacgcctacctcaaagctatcattttctttgatcccgacgcgaaggggctgagcgatcctggaaaaatcaagcgcctgcggtctcaggtgcaggtttccctcgaagactatatcaacgatagacagtacgacagccgcggccggttcggggagctgcttctgctcctgcccacgcttcaatctattacctggcagatgatcgagcagattcaatttatcaaactgttcggaatggccaagattgataatctcctgcaggaaatgctgctcggcggcagcccttccgacgctccccatgcccaccacccgctgcatcctcaccttatgcaggagcatatggggacaaacgtgatcgtcgccaataccatgcccacacacctgtctaacggacagatgtgcgaatggcctagaccccgcggccaagctgccacccccgagacgcctcagccgagccctcccgggggatccggcagcgaaccctataaactcctgcctggggcggtggctacaatcgttaagcccctgtctgccattccgcagcctaccatcacaaagcaggaggtgatttgaggactagtccctgttcccagagcccacttttttttctttttttgaaataaaatagcctgtctttcagatctcaaaggctcttttcagagccaccaaaaaaaaaaaaaaaaaaaaaaaaaaaaaaaaaaaaaaaaaaaaaaaaaaaaaaaaaaaaaaaaaaaaaaaaaaaaaaaaaaaaaaaaaaaaaaaaaaaaa

SEQ ID NO: 4053 - RNA, 1586 nt, synthetic construct
  misc_feature 1..1586: note = mRNA a-1 (hSL-A100) (opt5) from Homo sapiens__NP_000448.3__HNF4A(39-474)(K179R_K180R)
  source 1..1586: mol_type = other RNA
aggagagtcccgcagtcggcgtccagcggctctgcttgttcgtgtgtgtgtcgttgcaggccttattcaagcttaccatggacacatctcctagcgaggggaccaacctcaatgctccgaactccctgggagtgtctgccctttgcgccatctgtggcgatcgggctacagggaaacactacggagccagctcctgcgacggctgtaaggggtttttccgcagatctgtgcggaaaaatcatatgtatagctgccgcttttccagacaatgtgtcgtggataaggacaaacggaaccagtgccgctactgtagactgaagaagtgcttccgggctggaatgaaaaaggaagccgttcagaatgagcgcgatagaattagcacccggcgcagctcctatgaagacagctctctcccctccatcaacgcgctgctgcaggccgaggtgctcagcagacaaattacatctcctgtctccggcatcaatggcgatattcgggctcgcagaatcgccagcatcgctgacgtgtgtgagtccatgaaagaacagctgcttgttctggtggagtgggccaagtacattcccgcgttttgcgaactccctctggatgaccaggtcgcccttctgcgggctcacgccggggagcatctcctgctgggagctaccaaaagatctatggtgttcaaggacgtgctcctgcttggcaacgattatatcgtcccccgccactgtcctgagctggccgaaatgagccgggtttccattagaatcctcgacgagctggtgcttccgtttcaggaactgcaaattgatgacaatgagtacgcctacctcaaggctatcattttctttgatcccgacgcgaaagggctgagcgatcctggaaagatcaaacgcctgcggtctcaggtgcaggtctccctcgaagactatatcaacgatagacagtacgacagccgcggccggttcggggagctgcttctgctcctgcccacgcttcaatctattacctggcagatgatcgagcagattcaatttatcaagctgttcggaatggccaaaattgataatctcctgcaggaaatgctgctcggcggcagcccttccgacgctccccatgcccaccacccgctgcatcctcaccttatgcaggagcatatggggacaaacgtgatcgttgccaataccatgcccacacacctgtctaacggacagatgtgcgaatggcctagaccccgcggccaagctgccacccccgagacgcctcagccgtctccccctgggggatccggcagcgaaccctataagctcctgcctggggcggtggctacaatcgtcaaacccctgtctgccattccgcagcctaccatcacaaagcaggaggtgatttgaggactagtccctgttcccagagcccacttttttttctttttttgaaataaaatagcctgtctttcagatctcaaaggctcttttcagagccaccaaaaaaaaaaaaaaaaaaaaaaaaaaaaaaaaaaaaaaaaaaaaaaaaaaaaaaaaaaaaaaaaaaaaaaaaaaaaaaaaaaaaaaaaaaaaaaaaaaaaa

SEQ ID NO: 4054 - RNA, 1586 nt, synthetic construct
  misc_feature 1..1586: note = mRNA a-1 (hSL-A100) (opt5) from Homo sapiens__NP_000448.3__HNF4A(39-474)(K234R)
  source 1..1586: mol_type = other RNA
aggagagtcccgcagtcggcgtccagcggctctgcttgttcgtgtgtgtgtcgttgcaggccttattcaagcttaccatggacacatctcctagcgaggggaccaacctcaatgctccgaactccctgggagtgtctgccctttgcgccatctgtggcgatcgggctacagggaaacactacggagccagctcctgcgacggctgtaaggggtttttccgcagatctgtgcggaaaaatcatatgtatagctgccgcttttccagacaatgtgtcgtggataaggacaaacggaaccagtgccgctactgtagactgaagaagtgcttccgggctggaatgaaaaaggaagccgttcagaatgagcgcgatagaattagcacccggcgcagctcctatgaagacagctctctcccctccatcaacgcgctgctgcaggccgaggtgctcagcagacaaattacatctcctgtctccggcatcaatggcgatattcgggctaaaaagatcgccagcatcgctgacgtgtgtgagtccatgaaagaacagctgcttgttctggtggagtgggccaagtacattcccgcgttttgcgaactccctctggatgaccaggtcgcccttctgcgcgctcacgccggggagcatctcctgctgggagctaccagacggtctatggtgttcaaggacgtgctcctgcttggcaacgattatatcgtccccagacactgtcctgagctggccgaaatgagccgcgtttccattcggatcctcgacgagctggtgcttccgtttcaggaactgcaaattgatgacaatgagtacgcctacctcaaagctatcattttctttgatcccgacgcgaaggggctgagcgatcctggaaaaatcaagagactgcgctctcaggtgcaggtctccctcgaagactatatcaacgatcggcagtacgacagcagaggccgcttcggggagctgcttctgctcctgcccacgcttcaatctattacctggcagatgatcgagcagattcaatttatcaaactgttcggaatggccaagattgataatctcctgcaggaaatgctgctcggcggcagcccttccgacgctccccatgcccaccacccgctgcatcctcaccttatgcaggagcatatggggacaaacgtgatcgttgccaataccatgcccacacacctgtctaacggacagatgtgcgaatggcctcggcccagaggccaagctgccacccccgagacgcctcagccgtctccccctgggggatccggcagcgaaccctataaactcctgcctggggcggtggctacaatcgtcaagcccctgtctgccattccgcagcctaccatcacaaagcaggaggtgatttgaggactagtccctgttcccagagcccacttttttttctttttttgaaataaaatagcctgtctttcagatctcaaaggctcttttcagagccaccaaaaaaaaaaaaaaaaaaaaaaaaaaaaaaaaaaaaaaaaaaaaaaaaaaaaaaaaaaaaaaaaaaaaaaaaaaaaaaaaaaaaaaaaaaaaaaaaaaaaa

SEQ ID NO: 4055 - RNA, 1586 nt, synthetic construct
  misc_feature 1..1586: note = mRNA a-1 (hSL-A100) (opt5) from Homo sapiens__NP_000448.3__HNF4A(39-474)(K300R)
  source 1..1586: mol_type = other RNA
aggagagtcccgcagtcggcgtccagcggctctgcttgttcgtgtgtgtgtcgttgcaggccttattcaagcttaccatggacacatctcctagcgaggggaccaacctcaatgctccgaactccctgggagtgtctgccctttgcgccatctgtggcgatcgggctacagggaaacactacggagccagctcctgcgacggctgtaaggggtttttccgcagatctgtgcggaaaaatcatatgtatagctgccgcttttccagacaatgtgtcgtggataaggacaaacggaaccagtgccgctactgtagactgaagaagtgcttccgggctggaatgaaaaaggaagccgttcagaatgagcgcgatagaattagcacccggcgcagctcctatgaagacagctctctcccctccatcaacgcgctgctgcaggccgaggtgctcagcagacaaattacatctcctgtctccggcatcaatggcgatattcgggctaaaaagatcgccagcatcgctgacgtgtgtgagtccatgaaagaacagctgcttgttctggtggagtgggccaagtacattcccgcgttttgcgaactccctctggatgaccaggtcgcccttctgcgcgctcacgccggggagcatctcctgctgggagctaccaagagatctatggtgttcaaagacgtgctcctgcttggcaacgattatatcgtcccccggcactgtcctgagctggccgaaatgagcagagtttccattcgcatcctcgacgagctggtgcttccgtttcaggaactgcaaattgatgacaatgagtacgcctacctcaaggctatcattttctttgatcccgacgcgcgggggctgagcgatcctggaaaaatcaagagactgcgctctcaggtgcaggtctccctcgaagactatatcaacgatcggcagtacgacagcagaggccgcttcggggagctgcttctgctcctgcccacgcttcaatctattacctggcagatgatcgagcagattcaatttatcaaactgttcggaatggccaagattgataatctcctgcaggaaatgctgctcggcggcagcccttccgacgctccccatgcccaccacccgctgcatcctcaccttatgcaggagcatatggggacaaacgtgatcgttgccaataccatgcccacacacctgtctaacggacagatgtgcgaatggcctcggcccagaggccaagctgccacccccgagacgcctcagccgtctccccctgggggatccggcagcgaaccctataaactcctgcctggggcggtggctacaatcgtcaagcccctgtctgccattccgcagcctaccatcacaaagcaggaggtgatttgaggactagtccctgttcccagagcccacttttttttctttttttgaaataaaatagcctgtctttcagatctcaaaggctcttttcagagccaccaaaaaaaaaaaaaaaaaaaaaaaaaaaaaaaaaaaaaaaaaaaaaaaaaaaaaaaaaaaaaaaaaaaaaaaaaaaaaaaaaaaaaaaaaaaaaaaaaaaaa

SEQ ID NO: 4056 - RNA, 1586 nt, synthetic construct
  misc_feature 1..1586: note = mRNA a-1 (hSL-A100) (opt5) from Homo sapiens__NP_000448.3__HNF4A(39-474)(K300R_K307R_K309R)
  source 1..1586: mol_type = other RNA
aggagagtcccgcagtcggcgtccagcggctctgcttgttcgtgtgtgtgtcgttgcaggccttattcaagcttaccatggacacatctcctagcgaggggaccaacctcaatgctccgaactccctgggagtgtctgccctttgcgccatctgtggcgatcgggctacagggaaacactacggagccagctcctgcgacggctgtaaggggtttttccgcagatctgtgcggaaaaatcatatgtatagctgccgcttttccagacaatgtgtcgtggataaggacaaacggaaccagtgccgctactgtagactgaagaagtgcttccgggctggaatgaaaaaggaagccgttcagaatgagcgcgatagaattagcacccggcgcagctcctatgaagacagctctctcccctccatcaacgcgctgctgcaggccgaggtgctcagcagacaaattacatctcctgtctccggcatcaatggcgatattcgggctaaaaagatcgccagcatcgctgacgtgtgtgagtccatgaaagaacagctgcttgttctggtggagtgggccaagtacattcccgcgttttgcgaactccctctggatgaccaggtcgcccttctgcgcgctcacgccggggagcatctcctgctgggagctaccaagagatctatggtgttcaaagacgtgctcctgcttggcaacgattatatcgtcccccggcactgtcctgagctggccgaaatgagcagagtttccattcgcatcctcgacgagctggtgcttccgtttcaggaactgcaaattgatgacaatgagtacgcctacctcaaggctatcattttctttgatcccgacgcgcgggggctgagcgatcctggaagaatccgccggctgagatctcaggtgcaggtctccctcgaagactatatcaacgatcgccagtacgacagccggggcagattcggggagctgcttctgctcctgcccacgcttcaatctattacctggcagatgatcgagcagattcaatttatcaaactgttcggaatggccaagattgataatctcctgcaggaaatgctgctcggcggcagcccttccgacgctccccatgcccaccacccgctgcatcctcaccttatgcaggagcatatggggacaaacgtgatcgttgccaataccatgcccacacacctgtctaacggacagatgtgcgaatggcctcgcccccggggccaagctgccacccccgagacgcctcagccgtctccccctgggggatccggcagcgaaccctataaactcctgcctggggcggtggctacaatcgtcaagcccctgtctgccattccgcagcctaccatcacaaaacaggaggtgatttgaggactagtccctgttcccagagcccacttttttttctttttttgaaataaaatagcctgtctttcagatctcaaaggctcttttcagagccaccaaaaaaaaaaaaaaaaaaaaaaaaaaaaaaaaaaaaaaaaaaaaaaaaaaaaaaaaaaaaaaaaaaaaaaaaaaaaaaaaaaaaaaaaaaaaaaaaaaaaa

SEQ ID NO: 4057 - RNA, 1586 nt, synthetic construct
  misc_feature 1..1586: note = mRNA a-1 (hSL-A100) (opt5) from Homo sapiens__NP_000448.3__HNF4A(39-474)(K447R_K470R)
  source 1..1586: mol_type = other RNA
aggagagtcccgcagtcggcgtccagcggctctgcttgttcgtgtgtgtgtcgttgcaggccttattcaagcttaccatggacacatctcctagcgaggggaccaacctcaatgctccgaactccctgggagtgtctgccctttgcgccatctgtggcgatcgggctacagggaaacactacggagccagctcctgcgacggctgtaaggggtttttccgcagatctgtgcggaaaaatcatatgtatagctgccgcttttccagacaatgtgtcgtggataaggacaaacggaaccagtgccgctactgtagactgaagaagtgcttccgggctggaatgaaaaaggaagccgttcagaatgagcgcgatagaattagcacccggcgcagctcctatgaagacagctctctcccctccatcaacgcgctgctgcaggccgaggtgctcagcagacaaattacatctcctgtctccggcatcaatggcgatattcgggctaaaaagatcgccagcatcgctgacgtgtgtgagtccatgaaagaacagctgcttgttctggtggagtgggccaagtacattcccgcgttttgcgaactccctctggatgaccaggtcgcccttctgcgcgctcacgccggggagcatctcctgctgggagctaccaagagatctatggtgttcaaagacgtgctcctgcttggcaacgattatatcgtcccccggcactgtcctgagctggccgaaatgagcagagtttccattcgcatcctcgacgagctggtgcttccgtttcaggaactgcaaattgatgacaatgagtacgcctacctcaaggctatcattttctttgatcccgacgcgaaagggctgagcgatcctggaaagatcaaacggctgagatctcaggtgcaggtctccctcgaagactatatcaacgatcgccagtacgacagccggggcagattcggggagctgcttctgctcctgcccacgcttcaatctattacctggcagatgatcgagcagattcaatttatcaagctgttcggaatggccaaaattgataatctcctgcaggaaatgctgctcggcggcagcccttccgacgctccccatgcccaccacccgctgcatcctcaccttatgcaggagcatatggggacaaacgtgatcgttgccaataccatgcccacacacctgtctaacggacagatgtgcgaatggcctcgcccccggggccaagctgccacccccgagacgcctcagccgtctccccctgggggatccggcagcgaaccctatagactcctgcctggggcggtggctacaatcgtcaagcccctgtctgccattccgcagcctaccatcacacgccaggaggtgatttgaggactagtccctgttcccagagcccacttttttttctttttttgaaataaaatagcctgtctttcagatctcaaaggctcttttcagagccaccaaaaaaaaaaaaaaaaaaaaaaaaaaaaaaaaaaaaaaaaaaaaaaaaaaaaaaaaaaaaaaaaaaaaaaaaaaaaaaaaaaaaaaaaaaaaaaaaaaaaa

SEQ ID NO: 4058 - RNA, 1586 nt, synthetic construct
  misc_feature 1..1586: note = mRNA a-1 (hSL-A100) (opt5) from Homo sapiens__NP_000448.3__HNF4A(39-474)(K458R)
  source 1..1586: mol_type = other RNA
aggagagtcccgcagtcggcgtccagcggctctgcttgttcgtgtgtgtgtcgttgcaggccttattcaagcttaccatggacacatctcctagcgaggggaccaacctcaatgctccgaactccctgggagtgtctgccctttgcgccatctgtggcgatcgggctacagggaaacactacggagccagctcctgcgacggctgtaaggggtttttccgcagatctgtgcggaaaaatcatatgtatagctgccgcttttccagacaatgtgtcgtggataaggacaaacggaaccagtgccgctactgtagactgaagaagtgcttccgggctggaatgaaaaaggaagccgttcagaatgagcgcgatagaattagcacccggcgcagctcctatgaagacagctctctcccctccatcaacgcgctgctgcaggccgaggtgctcagcagacaaattacatctcctgtctccggcatcaatggcgatattcgggctaaaaagatcgccagcatcgctgacgtgtgtgagtccatgaaagaacagctgcttgttctggtggagtgggccaagtacattcccgcgttttgcgaactccctctggatgaccaggtcgcccttctgcgcgctcacgccggggagcatctcctgctgggagctaccaagagatctatggtgttcaaagacgtgctcctgcttggcaacgattatatcgtcccccggcactgtcctgagctggccgaaatgagcagagtttccattcgcatcctcgacgagctggtgcttccgtttcaggaactgcaaattgatgacaatgagtacgcctacctcaaggctatcattttctttgatcccgacgcgaaagggctgagcgatcctggaaagatcaaacggctgagatctcaggtgcaggtctccctcgaagactatatcaacgatcgccagtacgacagccggggcagattcggggagctgcttctgctcctgcccacgcttcaatctattacctggcagatgatcgagcagattcaatttatcaagctgttcggaatggccaaaattgataatctcctgcaggaaatgctgctcggcggcagcccttccgacgctccccatgcccaccacccgctgcatcctcaccttatgcaggagcatatggggacaaacgtgatcgttgccaataccatgcccacacacctgtctaacggacagatgtgcgaatggcctcgcccccggggccaagctgccacccccgagacgcctcagccgtctccccctgggggatccggcagcgaaccctataagctcctgcctggggcggtggctacaatcgtcagacccctgtctgccattccgcagcctaccatcacaaagcaggaggtgatttgaggactagtccctgttcccagagcccacttttttttctttttttgaaataaaatagcctgtctttcagatctcaaaggctcttttcagagccaccaaaaaaaaaaaaaaaaaaaaaaaaaaaaaaaaaaaaaaaaaaaaaaaaaaaaaaaaaaaaaaaaaaaaaaaaaaaaaaaaaaaaaaaaaaaaaaaaaaaaa

SEQ ID NO: 4059 - RNA, 1586 nt, synthetic construct
  misc_feature 1..1586: note = mRNA a-1 (hSL-A100) (opt5) from Homo sapiens__NP_000448.3__HNF4A(39-474)(K106R_K108R_K126R_K127R )
  source 1..1586: mol_type = other RNA
aggagagtcccgcagtcggcgtccagcggctctgcttgttcgtgtgtgtgtcgttgcaggccttattcaagcttaccatggacacatctcctagcgaggggaccaacctcaatgctccgaactccctgggagtgtctgccctttgcgccatctgtggcgatcgggctacagggaaacactacggagccagctcctgcgacggctgtaaggggtttttccgcagatctgtgcggaaaaatcatatgtatagctgccgcttttccagacaatgtgtcgtggatcgggaccgcagaaaccagtgccggtactgtcgcctgaagaaatgcttcagagctggaatgcggcgcgaagccgttcagaatgagagagatcggattagcacccgcagatcttcctatgaagacagctctctcccctccatcaacgcgctgctgcaggccgaggtgctcagccggcaaattacatctcctgtctccggcatcaatggcgatattagagctaagaagatcgccagcatcgctgacgtgtgtgagtccatgaaagaacagctgcttgttctggtggagtgggccaagtacattcccgcgttttgcgaactccctctggatgaccaggtcgcccttctgcgcgctcacgccggggagcatctcctgctgggagctaccaaacggtctatggtgttcaaggacgtgctcctgcttggcaacgattatatcgtccccagacactgtcctgagctggccgaaatgagccgcgtttccattcggatcctcgacgagctggtgcttccgtttcaggaactgcaaattgatgacaatgagtacgcctacctcaaagctatcattttctttgatcccgacgcgaaggggctgagcgatcctggaaagatcaaaagactgcgctctcaggtgcaggtctccctcgaagactatatcaacgatcggcagtacgacagcagaggccgcttcggggagctgcttctgctcctgcccacgcttcaatctattacctggcagatgatcgagcagattcaatttatcaagctgttcggaatggccaaaattgataatctcctgcaggaaatgctgctcggcggcagcccttccgacgctccccatgcccaccacccgctgcatcctcaccttatgcaggagcatatggggacaaacgtgatcgttgccaataccatgcccacacacctgtctaacggacagatgtgcgaatggcctcggcccagaggccaagctgccacccccgagacgcctcagccgagccctcccgggggatccggcagcgaaccctataagctcctgcctggggcggtggctacaatcgtcaaacccctgtctgccattccgcagcctaccatcacaaagcaggaggtgatttgaggactagtccctgttcccagagcccacttttttttctttttttgaaataaaatagcctgtctttcagatctcaaaggctcttttcagagccaccaaaaaaaaaaaaaaaaaaaaaaaaaaaaaaaaaaaaaaaaaaaaaaaaaaaaaaaaaaaaaaaaaaaaaaaaaaaaaaaaaaaaaaaaaaaaaaaaaaaaa

SEQ ID NO: 4060 - RNA, 1586 nt, synthetic construct
  misc_feature 1..1586: note = mRNA a-1 (hSL-A100) (opt5) from Homo sapiens__NP_000448.3__HNF4A(39-474)(E285Q)
  source 1..1586: mol_type = other RNA
aggagagtcccgcagtcggcgtccagcggctctgcttgttcgtgtgtgtgtcgttgcaggccttattcaagcttaccatggacacatctcctagcgaggggaccaacctcaatgctccgaactccctgggagtgtctgccctttgcgccatctgtggcgatcgggctacagggaaacactacggagccagctcctgcgacggctgtaaggggtttttccgcagatctgtgcggaaaaatcatatgtatagctgccgcttttccagacaatgtgtcgtggataaggacaaacggaaccagtgccgctactgtagactgaagaagtgcttccgggctggaatgaaaaaggaagccgttcagaatgagcgcgatagaattagcacccggcgcagctcctatgaagacagctctctcccctccatcaacgcgctgctgcaggccgaggtgctcagcagacaaattacatctcctgtctccggcatcaatggcgatattcgggctaaaaagatcgccagcatcgctgacgtgtgtgagtccatgaaagaacagctgcttgttctggtggagtgggccaagtacattcccgcgttttgcgaactccctctggatgaccaggtcgcccttctgcgcgctcacgccggggagcatctcctgctgggagctaccaagagatctatggtgttcaaagacgtgctcctgcttggcaacgattatatcgtcccccggcactgtcctgagctggccgaaatgagcagagtttccattcgcatcctcgacgagctggtgcttccgtttcaggaactgcaaattgatgacaatcagtacgcctacctcaaggctatcattttctttgatcccgacgcgaaagggctgagcgatcctggaaagatcaaacggctgagatctcaggtgcaggtctccctcgaggactatatcaacgatcgccaatacgacagccggggcagattcggggaactgcttctgctcctgcccacgcttcagtctattacctggcagatgatcgagcaaattcagtttatcaagctgttcggaatggccaaaattgataatctcctgcaggagatgctgctcggcggcagcccttccgacgctccccatgcccaccacccgctgcatcctcaccttatgcaggaacatatggggacaaacgtgatcgttgccaataccatgcccacacacctgtctaacggacaaatgtgcgagtggcctcgcccccggggccaggctgccacccccgaaacgcctcagccgtctccccctgggggatccggcagcgagccctataagctcctgcctggggcggtggctacaatcgtcaagcccctgtctgccattccgcagcctaccatcacaaaacaagaagtgatttgaggactagtccctgttcccagagcccacttttttttctttttttgaaataaaatagcctgtctttcagatctcaaaggctcttttcagagccaccaaaaaaaaaaaaaaaaaaaaaaaaaaaaaaaaaaaaaaaaaaaaaaaaaaaaaaaaaaaaaaaaaaaaaaaaaaaaaaaaaaaaaaaaaaaaaaaaaaaaa

SEQ ID NO: 4061 - RNA, 1586 nt, synthetic construct
  misc_feature 1..1586: note = mRNA a-1 (hSL-A100) (opt5) from Homo sapiens__NP_000448.3__HNF4A(39-474)(T166E)
  source 1..1586: mol_type = other RNA
aggagagtcccgcagtcggcgtccagcggctctgcttgttcgtgtgtgtgtcgttgcaggccttattcaagcttaccatggacacatctcctagcgaggggaccaacctcaatgctccgaactccctgggagtgtctgccctttgcgccatctgtggcgatcgggctacagggaaacactacggagccagctcctgcgacggctgtaaggggtttttccgcagatctgtgcggaaaaatcatatgtatagctgccgcttttccagacaatgtgtcgtggataaggacaaacggaaccagtgccgctactgtagactgaagaagtgcttccgggctggaatgaaaaaggaagccgttcagaatgagcgcgatagaattagcacccggcgcagctcctatgaagacagctctctcccctccatcaacgcgctgctgcaggccgaggtgctcagcagacaaattgagtctcctgtctccggcatcaatggcgatattcgggctaaaaagatcgccagcatcgctgacgtgtgtgaatccatgaaagagcagctgcttgttctggtggaatgggccaagtacattcccgcgttttgcgagctccctctggatgaccaggtcgcccttctgcgcgctcacgccggggagcatctcctgctgggagctacaaagagatctatggtgttcaaagacgtgctcctgcttggcaacgattatatcgtcccccggcactgtcctgaactggccgagatgagcagagtttccattcgcatcctcgacgaactggtgcttccgtttcaggagctgcaaattgatgacaatgaatacgcctacctcaaggctatcattttctttgatcccgacgcgaaagggctgagcgatcctggaaagatcaaacggctgagatctcaggtgcaggtctccctcgaggactatatcaacgatcgccagtacgacagccggggcagattcggggagctgcttctgctcctgcccacccttcaatctattacgtggcagatgatcgaacagattcaatttatcaagctgttcggaatggccaaaattgataatctcctgcaggagatgctgctcggcggcagcccttccgacgctccccatgcccaccacccgctgcatcctcaccttatgcaggaacatatggggaccaacgtgatcgttgccaatacaatgcccacccacctgtctaacggacagatgtgcgagtggcctcgcccccggggccaagctgccacacccgaaacccctcagccgtctccccctgggggatccggcagcgagccctataagctcctgcctggggcggtggctacgatcgtcaagcccctgtctgccattccgcagcctacaatcaccaaacaggaggtgatttgaggactagtccctgttcccagagcccacttttttttctttttttgaaataaaatagcctgtctttcagatctcaaaggctcttttcagagccaccaaaaaaaaaaaaaaaaaaaaaaaaaaaaaaaaaaaaaaaaaaaaaaaaaaaaaaaaaaaaaaaaaaaaaaaaaaaaaaaaaaaaaaaaaaaaaaaaaaaaa

SEQ ID NO: 4062 - RNA, 1586 nt, synthetic construct
  misc_feature 1..1586: note = mRNA a-1 (hSL-A100) (opt5) from Homo sapiens__NP_000448.3__HNF4A(39-474)(S148A)
  source 1..1586: mol_type = other RNA
aggagagtcccgcagtcggcgtccagcggctctgcttgttcgtgtgtgtgtcgttgcaggccttattcaagcttaccatggacacatctcctagcgaggggaccaacctcaatgctccgaactccctgggagtgtctgccctttgcgccatctgtggcgatcgggctacagggaaacactacggagccagctcctgcgacggctgtaaggggtttttccgcagatctgtgcggaaaaatcatatgtatagctgccgcttttccagacaatgtgtcgtggataaggacaaacggaaccagtgccgctactgtagactgaagaagtgcttccgggctggaatgaaaaaggaagccgttcagaatgagcgcgatagaattagcacccggagatcttcctatgaagacagcgcgctcccctctatcaacgccctgctgcaggctgaggtgctctcccgccaaattacaagccctgtctctggcatcaatggcgatattcgggccaaaaagatcgcttccatcgccgacgtgtgtgagagcatgaaagaacagctgcttgttctggtggagtgggcgaagtacattcccgccttttgcgaactccctctggatgaccaggtcgcccttctgcgcgcccacgctggggagcatctcctgctgggagccaccaagagatccatggtgttcaaagacgtgctcctgcttggcaacgattatatcgtcccccggcactgtcctgagctggccgaaatgtctagagttagcattcgcatcctcgacgagctggtgcttccgtttcaggaactgcaaattgatgacaatgagtacgcttacctcaaggcgatcattttctttgatcccgacgccaaagggctgtccgatcctggaaagatcaaacggctgagaagccaggtgcaggtctctctcgaagactatatcaacgatcgccagtacgactcccggggcagattcggggagctgcttctgctcctgcccacgcttcaaagcattacctggcagatgatcgagcagattcaatttatcaagctgttcggaatggctaaaattgataatctcctgcaggaaatgctgctcggcggctctcctagcgacgctccccatgcccaccacccgctgcatcctcaccttatgcaggagcatatggggacaaacgtgatcgttgctaataccatgcccacacacctgtccaacggacagatgtgcgaatggcctcgcccccggggccaagccgcgacccccgagacgcctcagccgtctccccctgggggaagcggctccgaaccctataagctcctgcctggggctgtggccacaatcgtcaagcccctgagcgccattccgcagcctaccatcacaaaacaggaggtgatttgaggactagtccctgttcccagagcccacttttttttctttttttgaaataaaatagcctgtctttcagatctcaaaggctcttttcagagccaccaaaaaaaaaaaaaaaaaaaaaaaaaaaaaaaaaaaaaaaaaaaaaaaaaaaaaaaaaaaaaaaaaaaaaaaaaaaaaaaaaaaaaaaaaaaaaaaaaaaaa

SEQ ID NO: 4063 - RNA, 1586 nt, synthetic construct
  misc_feature 1..1586: note = mRNA a-1 (hSL-A100) (opt5) from Homo sapiens__NP_000448.3__HNF4A(39-474)(S148E)
  source 1..1586: mol_type = other RNA
aggagagtcccgcagtcggcgtccagcggctctgcttgttcgtgtgtgtgtcgttgcaggccttattcaagcttaccatggacacatctcctagcgaggggaccaacctcaatgctccgaactccctgggagtgtctgccctttgcgccatctgtggcgatcgggctacagggaaacactacggagccagctcctgcgacggctgtaaggggtttttccgcagatctgtgcggaaaaatcatatgtatagctgccgcttttccagacaatgtgtcgtggataaggacaaacggaaccagtgccgctactgtagactgaagaagtgcttccgggctggaatgaaaaaggaagccgttcagaatgagcgcgatagaattagcacccggagatcttcctatgaagacagcgagctcccctctatcaacgcgctgctgcaggccgaggtgctctcccgccaaattacaagccctgtctctggcatcaatggcgatattcgggctaaaaagatcgcctccatcgctgacgtgtgtgaaagcatgaaagagcagctgcttgttctggtggaatgggccaagtacattcccgcgttttgcgagctccctctggatgaccaggtcgcccttctgcgcgctcacgccggggagcatctcctgctgggagctaccaagagatccatggtgttcaaagacgtgctcctgcttggcaacgattatatcgtcccccggcactgtcctgaactggccgagatgtctagagttagcattcgcatcctcgacgaactggtgcttccgtttcaggagctgcaaattgatgacaatgaatacgcctacctcaaggctatcattttctttgatcccgacgcgaaagggctgtccgatcctggaaagatcaaacggctgagaagccaggtgcaggtctctctcgaggactatatcaacgatcgccagtacgactcccggggcagattcggggagctgcttctgctcctgcccacgcttcaaagcattacctggcagatgatcgaacagattcaatttatcaagctgttcggaatggccaaaattgataatctcctgcaggagatgctgctcggcggctctcctagcgacgctccccatgcccaccacccgctgcatcctcaccttatgcaggaacatatggggacaaacgtgatcgttgccaataccatgcccacacacctgtccaacggacagatgtgcgagtggcctcgcccccggggccaagctgccacccccgaaacgcctcagccgtctccccctgggggaagcggctccgagccctataagctcctgcctggggcggtggctacaatcgtcaagcccctgagcgccattccgcagcctaccatcacaaaacaggaggtgatttgaggactagtccctgttcccagagcccacttttttttctttttttgaaataaaatagcctgtctttcagatctcaaaggctcttttcagagccaccaaaaaaaaaaaaaaaaaaaaaaaaaaaaaaaaaaaaaaaaaaaaaaaaaaaaaaaaaaaaaaaaaaaaaaaaaaaaaaaaaaaaaaaaaaaaaaaaaaaaa

SEQ ID NO: 4064 - RNA, 1586 nt, synthetic construct
  misc_feature 1..1586: note = mRNA a-1 (hSL-A100) (opt5) from Homo sapiens__NP_000448.3__HNF4A(39-474)(S183A)
  source 1..1586: mol_type = other RNA
aggagagtcccgcagtcggcgtccagcggctctgcttgttcgtgtgtgtgtcgttgcaggccttattcaagcttaccatggacacatctcctagcgaggggaccaacctcaatgctccgaactccctgggagtgtctgccctttgcgccatctgtggcgatcgggctacagggaaacactacggagccagctcctgcgacggctgtaaggggtttttccgcagatctgtgcggaaaaatcatatgtatagctgccgcttttccagacaatgtgtcgtggataaggacaaacggaaccagtgccgctactgtagactgaagaagtgcttccgggctggaatgaaaaaggaagccgttcagaatgagcgcgatagaattagcacccggagatcttcctatgaagacagctctctcccctccatcaacgcgctgctgcaggccgaggtgctcagccgccaaattacatctcctgtctccggcatcaatggcgatattcgggctaaaaagatcgccgctatcgccgacgtgtgtgagagcatgaaagaacagctgcttgttctggtggagtgggcgaagtacattcccgccttttgcgaactccctctggatgaccaggtcgcccttctgcgcgcccacgctggggagcatctcctgctgggagccaccaagagatccatggtgttcaaagacgtgctcctgcttggcaacgattatatcgtcccccggcactgtcctgagctggccgaaatgtctagagttagcattcgcatcctcgacgagctggtgcttccgtttcaggaactgcaaattgatgacaatgagtacgcttacctcaaggcgatcattttctttgatcccgacgccaaagggctgtccgatcctggaaagatcaaacggctgagaagccaggtgcaggtctctctcgaagactatatcaacgatcgccagtacgactcccggggcagattcggggagctgcttctgctcctgcccacgcttcaaagcattacctggcagatgatcgagcagattcaatttatcaagctgttcggaatggctaaaattgataatctcctgcaggaaatgctgctcggcggctctcctagcgacgctccccatgcccaccacccgctgcatcctcaccttatgcaggagcatatggggacaaacgtgatcgttgctaataccatgcccacacacctgtccaacggacagatgtgcgaatggcctcgcccccggggccaagccgcgacccccgagacgcctcagccgtctccccctgggggaagcggctccgaaccctataagctcctgcctggggctgtggccacaatcgtcaagcccctgagcgccattccgcagcctaccatcacaaaacaggaggtgatttgaggactagtccctgttcccagagcccacttttttttctttttttgaaataaaatagcctgtctttcagatctcaaaggctcttttcagagccaccaaaaaaaaaaaaaaaaaaaaaaaaaaaaaaaaaaaaaaaaaaaaaaaaaaaaaaaaaaaaaaaaaaaaaaaaaaaaaaaaaaaaaaaaaaaaaaaaaaaaa

SEQ ID NO: 4065 - RNA, 1586 nt, synthetic construct
  misc_feature 1..1586: note = mRNA a-1 (hSL-A100) (opt5) from Homo sapiens__NP_000448.3__HNF4A(39-474)(S183E)
  source 1..1586: mol_type = other RNA
aggagagtcccgcagtcggcgtccagcggctctgcttgttcgtgtgtgtgtcgttgcaggccttattcaagcttaccatggacacatctcctagcgaggggaccaacctcaatgctccgaactccctgggagtgtctgccctttgcgccatctgtggcgatcgggctacagggaaacactacggagccagctcctgcgacggctgtaaggggtttttccgcagatctgtgcggaaaaatcatatgtatagctgccgcttttccagacaatgtgtcgtggataaggacaaacggaaccagtgccgctactgtagactgaagaagtgcttccgggctggaatgaaaaaggaagccgttcagaatgagcgcgatagaattagcacccggagatcttcctatgaagacagctctctcccctccatcaacgcgctgctgcaggccgaggtgctcagccgccaaattacatctcctgtctccggcatcaatggcgatattcgggctaaaaagatcgccgagatcgctgacgtgtgtgaaagcatgaaagagcagctgcttgttctggtggaatgggccaagtacattcccgcgttttgcgagctccctctggatgaccaggtcgcccttctgcgcgctcacgccggggagcatctcctgctgggagctaccaagagatccatggtgttcaaagacgtgctcctgcttggcaacgattatatcgtcccccggcactgtcctgaactggccgagatgtctagagttagcattcgcatcctcgacgaactggtgcttccgtttcaggagctgcaaattgatgacaatgaatacgcctacctcaaggctatcattttctttgatcccgacgcgaaagggctgtccgatcctggaaagatcaaacggctgagaagccaggtgcaggtctctctcgaggactatatcaacgatcgccagtacgactcccggggcagattcggggagctgcttctgctcctgcccacgcttcaaagcattacctggcagatgatcgaacagattcaatttatcaagctgttcggaatggccaaaattgataatctcctgcaggagatgctgctcggcggctctcctagcgacgctccccatgcccaccacccgctgcatcctcaccttatgcaggaacatatggggacaaacgtgatcgttgccaataccatgcccacacacctgtccaacggacagatgtgcgagtggcctcgcccccggggccaagctgccacccccgaaacgcctcagccgtctccccctgggggaagcggctccgagccctataagctcctgcctggggcggtggctacaatcgtcaagcccctgagcgccattccgcagcctaccatcacaaaacaggaggtgatttgaggactagtccctgttcccagagcccacttttttttctttttttgaaataaaatagcctgtctttcagatctcaaaggctcttttcagagccaccaaaaaaaaaaaaaaaaaaaaaaaaaaaaaaaaaaaaaaaaaaaaaaaaaaaaaaaaaaaaaaaaaaaaaaaaaaaaaaaaaaaaaaaaaaaaaaaaaaaaa

SEQ ID NO: 4066 - RNA, 1586 nt, synthetic construct
  misc_feature 1..1586: note = mRNA a-1 (hSL-A100) (opt5) from Homo sapiens__NP_000448.3__HNF4A(39-474)(S461A)
  source 1..1586: mol_type = other RNA
aggagagtcccgcagtcggcgtccagcggctctgcttgttcgtgtgtgtgtcgttgcaggccttattcaagcttaccatggacacatctcctagcgaggggaccaacctcaatgctccgaactccctgggagtgtctgccctttgcgccatctgtggcgatcgggctacagggaaacactacggagccagctcctgcgacggctgtaaggggtttttccgcagatctgtgcggaaaaatcatatgtatagctgccgcttttccagacaatgtgtcgtggataaggacaaacggaaccagtgccgctactgtagactgaagaagtgcttccgggctggaatgaaaaaggaagccgttcagaatgagcgcgatagaattagcacccggcgcagctcctatgaagacagctctctcccctccatcaacgcgctgctgcaggccgaggtgctcagcagacaaattacatctcctgtctccggcatcaatggcgatattcgggctaaaaagatcgccagcatcgctgacgtgtgtgagtccatgaaagaacagctgcttgttctggtggagtgggccaagtacattcccgcgttttgcgaactccctctggatgaccaggtcgcccttctgcgcgctcacgccggggagcatctcctgctgggagctaccaagagatctatggtgttcaaagacgtgctcctgcttggcaacgattatatcgtcccccggcactgtcctgagctggccgaaatgagcagagtttccattcgcatcctcgacgagctggtgcttccgtttcaggaactgcaaattgatgacaatgagtacgcctacctcaaggctatcattttctttgatcccgacgcgaaagggctgagcgatcctggaaagatcaaacggctgagatctcaggtgcaggtctccctcgaagactatatcaacgatcgccagtacgacagccggggcagattcggggagctgcttctgctcctgcccacgcttcaatctattacctggcagatgatcgagcagattcaatttatcaagctgttcggaatggccaaaattgataatctcctgcaggaaatgctgctcggcggcagcccttccgacgctccccatgcccaccacccgctgcatcctcaccttatgcaggagcatatggggacaaacgtgatcgttgccaataccatgcccacacacctgtctaacggacagatgtgcgaatggcctcgcccccggggccaagctgccacccccgagacgcctcagccgtctccccctgggggatccggcagcgaaccctataagctcctgcctggggcggtggctacaatcgtcaagcccctggccgccattccgcagcctaccatcacaaaacaggaggtgatttgaggactagtccctgttcccagagcccacttttttttctttttttgaaataaaatagcctgtctttcagatctcaaaggctcttttcagagccaccaaaaaaaaaaaaaaaaaaaaaaaaaaaaaaaaaaaaaaaaaaaaaaaaaaaaaaaaaaaaaaaaaaaaaaaaaaaaaaaaaaaaaaaaaaaaaaaaaaaaa

SEQ ID NO: 4067 - RNA, 1586 nt, synthetic construct
  misc_feature 1..1586: note = mRNA a-1 (hSL-A100) (opt5) from Homo sapiens__NP_000448.3__HNF4A(39-474)(S461E)
  source 1..1586: mol_type = other RNA
aggagagtcccgcagtcggcgtccagcggctctgcttgttcgtgtgtgtgtcgttgcaggccttattcaagcttaccatggacacatctcctagcgaggggaccaacctcaatgctccgaactccctgggagtgtctgccctttgcgccatctgtggcgatcgggctacagggaaacactacggagccagctcctgcgacggctgtaaggggtttttccgcagatctgtgcggaaaaatcatatgtatagctgccgcttttccagacaatgtgtcgtggataaggacaaacggaaccagtgccgctactgtagactgaagaagtgcttccgggctggaatgaaaaaggaagccgttcagaatgagcgcgatagaattagcacccggcgcagctcctatgaagacagctctctcccctccatcaacgcgctgctgcaggccgaggtgctcagcagacaaattacatctcctgtctccggcatcaatggcgatattcgggctaaaaagatcgccagcatcgctgacgtgtgtgagtccatgaaagaacagctgcttgttctggtggagtgggccaagtacattcccgcgttttgcgaactccctctggatgaccaggtcgcccttctgcgcgctcacgccggggagcatctcctgctgggagctaccaagagatctatggtgttcaaagacgtgctcctgcttggcaacgattatatcgtcccccggcactgtcctgagctggccgaaatgagcagagtttccattcgcatcctcgacgagctggtgcttccgtttcaggaactgcaaattgatgacaatgagtacgcctacctcaaggctatcattttctttgatcccgacgcgaaagggctgagcgatcctggaaagatcaaacggctgagatctcaggtgcaggtctccctcgaagactatatcaacgatcgccagtacgacagccggggcagattcggggagctgcttctgctcctgcccacgcttcaatctattacctggcagatgatcgagcagattcaatttatcaagctgttcggaatggccaaaattgataatctcctgcaggaaatgctgctcggcggcagcccttccgacgctccccatgcccaccacccgctgcatcctcaccttatgcaggagcatatggggacaaacgtgatcgttgccaataccatgcccacacacctgtctaacggacagatgtgcgaatggcctcgcccccggggccaagctgccacccccgagacgcctcagccgtctccccctgggggatccggcagcgaaccctataagctcctgcctggggcggtggctacaatcgtcaagcccctggaggccattccgcagcctaccatcacaaaacaggaggtgatttgaggactagtccctgttcccagagcccacttttttttctttttttgaaataaaatagcctgtctttcagatctcaaaggctcttttcagagccaccaaaaaaaaaaaaaaaaaaaaaaaaaaaaaaaaaaaaaaaaaaaaaaaaaaaaaaaaaaaaaaaaaaaaaaaaaaaaaaaaaaaaaaaaaaaaaaaaaaaaa

SEQ ID NO: 4068 - RNA, 1586 nt, synthetic construct
  misc_feature 1..1586: note = mRNA a-1 (hSL-A100) (opt5) from Homo sapiens__NP_000448.3__HNF4A(39-474)(S142A_S143A_S313A)
  source 1..1586: mol_type = other RNA
aggagagtcccgcagtcggcgtccagcggctctgcttgttcgtgtgtgtgtcgttgcaggccttattcaagcttaccatggacacatctcctagcgaggggaccaacctcaatgctccgaactccctgggagtgtctgccctttgcgccatctgtggcgatcgggctacagggaaacactacggagccagctcctgcgacggctgtaaggggtttttccgcagatctgtgcggaaaaatcatatgtatagctgccgcttttccagacaatgtgtcgtggataaggacaaacggaaccagtgccgctactgtagactgaagaagtgcttccgggctggaatgaaaaaggaagccgttcagaatgagcgcgatagaattagcacccggcgcgcggcctatgaagactcttccctccccagcatcaacgctctgctgcaggccgaggtgctctctagacaaattacatcccctgtcagcggcatcaatggcgatattcgggctaaaaagatcgcctctatcgcggacgtgtgtgagtccatgaaagaacagctgcttgttctggtggagtgggccaagtacattcccgctttttgcgaactccctctggatgaccaggtcgcccttctgcgcgctcacgccggggagcatctcctgctgggagccaccaagagaagcatggtgttcaaagacgtgctcctgcttggcaacgattatatcgtcccccggcactgtcctgagctggctgaaatgtccagagtttctattcgcatcctcgacgagctggtgcttccgtttcaggaactgcaaattgatgacaatgagtacgcgtacctcaaggccatcattttctttgatcccgacgctaaagggctgagcgatcctggaaagatcaaacggctgagagcccaggtgcaggtctccctcgaagactatatcaacgatcgccagtacgacagccggggcagattcggggagctgcttctgctcctgcccacgcttcaatctattacctggcagatgatcgagcagattcaatttatcaagctgttcggaatggccaaaattgataatctcctgcaggaaatgctgctcggcggctcccctagcgacgctccccatgcccaccacccgctgcatcctcaccttatgcaggagcatatggggacaaacgtgatcgttgcgaataccatgcccacacacctgtctaacggacagatgtgcgaatggcctcgcccccggggccaagctgccacccccgagacgcctcagccgagccctcccgggggatccggctctgaaccctataagctcctgcctggggccgtggctacaatcgtcaagcccctgagcgccattccgcagcctaccatcacaaaacaggaggtgatttgaggactagtccctgttcccagagcccacttttttttctttttttgaaataaaatagcctgtctttcagatctcaaaggctcttttcagagccaccaaaaaaaaaaaaaaaaaaaaaaaaaaaaaaaaaaaaaaaaaaaaaaaaaaaaaaaaaaaaaaaaaaaaaaaaaaaaaaaaaaaaaaaaaaaaaaaaaaaaa

SEQ ID NO: 4069 - RNA, 1586 nt, synthetic construct
  misc_feature 1..1586: note = mRNA a-1 (hSL-A100) (opt5) from Homo sapiens__NP_000448.3__HNF4A(39-474)(S142A_S143A_S313A_K458R )
  source 1..1586: mol_type = other RNA
aggagagtcccgcagtcggcgtccagcggctctgcttgttcgtgtgtgtgtcgttgcaggccttattcaagcttaccatggacacatctcctagcgaggggaccaacctcaatgctccgaactccctgggagtgtctgccctttgcgccatctgtggcgatcgggctacagggaaacactacggagccagctcctgcgacggctgtaaggggtttttccgcagatctgtgcggaaaaatcatatgtatagctgccgcttttccagacaatgtgtcgtggataaggacaaacggaaccagtgccgctactgtagactgaagaagtgcttccgggctggaatgaaaaaggaagccgttcagaatgagcgcgatagaattagcacccggcgcgcggcctatgaagactcttccctccccagcatcaacgctctgctgcaggccgaggtgctctctagacaaattacatcccctgtcagcggcatcaatggcgatattcgggctaaaaagatcgcctctatcgcggacgtgtgtgagtccatgaaagaacagctgcttgttctggtggagtgggccaagtacattcccgctttttgcgaactccctctggatgaccaggtcgcccttctgcgcgctcacgccggggagcatctcctgctgggagccaccaagagaagcatggtgttcaaagacgtgctcctgcttggcaacgattatatcgtcccccggcactgtcctgagctggctgaaatgtccagagtttctattcgcatcctcgacgagctggtgcttccgtttcaggaactgcaaattgatgacaatgagtacgcgtacctcaaggccatcattttctttgatcccgacgctaaagggctgagcgatcctggaaagatcaaacggctgagagcccaggtgcaggtctccctcgaagactatatcaacgatcgccagtacgacagccggggcagattcggggagctgcttctgctcctgcccacgcttcaatctattacctggcagatgatcgagcagattcaatttatcaagctgttcggaatggccaaaattgataatctcctgcaggaaatgctgctcggcggctcccctagcgacgctccccatgcccaccacccgctgcatcctcaccttatgcaggagcatatggggacaaacgtgatcgttgcgaataccatgcccacacacctgtctaacggacagatgtgcgaatggcctcgcccccggggccaagctgccacccccgagacgcctcagccgagccctcccgggggatccggctctgaaccctataagctcctgcctggggccgtggctacaatcgtcagacccctgagcgccattccgcagcctaccatcacaaagcaggaggtgatttgaggactagtccctgttcccagagcccacttttttttctttttttgaaataaaatagcctgtctttcagatctcaaaggctcttttcagagccaccaaaaaaaaaaaaaaaaaaaaaaaaaaaaaaaaaaaaaaaaaaaaaaaaaaaaaaaaaaaaaaaaaaaaaaaaaaaaaaaaaaaaaaaaaaaaaaaaaaaaa

SEQ ID NO: 4070 - RNA, 1586 nt, synthetic construct
  misc_feature 1..1586: note = mRNA a-1 (hSL-A100) (opt5) from Homo sapiens__NP_000448.3__HNF4A(39-474)(S142A_S143A_S167A_S313A _S378A_T429A_T432A_S436A_K458R)
  source 1..1586: mol_type = other RNA
aggagagtcccgcagtcggcgtccagcggctctgcttgttcgtgtgtgtgtcgttgcaggccttattcaagcttaccatggacacatctcctagcgaggggaccaacctcaatgctccgaactccctgggagtgtctgccctttgcgccatctgtggcgatcgggctacagggaaacactacggagccagctcctgcgacggctgtaaggggtttttccgcagatctgtgcggaaaaatcatatgtatagctgccgcttttccagacaatgtgtcgtggataaggacaaacggaaccagtgccgctactgtagactgaagaagtgcttccgggctggaatgaaaaaggaagccgttcagaatgagcgcgatagaattagcacccggcgcgcggcctatgaagactcttccctccccagcatcaacgctctgctgcaggccgaggtgctctctagacaaattacagctcctgtctccggcatcaatggcgatattcgggccaaaaagatcgcgagcatcgccgacgtgtgtgagtctatgaaagaacagctgcttgttctggtggagtgggctaagtacattcccgccttttgcgaactccctctggatgaccaggtcgcccttctgcgcgcccacgccggggagcatctcctgctgggagctaccaagagatccatggtgttcaaagacgtgctcctgcttggcaacgattatatcgtcccccggcactgtcctgagctggcggaaatgagcagagtttccattcgcatcctcgacgagctggtgcttccgtttcaggaactgcaaattgatgacaatgagtacgcctacctcaaggctatcattttctttgatcccgacgccaaagggctgtctgatcctggaaagatcaaacggctgagagcccaggtgcaggtcagcctcgaagactatatcaacgatcgccagtacgactcccggggcagattcggggagctgcttctgctcctgcccacgcttcaaagcattacctggcagatgatcgagcagattcaatttatcaagctgttcggaatggctaaaattgataatctcctgcaggaaatgctgctcggcggcgccccttctgacgcgccccatgctcaccacccgctgcatcctcaccttatgcaggagcatatggggacaaacgtgatcgttgccaataccatgcccacacacctgtccaacggacagatgtgcgaatggcctcgcccccggggccaagccgctgcccccgaggctcctcagccggctccccctgggggaagcggctctgaaccctataagctcctgcctggggcggtggccaccatcgtcagacccctgagcgctattccgcagcctacgatcacaaagcaggaggtgatttgaggactagtccctgttcccagagcccacttttttttctttttttgaaataaaatagcctgtctttcagatctcaaaggctcttttcagagccaccaaaaaaaaaaaaaaaaaaaaaaaaaaaaaaaaaaaaaaaaaaaaaaaaaaaaaaaaaaaaaaaaaaaaaaaaaaaaaaaaaaaaaaaaaaaaaaaaaaaaa

SEQ ID NO: 4071 - RNA, 1586 nt, synthetic construct
  misc_feature 1..1586: note = mRNA a-1 (hSL-A100) (opt5) from Homo sapiens__NP_000448.3__HNF4A(39-474)(S142A_S143A_S148A_S167A _S313A_S378A_T429A_T432A_S436A_K458R)
  source 1..1586: mol_type = other RNA
aggagagtcccgcagtcggcgtccagcggctctgcttgttcgtgtgtgtgtcgttgcaggccttattcaagcttaccatggacacatctcctagcgaggggaccaacctcaatgctccgaactccctgggagtgtctgccctttgcgccatctgtggcgatcgggctacagggaaacactacggagccagctcctgcgacggctgtaaggggtttttccgcagatctgtgcggaaaaatcatatgtatagctgccgcttttccagacaatgtgtcgtggataaggacaaacggaaccagtgccgctactgtagactgaagaagtgcttccgggctggaatgaaaaaggaagccgttcagaatgagcgcgatagaattagcacccggcgcgcggcctatgaagactctgctctcccctccatcaacgccctgctgcaggctgaggtgctcagcagacaaattacagcccctgtctctggcatcaatggcgatattcgggcgaaaaagatcgcctccatcgctgacgtgtgtgagagcatgaaagaacagctgcttgttctggtggagtgggccaagtacattcccgctttttgcgaactccctctggatgaccaggtcgcccttctgcgcgcccacgctggggagcatctcctgctgggagcgaccaagagatctatggtgttcaaagacgtgctcctgcttggcaacgattatatcgtcccccggcactgtcctgagctggccgaaatgtccagagttagcattcgcatcctcgacgagctggtgcttccgtttcaggaactgcaaattgatgacaatgagtacgcttacctcaaggccatcattttctttgatcccgacgccaaagggctgtccgatcctggaaagatcaaacggctgagagctcaggtgcaggtctctctcgaagactatatcaacgatcgccagtacgacagccggggcagattcggggagctgcttctgctcctgcccacgcttcaatccattacctggcagatgatcgagcagattcaatttatcaagctgttcggaatggccaaaattgataatctcctgcaggaaatgctgctcggcggcgcgcctagcgacgctccccatgcccaccacccgctgcatcctcaccttatgcaggagcatatggggacaaacgtgatcgttgccaataccatgcccacacacctgtctaacggacagatgtgcgaatggcctcgcccccggggccaagctgccgctcccgaggcccctcagccggcgccccctgggggatccggcagcgaaccctataagctcctgcctggggccgtggctaccatcgtcagacccctgtctgccattccgcagcctacgatcacaaagcaggaggtgatttgaggactagtccctgttcccagagcccacttttttttctttttttgaaataaaatagcctgtctttcagatctcaaaggctcttttcagagccaccaaaaaaaaaaaaaaaaaaaaaaaaaaaaaaaaaaaaaaaaaaaaaaaaaaaaaaaaaaaaaaaaaaaaaaaaaaaaaaaaaaaaaaaaaaaaaaaaaaaaa

SEQ ID NO: 4072 - RNA, 1586 nt, synthetic construct
  misc_feature 1..1586: note = mRNA a-1 (hSL-A100) (opt5) from Homo sapiens__NP_000448.3__HNF4A(39-474)(K106R_K108R_K126R_K127R _S142A_S143A_S148A_S167A_S313A_S378A_T429A_T432A_S436A_K458 R)
  source 1..1586: mol_type = other RNA
aggagagtcccgcagtcggcgtccagcggctctgcttgttcgtgtgtgtgtcgttgcaggccttattcaagcttaccatggacacatctcctagcgaggggaccaacctcaatgctccgaactccctgggagtgtctgccctttgcgccatctgtggcgatcgggctacagggaaacactacggagccagctcctgcgacggctgtaaggggtttttccgcagatctgtgcggaaaaatcatatgtatagctgccgcttttccagacaatgtgtcgtggatcgggaccgcagaaaccagtgccggtactgtcgcctgaagaaatgcttcagagctggaatgcggcgcgaagccgttcagaatgagagagatcggattagcacccgcagagcggcctatgaagactctgctctcccctccatcaacgccctgctgcaggctgaggtgctcagccggcaaattacagcccctgtctctggcatcaatggcgatattagagcgaagaagatcgcctccatcgctgacgtgtgtgagagcatgaaagaacagctgcttgttctggtggagtgggccaagtacattcccgctttttgcgaactccctctggatgaccaggtcgcccttctgcgcgcccacgctggggagcatctcctgctgggagcgaccaaacggtctatggtgttcaaggacgtgctcctgcttggcaacgattatatcgtccccagacactgtcctgagctggccgaaatgtcccgcgttagcattcggatcctcgacgagctggtgcttccgtttcaggaactgcaaattgatgacaatgagtacgcttacctcaaagccatcattttctttgatcccgacgccaaggggctgtccgatcctggaaagatcaaaagactgcgcgctcaggtgcaggtctctctcgaagactatatcaacgatcggcagtacgacagcagaggccgcttcggggagctgcttctgctcctgcccacgcttcaatccattacctggcagatgatcgagcagattcaatttatcaagctgttcggaatggccaaaattgataatctcctgcaggaaatgctgctcggcggcgcgcctagcgacgctccccatgcccaccacccgctgcatcctcaccttatgcaggagcatatggggacaaacgtgatcgttgccaataccatgcccacacacctgtctaacggacagatgtgcgaatggcctcggcccagaggccaagctgccgctcccgaggcccctcagccggcgccccctgggggatccggcagcgaaccctataagctcctgcctggggccgtggctaccatcgtccgccccctgtctgccattccgcagcctacgatcacaaaacaggaggtgatttgaggactagtccctgttcccagagcccacttttttttctttttttgaaataaaatagcctgtctttcagatctcaaaggctcttttcagagccaccaaaaaaaaaaaaaaaaaaaaaaaaaaaaaaaaaaaaaaaaaaaaaaaaaaaaaaaaaaaaaaaaaaaaaaaaaaaaaaaaaaaaaaaaaaaaaaaaaaaaa

SEQ ID NO: 4073 - RNA, 1586 nt, synthetic construct
  misc_feature 1..1586: note = mRNA a-1 (hSL-A100) (opt5) from Homo sapiens__NP_000448.3__HNF4A(39-474)(S142A_S143A_S148A_T166A _S167A_S313A_S378A_T429A_T432A_S436A_K458R)
  source 1..1586: mol_type = other RNA
aggagagtcccgcagtcggcgtccagcggctctgcttgttcgtgtgtgtgtcgttgcaggccttattcaagcttaccatggacacatctcctagcgaggggaccaacctcaatgctccgaactccctgggagtgtctgccctttgcgccatctgtggcgatcgggctacagggaaacactacggagccagctcctgcgacggctgtaaggggtttttccgcagatctgtgcggaaaaatcatatgtatagctgccgcttttccagacaatgtgtcgtggataaggacaaacggaaccagtgccgctactgtagactgaagaagtgcttccgggctggaatgaaaaaggaagccgttcagaatgagcgcgatagaattagcacccggcgcgcggcctatgaagactctgctctcccctccatcaacgccctgctgcaggctgaggtgctcagcagacaaattgccgcgcctgtctctggcatcaatggcgatattcgggccaaaaagatcgcttccatcgccgacgtgtgtgagagcatgaaagaacagctgcttgttctggtggagtgggctaagtacattcccgccttttgcgaactccctctggatgaccaggtcgcccttctgcgcgctcacgcgggggagcatctcctgctgggagccacaaagagatctatggtgttcaaagacgtgctcctgcttggcaacgattatatcgtcccccggcactgtcctgagctggctgaaatgtccagagttagcattcgcatcctcgacgagctggtgcttccgtttcaggaactgcaaattgatgacaatgagtacgcctacctcaaggccatcattttctttgatcccgacgctaaagggctgtccgatcctggaaagatcaaacggctgagagcccaggtgcaggtctctctcgaagactatatcaacgatcgccagtacgacagccggggcagattcggggagctgcttctgctcctgcccacccttcaatccattacgtggcagatgatcgagcagattcaatttatcaagctgttcggaatggcgaaaattgataatctcctgcaggaaatgctgctcggcggcgctcctagcgacgctccccatgcccaccacccgctgcatcctcaccttatgcaggagcatatggggaccaacgtgatcgttgccaatacaatgcccacccacctgtctaacggacagatgtgcgaatggcctcgcccccggggccaagccgctgcccccgaggcgcctcagccggctccccctgggggatccggcagcgaaccctataagctcctgcctggggccgtggccacaatcgtcagacccctgtctgctattccgcagcctaccatcacgaagcaggaggtgatttgaggactagtccctgttcccagagcccacttttttttctttttttgaaataaaatagcctgtctttcagatctcaaaggctcttttcagagccaccaaaaaaaaaaaaaaaaaaaaaaaaaaaaaaaaaaaaaaaaaaaaaaaaaaaaaaaaaaaaaaaaaaaaaaaaaaaaaaaaaaaaaaaaaaaaaaaaaaaaa

SEQ ID NO: 4074 - RNA, 1586 nt, synthetic construct
  misc_feature 1..1586: note = mRNA a-1 (hSL-A100) (opt5) from Homo sapiens__NP_000448.3__HNF4A(39-474)(S87A_S142A_S143A_S148A_ T166A_S167A_S313A_S378A_T429A_T432A_S436A_K458R)
  source 1..1586: mol_type = other RNA
aggagagtcccgcagtcggcgtccagcggctctgcttgttcgtgtgtgtgtcgttgcaggccttattcaagcttaccatggacacatctcctagcgaggggaccaacctcaatgctccgaactccctgggagtgtctgccctttgcgccatctgtggcgatcgggctacagggaaacactacggagccagctcctgcgacggctgtaaggggtttttccgcagagctgtgcggaaaaatcatatgtattcttgccgctttagcagacaatgtgtcgtggataaggacaaacggaaccagtgccgctactgtagactgaagaagtgcttccgggccggaatgaaaaaggaagcggttcagaatgagcgcgatagaatttccacccggcgcgccgcttatgaagacagcgccctcccctctatcaacgctctgctgcaggccgaggtgctctccagacaaattgcggcccctgtcagcggcatcaatggcgatattcgggctaaaaagatcgcctctatcgctgacgtgtgtgagtccatgaaagaacagctgcttgttctggtggagtgggccaagtacattcccgccttttgcgaactccctctggatgaccaggtcgcccttctgcgcgcgcacgccggggagcatctcctgctgggagctacaaagagaagcatggtgttcaaagacgtgctcctgcttggcaacgattatatcgtcccccggcactgtcctgagctggccgaaatgtctagagtttccattcgcatcctcgacgagctggtgcttccgtttcaggaactgcaaattgatgacaatgagtacgcctacctcaaggctatcattttctttgatcccgacgccaaagggctgagcgatcctggaaagatcaaacggctgagagctcaggtgcaggtctccctcgaagactatatcaacgatcgccagtacgactctcggggcagattcggggagctgcttctgctcctgcccacccttcaaagcattacgtggcagatgatcgagcagattcaatttatcaagctgttcggaatggcgaaaattgataatctcctgcaggaaatgctgctcggcggcgccccttccgacgctccccatgctcaccacccgctgcatcctcaccttatgcaggagcatatggggaccaacgtgatcgttgccaatacaatgcccacccacctgagcaacggacagatgtgcgaatggcctcgcccccggggccaagctgccgcgcccgaggcccctcagccggctccccctgggggatctggctccgaaccctataagctcctgcctggggccgtggctacaatcgtcagacccctgagcgccattccgcagcctaccatcacgaagcaggaggtgatttgaggactagtccctgttcccagagcccacttttttttctttttttgaaataaaatagcctgtctttcagatctcaaaggctcttttcagagccaccaaaaaaaaaaaaaaaaaaaaaaaaaaaaaaaaaaaaaaaaaaaaaaaaaaaaaaaaaaaaaaaaaaaaaaaaaaaaaaaaaaaaaaaaaaaaaaaaaaaaa

SEQ ID NO: 4075 - RNA, 1586 nt, synthetic construct
  misc_feature 1..1586: note = mRNA a-1 (hSL-A100) (opt5) from Homo sapiens__NP_000448.3__HNF4A(39-474)(S87A_K106R_K108R_K126R_ K127R_S142A_S143A_S148A_T166A_S167A_S313A_S378A_T429A_T432A _S436A_K458R)
  source 1..1586: mol_type = other RNA
aggagagtcccgcagtcggcgtccagcggctctgcttgttcgtgtgtgtgtcgttgcaggccttattcaagcttaccatggacacatctcctagcgaggggaccaacctcaatgctccgaactccctgggagtgtctgccctttgcgccatctgtggcgatcgggctacagggaaacactacggagccagctcctgcgacggctgtaaggggtttttccgcagagctgtgcggaaaaatcatatgtattcttgccgctttagcagacaatgtgtcgtggatcgggaccgcagaaaccagtgccggtactgtcgcctgaagaaatgcttcagagccggaatgcggcgcgaagcggttcagaatgagagagatcggatttccacccgcagagccgcttatgaagacagcgccctcccctctatcaacgctctgctgcaggccgaggtgctctcccggcaaattgcggcccctgtcagcggcatcaatggcgatattagagctaagaagatcgcctctatcgctgacgtgtgtgagtccatgaaagaacagctgcttgttctggtggagtgggccaagtacattcccgccttttgcgaactccctctggatgaccaggtcgcccttctgcgcgcgcacgccggggagcatctcctgctgggagctacaaaacggagcatggtgttcaaggacgtgctcctgcttggcaacgattatatcgtccccagacactgtcctgagctggccgaaatgtctcgcgtttccattcggatcctcgacgagctggtgcttccgtttcaggaactgcaaattgatgacaatgagtacgcctacctcaaagctatcattttctttgatcccgacgccaaggggctgagcgatcctggaaagatcaaaagactgcgcgctcaggtgcaggtctccctcgaagactatatcaacgatcggcagtacgactctagaggccgcttcggggagctgcttctgctcctgcccacccttcaaagcattacgtggcagatgatcgagcagattcaatttatcaagctgttcggaatggcgaaaattgataatctcctgcaggaaatgctgctcggcggcgccccttccgacgctccccatgctcaccacccgctgcatcctcaccttatgcaggagcatatggggaccaacgtgatcgttgccaatacaatgcccacccacctgagcaacggacagatgtgcgaatggcctcggcccagaggccaagctgccgcgcccgaggcccctcagccggctccccctgggggatctggctccgaaccctataagctcctgcctggggccgtggctacaatcgtccgccccctgagcgccattccgcagcctaccatcacgaaacaggaggtgatttgaggactagtccctgttcccagagcccacttttttttctttttttgaaataaaatagcctgtctttcagatctcaaaggctcttttcagagccaccaaaaaaaaaaaaaaaaaaaaaaaaaaaaaaaaaaaaaaaaaaaaaaaaaaaaaaaaaaaaaaaaaaaaaaaaaaaaaaaaaaaaaaaaaaaaaaaaaaaaa

SEQ ID NO: 4076 - RNA, 1586 nt, synthetic construct
  misc_feature 1..1586: note = mRNA a-1 (hSL-A100) (opt5) from Homo sapiens__NP_000448.3__HNF4A(39-474)(S87A_K106R_K108R_K126R_ K127R)
  source 1..1586: mol_type = other RNA
aggagagtcccgcagtcggcgtccagcggctctgcttgttcgtgtgtgtgtcgttgcaggccttattcaagcttaccatggacacatctcctagcgaggggaccaacctcaatgctccgaactccctgggagtgtctgccctttgcgccatctgtggcgatcgggctacagggaaacactacggagccagctcctgcgacggctgtaaggggtttttccgcagagctgtgcggaaaaatcatatgtattcttgccgctttagcagacaatgtgtcgtggatcgggaccgcagaaaccagtgccggtactgtcgcctgaagaaatgcttcagagccggaatgcggcgcgaagcggttcagaatgagagagatcggatttccacccgcagaagctcttatgaagactccagcctcccctctatcaacgccctgctgcaggctgaggtgctctcccggcaaattacaagccctgtctctggcatcaatggcgatattagagccaagaagatcgcttccatcgccgacgtgtgtgagagcatgaaagaacagctgcttgttctggtggagtgggcgaagtacattcccgccttttgcgaactccctctggatgaccaggtcgcccttctgcgcgcccacgctggggagcatctcctgctgggagccaccaaacggtccatggtgttcaaggacgtgctcctgcttggcaacgattatatcgtccccagacactgtcctgagctggccgaaatgtctcgcgttagcattcggatcctcgacgagctggtgcttccgtttcaggaactgcaaattgatgacaatgagtacgcttacctcaaagcgatcattttctttgatcccgacgccaaggggctgtccgatcctggaaagatcaaaagactgcgcagccaggtgcaggtctctctcgaagactatatcaacgatcggcagtacgactccagaggccgcttcggggagctgcttctgctcctgcccacgcttcaaagcattacctggcagatgatcgagcagattcaatttatcaagctgttcggaatggctaaaattgataatctcctgcaggaaatgctgctcggcggctctcctagcgacgctccccatgcccaccacccgctgcatcctcaccttatgcaggagcatatggggacaaacgtgatcgttgctaataccatgcccacacacctgtccaacggacagatgtgcgaatggcctcggcccagaggccaagccgcgacccccgagacgcctcagccgtctccccctgggggaagcggctccgaaccctataagctcctgcctggggctgtggccacaatcgtcaaacccctgagcgccattccgcagcctaccatcacaaagcaggaggtgatttgaggactagtccctgttcccagagcccacttttttttctttttttgaaataaaatagcctgtctttcagatctcaaaggctcttttcagagccaccaaaaaaaaaaaaaaaaaaaaaaaaaaaaaaaaaaaaaaaaaaaaaaaaaaaaaaaaaaaaaaaaaaaaaaaaaaaaaaaaaaaaaaaaaaaaaaaaaaaaa

SEQ ID NO: 4077 - RNA, 1586 nt, synthetic construct
  misc_feature 1..1586: note = mRNA a-1 (hSL-A100) (opt5) from Homo sapiens__NP_000448.3__HNF4A(39-474)(S87A_K106R_K108R_K126R_ K127R_S142A_S143A_S148A_T166A_S167A_S313A_S378A_T429A_T432A _S436A_K458R_S461A)
  source 1..1586: mol_type = other RNA
aggagagtcccgcagtcggcgtccagcggctctgcttgttcgtgtgtgtgtcgttgcaggccttattcaagcttaccatggacacatctcctagcgaggggaccaacctcaatgctccgaactccctgggagtgtctgccctttgcgccatctgtggcgatcgggctacagggaaacactacggagccagctcctgcgacggctgtaaggggtttttccgcagagctgtgcggaaaaatcatatgtattcttgccgctttagcagacaatgtgtcgtggatcgggaccgcagaaaccagtgccggtactgtcgcctgaagaaatgcttcagagccggaatgcggcgcgaagcggttcagaatgagagagatcggatttccacccgcagagccgcttatgaagacagcgccctcccctctatcaacgctctgctgcaggccgaggtgctctcccggcaaattgcggcccctgtcagcggcatcaatggcgatattagagctaagaagatcgcctctatcgctgacgtgtgtgagtccatgaaagaacagctgcttgttctggtggagtgggccaagtacattcccgccttttgcgaactccctctggatgaccaggtcgcccttctgcgcgcgcacgccggggagcatctcctgctgggagctacaaaacggagcatggtgttcaaggacgtgctcctgcttggcaacgattatatcgtccccagacactgtcctgagctggccgaaatgtctcgcgtttccattcggatcctcgacgagctggtgcttccgtttcaggaactgcaaattgatgacaatgagtacgcctacctcaaagctatcattttctttgatcccgacgccaaggggctgagcgatcctggaaagatcaaaagactgcgcgctcaggtgcaggtctccctcgaagactatatcaacgatcggcagtacgactctagaggccgcttcggggagctgcttctgctcctgcccacccttcaaagcattacgtggcagatgatcgagcagattcaatttatcaagctgttcggaatggcgaaaattgataatctcctgcaggaaatgctgctcggcggcgccccttccgacgctccccatgctcaccacccgctgcatcctcaccttatgcaggagcatatggggaccaacgtgatcgttgccaatacaatgcccacccacctgagcaacggacagatgtgcgaatggcctcggcccagaggccaagctgccgcgcccgaggcccctcagccggctccccctgggggatctggctccgaaccctataagctcctgcctggggccgtggctacaatcgtccgccccctggccgcgattccgcagcctaccatcacgaaacaggaggtgatttgaggactagtccctgttcccagagcccacttttttttctttttttgaaataaaatagcctgtctttcagatctcaaaggctcttttcagagccaccaaaaaaaaaaaaaaaaaaaaaaaaaaaaaaaaaaaaaaaaaaaaaaaaaaaaaaaaaaaaaaaaaaaaaaaaaaaaaaaaaaaaaaaaaaaaaaaaaaaaa

SEQ ID NO: 4078 - RNA, 1586 nt, synthetic construct
  misc_feature 1..1586: note = mRNA a-1 (hSL-A100) (opt5) from Homo sapiens__NP_000448.3__HNF4A(39-474)(S87A_K106R_K108R_K126R_ K127R_S142A_S143A_S148A_T166A_S167A_S313A_S378A_T429A_T432A _S436A_K458R_S461E)
  source 1..1586: mol_type = other RNA
aggagagtcccgcagtcggcgtccagcggctctgcttgttcgtgtgtgtgtcgttgcaggccttattcaagcttaccatggacacatctcctagcgaggggaccaacctcaatgctccgaactccctgggagtgtctgccctttgcgccatctgtggcgatcgggctacagggaaacactacggagccagctcctgcgacggctgtaaggggtttttccgcagagctgtgcggaaaaatcatatgtattcttgccgctttagcagacaatgtgtcgtggatcgggaccgcagaaaccagtgccggtactgtcgcctgaagaaatgcttcagagccggaatgcggcgcgaagcggttcagaatgagagagatcggatttccacccgcagagccgcttatgaagacagcgccctcccctctatcaacgctctgctgcaggccgaggtgctctcccggcaaattgcggcccctgtcagcggcatcaatggcgatattagagctaagaagatcgcctctatcgctgacgtgtgtgagtccatgaaagaacagctgcttgttctggtggagtgggccaagtacattcccgccttttgcgaactccctctggatgaccaggtcgcccttctgcgcgcgcacgccggggagcatctcctgctgggagctacaaaacggagcatggtgttcaaggacgtgctcctgcttggcaacgattatatcgtccccagacactgtcctgagctggccgaaatgtctcgcgtttccattcggatcctcgacgagctggtgcttccgtttcaggaactgcaaattgatgacaatgagtacgcctacctcaaagctatcattttctttgatcccgacgccaaggggctgagcgatcctggaaagatcaaaagactgcgcgctcaggtgcaggtctccctcgaagactatatcaacgatcggcagtacgactctagaggccgcttcggggagctgcttctgctcctgcccacccttcaaagcattacgtggcagatgatcgagcagattcaatttatcaagctgttcggaatggcgaaaattgataatctcctgcaggaaatgctgctcggcggcgccccttccgacgctccccatgctcaccacccgctgcatcctcaccttatgcaggagcatatggggaccaacgtgatcgttgccaatacaatgcccacccacctgagcaacggacagatgtgcgaatggcctcggcccagaggccaagctgccgcgcccgaggcccctcagccggctccccctgggggatctggctccgaaccctataagctcctgcctggggccgtggctacaatcgtccgccccctggaggccattccgcagcctaccatcacgaaacaggaggtgatttgaggactagtccctgttcccagagcccacttttttttctttttttgaaataaaatagcctgtctttcagatctcaaaggctcttttcagagccaccaaaaaaaaaaaaaaaaaaaaaaaaaaaaaaaaaaaaaaaaaaaaaaaaaaaaaaaaaaaaaaaaaaaaaaaaaaaaaaaaaaaaaaaaaaaaaaaaaaaaa

SEQ ID NO: 4079 - RNA, 1586 nt, synthetic construct
  misc_feature 1..1586: note = mRNA a-1 (hSL-A100) (opt5) from Homo sapiens__NP_000448.3__HNF4A(39-474)(S87A_K106R_K108R_K126R_ K127R_S142A_S143A_S148E_T166A_S167E_S313A_S378E_T429E_T432E _S436E_K458R_S461E)
  source 1..1586: mol_type = other RNA
aggagagtcccgcagtcggcgtccagcggctctgcttgttcgtgtgtgtgtcgttgcaggccttattcaagcttaccatggacacatctcctagcgaggggaccaacctcaatgctccgaactccctgggagtgtctgccctttgcgccatctgtggcgatcgggctacagggaaacactacggagccagctcctgcgacggctgtaaggggtttttccgcagagctgtgcggaaaaatcatatgtattcttgccgctttagcagacaatgtgtcgtggatcgggaccgcagaaaccagtgccggtactgtcgcctgaagaaatgcttcagagccggaatgcggcgcgaagcggttcagaatgagagagatcggatttccacccgcagagccgcttatgaagacagcgagctcccctctatcaacgccctgctgcaggctgaggtgctctcccggcaaattgccgaacctgtcagcggcatcaatggcgatattagagcgaagaagatcgcctctatcgctgacgtgtgtgagtccatgaaagaacagctgcttgttctggtggagtgggccaagtacattcccgctttttgcgagctccctctggatgaccaggtcgcccttctgcgcgcccacgctggggaacatctcctgctgggagcgacaaaacggagcatggtgttcaaggacgtgctcctgcttggcaacgattatatcgtccccagacactgtcctgagctggccgaaatgtctcgcgtttccattcggatcctcgacgagctggtgcttccgtttcaggaactgcaaattgatgacaatgagtacgcttacctcaaagccatcattttctttgatcccgacgccaaggggctgagcgatcctggaaagatcaaaagactgcgcgctcaggtgcaggtctccctcgaggactatatcaacgatcggcagtacgactctagaggccgcttcggggaactgcttctgctcctgcccacccttcaaagcattacgtggcagatgatcgagcagattcaatttatcaagctgttcggaatggccaaaattgataatctcctgcaggaaatgctgctcggcggcgagccttccgacgcgccccatgctcaccacccgctgcatcctcaccttatgcaggaacatatggggaccaacgtgatcgttgccaatacaatgcccacccacctgagcaacggacagatgtgcgagtggcctcggcccagaggccaagccgctgagcccgaggaacctcagccggaaccccctgggggatctggctccgagccctataagctcctgcctggggccgtggctacaatcgtccgccccctggaagccattccgcagcctaccatcacgaaacaggaggtgatttgaggactagtccctgttcccagagcccacttttttttctttttttgaaataaaatagcctgtctttcagatctcaaaggctcttttcagagccaccaaaaaaaaaaaaaaaaaaaaaaaaaaaaaaaaaaaaaaaaaaaaaaaaaaaaaaaaaaaaaaaaaaaaaaaaaaaaaaaaaaaaaaaaaaaaaaaaaaaaa

SEQ ID NO: 4080 - RNA, 1586 nt, synthetic construct
  misc_feature 1..1586: note = mRNA a-1 (hSL-A100) (opt5) from Homo sapiens__NP_000448.3__HNF4A(39-474)(S87A_K106R_K108R_K126R_ K127R_S142A_S143A_S148A_T166A_S167A_K179R_K180R_S313A_S378A _T429A_T432A_S436A_K458R_S461E)
  source 1..1586: mol_type = other RNA
aggagagtcccgcagtcggcgtccagcggctctgcttgttcgtgtgtgtgtcgttgcaggccttattcaagcttaccatggacacatctcctagcgaggggaccaacctcaatgctccgaactccctgggagtgtctgccctttgcgccatctgtggcgatcgggctacagggaaacactacggagccagctcctgcgacggctgtaaggggtttttccgcagagctgtgcggaaaaatcatatgtattcttgccgctttagcagacaatgtgtcgtggatcgggaccgcagaaaccagtgccggtactgtcgcctgaagaaatgcttcagagccggaatgcggcgcgaagcggttcagaatgagagagatcggatttccacccgcagagccgcttatgaagacagcgccctcccctctatcaacgctctgctgcaggccgaggtgctctcccggcaaattgcggcccctgtcagcggcatcaatggcgatattagagctcgccggatcgcctctatcgctgacgtgtgtgagtccatgaaggaacagctgcttgttctggtggagtgggccaagtacattcccgccttttgcgaactccctctggatgaccaggtcgcccttctgagagcgcacgccggggagcatctcctgctgggagctacaaaacgcagcatggtgttcaaggacgtgctcctgcttggcaacgattatatcgtcccccggcactgtcctgagctggccgaaatgtctagagtttccattcgcatcctcgacgagctggtgcttccgtttcaggaactgcaaattgatgacaatgagtacgcctacctcaaagctatcattttctttgatcccgacgccaaggggctgagcgatcctggaaaaatcaagcggctgagagctcaggtgcaggtctccctcgaagactatatcaacgatcgccagtacgactctcggggcagattcggggagctgcttctgctcctgcccacccttcaaagcattacgtggcagatgatcgagcagattcaatttatcaagctgttcggaatggcgaaaattgataatctcctgcaggaaatgctgctcggcggcgccccttccgacgctccccatgctcaccacccgctgcatcctcaccttatgcaggagcatatggggaccaacgtgatcgttgccaatacaatgcccacccacctgagcaacggacagatgtgcgaatggcctcgcccccggggccaagctgccgcgcccgaggcccctcagccggctccccctgggggatctggctccgaaccctataagctcctgcctggggccgtggctacaatcgtcagacccctggaggccattccgcagcctaccatcacgaaacaggaggtgatttgaggactagtccctgttcccagagcccacttttttttctttttttgaaataaaatagcctgtctttcagatctcaaaggctcttttcagagccaccaaaaaaaaaaaaaaaaaaaaaaaaaaaaaaaaaaaaaaaaaaaaaaaaaaaaaaaaaaaaaaaaaaaaaaaaaaaaaaaaaaaaaaaaaaaaaaaaaaaaa

SEQ ID NO: 4081 - RNA, 1586 nt, synthetic construct
  misc_feature 1..1586: note = mRNA a-1 (hSL-A100) (opt5) from Homo sapiens__NP_000448.3__HNF4A(39-474)(S87A_K106R_K108R_K126R_ K127R_S142A_S143A_S148A_T166A_S167A_K300R_K307R_K309R_S313A _S378A_T429A_T432A_S436A_K458R_S461E)
  source 1..1586: mol_type = other RNA
aggagagtcccgcagtcggcgtccagcggctctgcttgttcgtgtgtgtgtcgttgcaggccttattcaagcttaccatggacacatctcctagcgaggggaccaacctcaatgctccgaactccctgggagtgtctgccctttgcgccatctgtggcgatcgggctacagggaaacactacggagccagctcctgcgacggctgtaaggggtttttccgcagagctgtgcggaaaaatcatatgtattcttgccgctttagcagacaatgtgtcgtggatcgggaccgcagaaaccagtgccggtactgtcgcctgaagaaatgcttcagagccggaatgcggcgcgaagcggttcagaatgagagagatcggatttccacccgcagagccgcttatgaagacagcgccctcccctctatcaacgctctgctgcaggccgaggtgctctcccggcaaattgcggcccctgtcagcggcatcaatggcgatattagagctaagaagatcgcctctatcgctgacgtgtgtgagtccatgaaagaacagctgcttgttctggtggagtgggccaagtacattcccgccttttgcgaactccctctggatgaccaggtcgcccttctgcgcgcgcacgccggggagcatctcctgctgggagctacaaaacggagcatggtgttcaaggacgtgctcctgcttggcaacgattatatcgtccccagacactgtcctgagctggccgaaatgtctcgcgtttccattcggatcctcgacgagctggtgcttccgtttcaggaactgcaaattgatgacaatgagtacgcctacctcaaagctatcattttctttgatcccgacgccagagggctgagcgatcctggacgcatccggagactgcgcgctcaggtgcaggtctccctcgaagactatatcaacgatcggcagtacgactctagaggccgcttcggggagctgcttctgctcctgcccacccttcaaagcattacgtggcagatgatcgagcagattcaatttatcaagctgttcggaatggcgaagattgataatctcctgcaggaaatgctgctcggcggcgccccttccgacgctccccatgctcaccacccgctgcatcctcaccttatgcaggagcatatggggaccaacgtgatcgttgccaatacaatgcccacccacctgagcaacggacagatgtgcgaatggcctcggcccagaggccaagctgccgcgcccgaggcccctcagccggctccccctgggggatctggctccgaaccctataaactcctgcctggggccgtggctacaatcgtccggcccctggaggccattccgcagcctaccatcacgaagcaggaggtgatttgaggactagtccctgttcccagagcccacttttttttctttttttgaaataaaatagcctgtctttcagatctcaaaggctcttttcagagccaccaaaaaaaaaaaaaaaaaaaaaaaaaaaaaaaaaaaaaaaaaaaaaaaaaaaaaaaaaaaaaaaaaaaaaaaaaaaaaaaaaaaaaaaaaaaaaaaaaaaaa

SEQ ID NO: 4082 - RNA, 1586 nt, synthetic construct
  misc_feature 1..1586: note = mRNA a-1 (hSL-A100) (opt5) from Homo sapiens__NP_000448.3__HNF4A(39-474)(S87A_K106R_K108R_K126R_ K127R_S142A_S143A_S148A_T166A_S167A_S313A_S378A_T429A_T432A _S436A_K447R_K458R_S461E_K470R)
  source 1..1586: mol_type = other RNA
aggagagtcccgcagtcggcgtccagcggctctgcttgttcgtgtgtgtgtcgttgcaggccttattcaagcttaccatggacacatctcctagcgaggggaccaacctcaatgctccgaactccctgggagtgtctgccctttgcgccatctgtggcgatcgggctacagggaaacactacggagccagctcctgcgacggctgtaaggggtttttccgcagagctgtgcggaaaaatcatatgtattcttgccgctttagcagacaatgtgtcgtggatcgggaccgcagaaaccagtgccggtactgtcgcctgaagaaatgcttcagagccggaatgcggcgcgaagcggttcagaatgagagagatcggatttccacccgcagagccgcttatgaagacagcgccctcccctctatcaacgctctgctgcaggccgaggtgctctcccggcaaattgcggcccctgtcagcggcatcaatggcgatattagagctaagaagatcgcctctatcgctgacgtgtgtgagtccatgaaagaacagctgcttgttctggtggagtgggccaagtacattcccgccttttgcgaactccctctggatgaccaggtcgcccttctgcgcgcgcacgccggggagcatctcctgctgggagctacaaaacggagcatggtgttcaaggacgtgctcctgcttggcaacgattatatcgtccccagacactgtcctgagctggccgaaatgtctcgcgtttccattcggatcctcgacgagctggtgcttccgtttcaggaactgcaaattgatgacaatgagtacgcctacctcaaagctatcattttctttgatcccgacgccaaggggctgagcgatcctggaaagatcaaaagactgcgcgctcaggtgcaggtctccctcgaagactatatcaacgatcggcagtacgactctagaggccgcttcggggagctgcttctgctcctgcccacccttcaaagcattacgtggcagatgatcgagcagattcaatttatcaagctgttcggaatggcgaaaattgataatctcctgcaggaaatgctgctcggcggcgccccttccgacgctccccatgctcaccacccgctgcatcctcaccttatgcaggagcatatggggaccaacgtgatcgttgccaatacaatgcccacccacctgagcaacggacagatgtgcgaatggcctcggcccagaggccaagctgccgcgcccgaggcccctcagccggctccccctgggggatctggctccgaaccctatcgcctcctgcctggggccgtggctacaatcgtccggcccctggaggccattccgcagcctaccatcacgagacaggaggtgatttgaggactagtccctgttcccagagcccacttttttttctttttttgaaataaaatagcctgtctttcagatctcaaaggctcttttcagagccaccaaaaaaaaaaaaaaaaaaaaaaaaaaaaaaaaaaaaaaaaaaaaaaaaaaaaaaaaaaaaaaaaaaaaaaaaaaaaaaaaaaaaaaaaaaaaaaaaaaaaa

SEQ ID NO: 4083 - RNA, 1586 nt, synthetic construct
  misc_feature 1..1586: note = mRNA a-1 (hSL-A100) (opt5) from Homo sapiens__NP_000448.3__HNF4A(39-474)(S87A_K106R_K108R_K126R_ K127R_S142A_S143A_S148A_T166A_S167A_K179R_K180R_K234R_K300R _K307R_K309R_S313A_S378A_T429A_T432A_S436A_K447R_K458R_S461 E_K470R)
  source 1..1586: mol_type = other RNA
aggagagtcccgcagtcggcgtccagcggctctgcttgttcgtgtgtgtgtcgttgcaggccttattcaagcttaccatggacacatctcctagcgaggggaccaacctcaatgctccgaactccctgggagtgtctgccctttgcgccatctgtggcgatcgggctacagggaaacactacggagccagctcctgcgacggctgtaaggggtttttccgcagagctgtgcggaaaaatcatatgtattcttgccgctttagcagacaatgtgtcgtggatcgggaccgcagaaaccagtgccggtactgtcgcctgaagaaatgcttcagagccggaatgcggcgcgaagcggttcagaatgagagagatcggatttccacccgcagagccgcttatgaagacagcgccctcccctctatcaacgctctgctgcaggccgaggtgctctcccggcaaattgcggcccctgtcagcggcatcaatggcgatattagagctcgccggatcgcctctatcgctgacgtgtgtgagtccatgaaggaacagctgcttgttctggtggagtgggccaagtacattcccgccttttgcgaactccctctggatgaccaggtcgcccttctgagagcgcacgccggggagcatctcctgctgggagctacacgccggagcatggtgttcaaagacgtgctcctgcttggcaacgattatatcgtccccagacactgtcctgagctggccgaaatgtctcgcgtttccattcggatcctcgacgagctggtgcttccgtttcaggaactgcaaattgatgacaatgagtacgcctacctcaaggctatcattttctttgatcccgacgccagagggctgagcgatcctggacgcatccggagactgcgcgctcaggtgcaggtctccctcgaagactatatcaacgatcggcagtacgactctagaggccggttcggggagctgcttctgctcctgcccacccttcaaagcattacgtggcagatgatcgagcagattcaatttatcaaactgttcggaatggcgaagattgataatctcctgcaggaaatgctgctcggcggcgccccttccgacgctccccatgctcaccacccgctgcatcctcaccttatgcaggagcatatggggaccaacgtgatcgttgccaatacaatgcccacccacctgagcaacggacagatgtgcgaatggcctcgccccagaggccaagctgccgcgcccgaggcccctcagccggctccccctgggggatctggctccgaaccctatcggctcctgcctggggccgtggctacaatcgtcagacccctggaggccattccgcagcctaccatcacgcgccaggaggtgatttgaggactagtccctgttcccagagcccacttttttttctttttttgaaataaaatagcctgtctttcagatctcaaaggctcttttcagagccaccaaaaaaaaaaaaaaaaaaaaaaaaaaaaaaaaaaaaaaaaaaaaaaaaaaaaaaaaaaaaaaaaaaaaaaaaaaaaaaaaaaaaaaaaaaaaaaaaaaaaa

SEQ ID NO: 4084 - RNA, 1586 nt, synthetic construct
  misc_feature 1..1586: note = mRNA a-1 (hSL-A100) (opt5) from Homo sapiens__NP_000448.3__HNF4A(39-474)(S87A_S95A_S99A_K106R_K1 08R_K126R_K127R_S142A_S143A_S148A_T166A_S167A_S313A_S378A_T 429A_T432A_S436A_K458R_S461E)
  source 1..1586: mol_type = other RNA
aggagagtcccgcagtcggcgtccagcggctctgcttgttcgtgtgtgtgtcgttgcaggccttattcaagcttaccatggacacatctcctagcgaggggaccaacctcaatgctccgaactccctgggagtgtctgccctttgcgccatctgtggcgatcgggctacagggaaacactacggagccagctcctgcgacggctgtaaggggtttttccgcagagctgtgcggaaaaatcatatgtatgcctgccgctttgcgagacaatgtgtcgtggatcgggaccgcagaaaccagtgccggtactgtcgcctgaagaaatgcttcagagccggaatgcggcgcgaagctgttcagaatgagagagatcggatttctacccgcagagccgcttatgaagacagcgccctcccctccatcaacgcgctgctgcaggccgaggtgctcagccggcaaattgctgcccctgtctctggcatcaatggcgatattagagctaagaagatcgcctccatcgccgacgtgtgtgagagcatgaaagaacagctgcttgttctggtggagtgggctaagtacattcccgcgttttgcgaactccctctggatgaccaggtcgcccttctgcgcgctcacgccggggagcatctcctgctgggagccacaaaacggtctatggtgttcaaggacgtgctcctgcttggcaacgattatatcgtccccagacactgtcctgagctggctgaaatgtcccgcgttagcattcggatcctcgacgagctggtgcttccgtttcaggaactgcaaattgatgacaatgagtacgcctacctcaaagcgatcattttctttgatcccgacgctaaggggctgtctgatcctggaaagatcaaaagactgcgcgcccaggtgcaggtctccctcgaagactatatcaacgatcggcagtacgacagcagaggccgcttcggggagctgcttctgctcctgcccacccttcaatccattacgtggcagatgatcgagcagattcaatttatcaagctgttcggaatggccaaaattgataatctcctgcaggaaatgctgctcggcggcgctccttctgacgctccccatgcccaccacccgctgcatcctcaccttatgcaggagcatatggggaccaacgtgatcgttgccaatacaatgcccacccacctgagcaacggacagatgtgcgaatggcctcggcccagaggccaagcggccgctcccgaggcccctcagccggctccccctgggggatccggcagcgaaccctataagctcctgcctggggccgtggcgacaatcgtccgccccctggaggccattccgcagcctaccatcacgaaacaggaggtgatttgaggactagtccctgttcccagagcccacttttttttctttttttgaaataaaatagcctgtctttcagatctcaaaggctcttttcagagccaccaaaaaaaaaaaaaaaaaaaaaaaaaaaaaaaaaaaaaaaaaaaaaaaaaaaaaaaaaaaaaaaaaaaaaaaaaaaaaaaaaaaaaaaaaaaaaaaaaaaaa

SEQ ID NO: 4085 - RNA, 1586 nt, synthetic construct
  misc_feature 1..1586: note = mRNA a-1 (hSL-A100) (opt5) from Homo sapiens__NP_000448.3__HNF4A(39-474)(S87A_K106R_K108R_K126R_ K127R_S138A_T139A_S142A_S143A_S148A_T166A_S167A_S313A_S378A _T429A_T432A_S436A_K458R_S461E)
  source 1..1586: mol_type = other RNA
aggagagtcccgcagtcggcgtccagcggctctgcttgttcgtgtgtgtgtcgttgcaggccttattcaagcttaccatggacacatctcctagcgaggggaccaacctcaatgctccgaactccctgggagtgtctgccctttgcgccatctgtggcgatcgggctacagggaaacactacggagccagctcctgcgacggctgtaaggggtttttccgcagagctgtgcggaaaaatcatatgtattcttgccgctttagcagacaatgtgtcgtggatcgggaccgcagaaaccagtgccggtactgtcgcctgaagaaatgcttcagagccggaatgcggcgcgaagcggttcagaatgagagagatcggattgccgctcgcagagccgcttatgaagactccgccctccccagcatcaacgcgctgctgcaggccgaggtgctctctcggcaaattgctgcccctgtctccggcatcaatggcgatattagagctaagaagatcgccagcatcgccgacgtgtgtgagtctatgaaagaacagctgcttgttctggtggagtgggctaagtacattcccgcgttttgcgaactccctctggatgaccaggtcgcccttctgcgcgctcacgccggggagcatctcctgctgggagccaccaaacggtccatggtgttcaaggacgtgctcctgcttggcaacgattatatcgtccccagacactgtcctgagctggctgaaatgagccgcgtttctattcggatcctcgacgagctggtgcttccgtttcaggaactgcaaattgatgacaatgagtacgcctacctcaaagcgatcattttctttgatcccgacgctaaggggctgtccgatcctggaaagatcaaaagactgcgcgcccaggtgcaggtcagcctcgaagactatatcaacgatcggcagtacgactccagaggccgcttcggggagctgcttctgctcctgcccacacttcaatctattacctggcagatgatcgagcagattcaatttatcaagctgttcggaatggccaaaattgataatctcctgcaggaaatgctgctcggcggcgctcctagcgacgctccccatgcccaccacccgctgcatcctcaccttatgcaggagcatatggggacgaacgtgatcgttgccaataccatgcccacacacctgtccaacggacagatgtgcgaatggcctcggcccagaggccaagcggccgctcccgaggcccctcagccggctccccctgggggaagcggctctgaaccctataagctcctgcctggggccgtggcgaccatcgtccgccccctggaggccattccgcagcctacaatcaccaaacaggaggtgatttgaggactagtccctgttcccagagcccacttttttttctttttttgaaataaaatagcctgtctttcagatctcaaaggctcttttcagagccaccaaaaaaaaaaaaaaaaaaaaaaaaaaaaaaaaaaaaaaaaaaaaaaaaaaaaaaaaaaaaaaaaaaaaaaaaaaaaaaaaaaaaaaaaaaaaaaaaaaaaa

SEQ ID NO: 4086 - RNA, 1586 nt, synthetic construct
  misc_feature 1..1586: note = mRNA a-1 (hSL-A100) (opt5) from Homo sapiens__NP_000448.3__HNF4A(39-474)(S87A_S95A_S99A_K106R_K1 08R_K126R_K127R_S138A_T139A_S142A_S143A_S148A_T166A_S167A_S 313A_S378A_T429A_T432A_S436A_K458R_S461E)
  source 1..1586: mol_type = other RNA
aggagagtcccgcagtcggcgtccagcggctctgcttgttcgtgtgtgtgtcgttgcaggccttattcaagcttaccatggacacatctcctagcgaggggaccaacctcaatgctccgaactccctgggagtgtctgccctttgcgccatctgtggcgatcgggctacagggaaacactacggagccagctcctgcgacggctgtaaggggtttttccgcagagctgtgcggaaaaatcatatgtatgcctgccgctttgcgagacaatgtgtcgtggatcgggaccgcagaaaccagtgccggtactgtcgcctgaagaaatgcttcagagccggaatgcggcgcgaagctgttcagaatgagagagatcggattgccgctcgcagagccgcgtatgaagactctgccctccccagcatcaacgctctgctgcaggccgaggtgctctcccggcaaattgctgcccctgtcagcggcatcaatggcgatattagagccaagaagatcgcttctatcgcggacgtgtgtgagtccatgaaagaacagctgcttgttctggtggagtgggccaagtacattcccgctttttgcgaactccctctggatgaccaggtcgcccttctgcgcgcccacgctggggagcatctcctgctgggagccaccaaacggagcatggtgttcaaggacgtgctcctgcttggcaacgattatatcgtccccagacactgtcctgagctggcggaaatgtctcgcgtttccattcggatcctcgacgagctggtgcttccgtttcaggaactgcaaattgatgacaatgagtacgcttacctcaaagccatcattttctttgatcccgacgccaaggggctgagcgatcctggaaagatcaaaagactgcgcgctcaggtgcaggtctctctcgaagactatatcaacgatcggcagtacgactccagaggccgcttcggggagctgcttctgctcctgcccacacttcaaagcattacctggcagatgatcgagcagattcaatttatcaagctgttcggaatggccaaaattgataatctcctgcaggaaatgctgctcggcggcgctccttccgacgcgccccatgcccaccacccgctgcatcctcaccttatgcaggagcatatggggacgaacgtgatcgttgccaataccatgcccacacacctgtctaacggacagatgtgcgaatggcctcggcccagaggccaagctgccgctcccgaggcccctcagccggcgccccctgggggaagcggctccgaaccctataagctcctgcctggggccgtggctaccatcgtccgccccctggaggccattccgcagcctacaatcaccaaacaggaggtgatttgaggactagtccctgttcccagagcccacttttttttctttttttgaaataaaatagcctgtctttcagatctcaaaggctcttttcagagccaccaaaaaaaaaaaaaaaaaaaaaaaaaaaaaaaaaaaaaaaaaaaaaaaaaaaaaaaaaaaaaaaaaaaaaaaaaaaaaaaaaaaaaaaaaaaaaaaaaaaaa

SEQ ID NO: 4087 - RNA, 1586 nt, synthetic construct
  misc_feature 1..1586: note = mRNA a-1 (hSL-A100) (opt11) from Homo sapiens__NP_000448.3__HNF4A(39-474)
  source 1..1586: mol_type = other RNA
aggagagtcccgcagtcggcgtccagcggctctgcttgttcgtgtgtgtgtcgttgcaggccttattcaagcttaccatggacacatcaccctcagaaggtacaaacctcaacgcccccaactcgctaggcgtctccgcactatgcgcaatctgcggcgaccgtgccaccggcaaacactacggagcctcatcctgcgacggttgtaaaggcttcttccgacgcagcgtcagaaaaaaccacatgtactcctgccgcttctcccgtcaatgcgtcgtcgacaaagacaaacgcaaccaatgccggtactgccgcctaaaaaaatgcttccgcgcaggcatgaaaaaagaagcagtccaaaacgaacgcgaccgcatatcaacccgtcgatcatcatacgaagactcctccctccccagcatcaacgccctcctccaagcagaagtactaagccggcaaataacatccccagtcagcggcatcaacggagacatacgagccaaaaaaatagcttcaatcgccgacgtctgcgaatccatgaaagagcaactactggtcctcgtcgaatgggctaaatacatcccggccttctgcgaactccccctcgacgatcaagtcgcccttctaagagcccacgccggcgaacacctcctcttaggcgcaaccaaacgcagcatggtattcaaagacgtactgctcctcggcaacgattacatcgtcccacgacattgccccgagctcgcagaaatgtcccgagtctccatccgcatactcgacgaactcgtactccccttccaagaactccaaatagacgacaatgaatacgcatacctcaaagcaatcatcttcttcgaccccgacgccaaaggactcagcgacccaggcaaaatcaaacgcctacgatcacaagtacaagtttcacttgaagactacatcaacgacagacaatacgactcaagaggtcgtttcggagaactactcctactactaccaaccctccaaagcataacctggcaaatgatagaacaaatacaatttataaaactcttcggcatggccaaaatcgacaatctcctacaagaaatgctcctcggaggaagcccctcagatgccccacacgcccaccacccactacacccccacctcatgcaagagcacatgggtaccaacgtcatagtcgccaacacaatgcccacccacctctcaaacggccaaatgtgcgaatggccgcgcccacgcggacaagccgccacccccgaaaccccacagccaagcccacccggtggctccggcagcgaaccctacaaactcctacccggcgccgttgcaacaatagtcaaacccctatccgccataccccaaccaacgatcaccaaacaagaagtcatctagggactagtccctgttcccagagcccacttttttttctttttttgaaataaaatagcctgtctttcagatctcaaaggctcttttcagagccaccaaaaaaaaaaaaaaaaaaaaaaaaaaaaaaaaaaaaaaaaaaaaaaaaaaaaaaaaaaaaaaaaaaaaaaaaaaaaaaaaaaaaaaaaaaaaaaaaaaaaa

SEQ ID NO: 4088 - RNA, 1586 nt, synthetic construct
  misc_feature 1..1586: note = mRNA a-1 (hSL-A100) (opt11) from Homo sapiens__NP_000448.3__HNF4A(39-474)(S313A)
  source 1..1586: mol_type = other RNA
aggagagtcccgcagtcggcgtccagcggctctgcttgttcgtgtgtgtgtcgttgcaggccttattcaagcttaccatggatacctccccatctgaaggcaccaacctcaacgcacccaactctctcggagtctccgccctatgcgcaatctgcggcgaccgagccactggaaaacactacggcgcctcctcttgcgacggatgcaaaggcttcttccgaagatcagtccgaaaaaaccacatgtactcatgccgcttctcgcgccaatgcgtcgtcgacaaagacaaacgtaaccaatgcagatactgccgactcaaaaaatgcttccgcgccggcatgaaaaaagaagccgtccagaacgaacgcgaccgcatctcaaccagacgctcgagctacgaagactcctccctaccctccatcaacgccctactccaagcagaagtactatcccgccaaataacctcccccgtcagcggcatcaacggcgacatcagagccaaaaaaatcgcctcaatcgccgacgtatgcgagagcatgaaagaacagctccttgtcctagtagaatgggccaaatacatcccagccttctgcgaactccccctcgacgaccaagtcgccctactcagagcccacgccggcgaacacctcctcctcggcgctaccaagcgatctatggtattcaaggatgtacttctactcggaaacgactacatcgtaccacgccactgcccagaactagccgaaatgtcccgcgtatccatccgaatcctcgatgaactcgtactccccttccaagaactacaaattgacgacaatgaatacgcctacttaaaagccatcatattcttcgaccccgacgccaaaggtctgtccgacccaggcaaaatcaaacgactacgggcccaagtccaagtatcactcgaagactacatcaacgaccgccaatacgactcacgcggccgcttcggcgagctcctcctccttctcccaaccctacaatccataacctggcaaatgatcgaacaaatccaattcataaaactcttcggcatggcaaaaattgacaaccttctccaagaaatgctcctgggcggatccccctccgacgccccacacgcccatcaccccctccacccccacctaatgcaggaacacatgggcacaaatgtcatagtagccaacactatgcccacacatctctcaaacggccagatgtgtgaatggccacgcccacgaggacaagcagccacacccgaaacaccacaaccctcccccccaggcggctccggatccgaaccctacaaactcctacccggcgccgtcgccacaatcgtcaaacccctatccgccatcccccaacccacgatcaccaaacaagaagtcatctaaggactagtccctgttcccagagcccacttttttttctttttttgaaataaaatagcctgtctttcagatctcaaaggctcttttcagagccaccaaaaaaaaaaaaaaaaaaaaaaaaaaaaaaaaaaaaaaaaaaaaaaaaaaaaaaaaaaaaaaaaaaaaaaaaaaaaaaaaaaaaaaaaaaaaaaaaaaaaa

SEQ ID NO: 4089 - RNA, 1586 nt, synthetic construct
  misc_feature 1..1586: note = mRNA a-1 (hSL-A100) (opt11) from Homo sapiens__NP_000448.3__HNF4A(39-474)(S313E)
  source 1..1586: mol_type = other RNA
aggagagtcccgcagtcggcgtccagcggctctgcttgttcgtgtgtgtgtcgttgcaggccttattcaagcttaccatggacacctccccctcagaaggaaccaacctaaacgctcccaactcccttggcgtctccgccctctgcgcaatatgcggagaccgcgccaccggaaaacactacggcgcctcatcctgcgacggttgcaaaggcttcttccgccgatccgtccgcaaaaaccacatgtattcctgccgcttctcgcgacagtgcgtagtcgacaaagataaacgaaaccaatgccgatactgccgccttaaaaaatgcttccgcgccggaatgaaaaaagaagcagtccaaaacgaacgagaccgcatcagcacccgtaggagctcatacgaggactcgagcctcccctcgatcaacgccttactccaagccgaagtactgtcccgccagatcacctcacccgtctccggcatcaacggagacatcagagccaaaaaaatagcatcgatcgccgacgtatgcgagtccatgaaagaacaactcctagtactagtcgaatgggccaaatacatcccagcattctgcgaactacccctagatgatcaagtagccctactacgagcccacgccggcgaacacctcctcctcggggccaccaaacgatcaatggtcttcaaagacgtcctcctcctcggcaacgactacatcgtaccccgccactgcccagaactcgcagaaatgtcacgcgtctcaatccgcatcctggacgaacttgtactcccattccaagaactacaaatagacgacaacgaatacgcatacctgaaagcaatcatctttttcgaccccgacgccaaaggcctatctgaccccggtaaaataaaacgcctccgcgaacaagtacaagtctctctcgaagactacatcaacgaccgccagtacgacagccggggacgcttcggcgaacttctcctcctcctccccactctacaaagcatcacctggcaaatgatcgaacaaatacaattcatcaaactcttcggaatggcaaaaatcgacaacctcctccaagaaatgctcctcggcggctccccgagcgacgcccctcacgcccaccacccactccacccccacctaatgcaagagcacatgggaaccaacgtcatagtcgcaaacacaatgcccacccacctctccaacggccaaatgtgcgaatggccccgcccacgcggccaagccgccacacccgaaacaccccaaccatcacccccaggcggatcaggatccgagccctacaaactcctcccaggcgccgtcgccacaatcgtcaaacccctcagcgccataccacaaccaacaataacgaaacaagaagtcatataaggactagtccctgttcccagagcccacttttttttctttttttgaaataaaatagcctgtctttcagatctcaaaggctcttttcagagccaccaaaaaaaaaaaaaaaaaaaaaaaaaaaaaaaaaaaaaaaaaaaaaaaaaaaaaaaaaaaaaaaaaaaaaaaaaaaaaaaaaaaaaaaaaaaaaaaaaaaaa

SEQ ID NO: 4090 - RNA, 1586 nt, synthetic construct
  misc_feature 1..1586: note = mRNA a-1 (hSL-A100) (opt11) from Homo sapiens__NP_000448.3__HNF4A(39-474)(S142A_S143A)
  source 1..1586: mol_type = other RNA
aggagagtcccgcagtcggcgtccagcggctctgcttgttcgtgtgtgtgtcgttgcaggccttattcaagcttaccatggacacctccccctccgaaggcaccaacttaaacgcccccaactcccttggggtctccgctctctgcgcaatctgcggagacagagccaccggtaaacactacggagcctcctcctgcgacggatgcaaaggcttcttccgccgctcagtacgcaaaaaccacatgtatagttgccgcttctctcgccagtgcgtggtcgacaaagacaaacgcaaccaatgccgatactgccgcctcaaaaagtgcttccgcgccggaatgaagaaagaagctgtccaaaacgaacgcgaccgcatctcaacccgcagagcggcatacgaagacagctcgctaccctccataaacgccctccttcaagccgaagtcctatcccgacagatcacctcccccgtctctggaataaacggcgacatccgcgcaaagaaaatcgcctccatcgccgacgtatgcgaatccatgaaagaacaactcctagtgctagtagaatgggccaaatacatacccgccttctgcgagctccccctagacgaccaagtagccctactccgcgcacacgcaggcgaacacctcctcctcggcgccaccaaacgatcaatggtcttcaaagacgtactactcctcggcaatgactacatcgtcccacgacactgccccgaattagcagaaatgtcgcgagtctccatacgcatcctagacgaactcgtactccctttccaagaactacaaatcgatgacaacgaatacgcatacctcaaagccatcatcttcttcgacccagacgccaaaggcctttccgatcccggcaaaatcaaaagactacgctcacaagtacaagtctccctcgaagattacatcaacgaccgccaatacgactcacgcggccgcttcggagaactcctactactcctcccaaccctacaatccatcacctggcaaatgatcgaacaaatccagttcattaaactcttcggaatggccaaaatcgataacctcctacaagaaatgctcctaggcggcagtccatccgacgcgccccacgcacaccatccactccacccccacctcatgcaagaacacatgggcaccaacgtaatcgtcgcaaacaccatgcccacacacctttcaaacggccaaatgtgcgaatggccgcgcccccgcggccaagcagccaccccagaaaccccacaaccatcacccccaggcggcagcggctcagaaccctataaactcctccccggcgccgtagccacaatcgtcaaacctctctccgcaatcccccaacccaccatcaccaaacaagaagtcatctaaggactagtccctgttcccagagcccacttttttttctttttttgaaataaaatagcctgtctttcagatctcaaaggctcttttcagagccaccaaaaaaaaaaaaaaaaaaaaaaaaaaaaaaaaaaaaaaaaaaaaaaaaaaaaaaaaaaaaaaaaaaaaaaaaaaaaaaaaaaaaaaaaaaaaaaaaaaaaa

SEQ ID NO: 4091 - RNA, 1586 nt, synthetic construct
  misc_feature 1..1586: note = mRNA a-1 (hSL-A100) (opt11) from Homo sapiens__NP_000448.3__HNF4A(39-474)(S142E_S143E)
  source 1..1586: mol_type = other RNA
aggagagtcccgcagtcggcgtccagcggctctgcttgttcgtgtgtgtgtcgttgcaggccttattcaagcttaccatggacaccagcccgtccgaaggcacaaacctcaacgcccccaactcccttggtgtctcagccctctgcgcaatctgcggcgaccgtgccaccggtaaacactatggcgcctcatcctgcgacggctgcaaaggcttcttcagacgatcggtacgcaaaaaccacatgtactcatgtcgcttctcccgacaatgtgtagtggacaaagacaaaagaaaccaatgccgctactgccgcctcaaaaaatgcttccgcgcaggcatgaaaaaagaagccgtccagaatgaacgagaccgcataagcacccgccgagaagaatatgaagactcctcacttccctcaatcaacgccctactccaagccgaagtactatcacggcaaatcacaagccccgtctcaggaataaacggagacatccgcgccaaaaaaattgcctccatcgcggacgtatgcgaaagcatgaaagaacaactactcgtactcgtcgaatgggcaaaatacatccccgcattctgcgaactccccctcgacgaccaagtagccctgctcagagcacacgccggagaacaccttctcctcggcgccaccaaacgctccatggtcttcaaagacgtcctcctcctagggaacgactacatagtaccacgacactgcccagaactagccgaaatgtccagagtatcaatccgaatcctcgacgaactcgtcctccccttccaagaactacaaatcgacgacaacgaatacgcctacctaaaagccatcatattcttcgatcccgacgcaaaaggcctctccgaccccggcaaaatcaagcgactacgatcacaagtacaagtctccctggaagactacatcaacgaccgccaatacgacagccgcggaagattcggcgaactcctgctactactccccaccctacaatccatcacctggcaaatgatagaacaaatacaattcatcaaactcttcggcatggctaaaatcgacaacctcctacaagaaatgctactaggcggcagcccctcagacgccccccacgcccaccaccccctccacccccacctcatgcaggaacacatgggcaccaacgtcatcgtcgccaacacaatgcccacccatctctccaacggccaaatgtgcgaatggcctaggccacgtggtcaagcagcaacccccgaaaccccccaaccctccccaccaggcggttcaggatccgaaccctacaaactactcccaggcgccgtagccaccattgtcaagccgctcagcgctataccccaacccaccataaccaaacaagaagtcatataaggactagtccctgttcccagagcccacttttttttctttttttgaaataaaatagcctgtctttcagatctcaaaggctcttttcagagccaccaaaaaaaaaaaaaaaaaaaaaaaaaaaaaaaaaaaaaaaaaaaaaaaaaaaaaaaaaaaaaaaaaaaaaaaaaaaaaaaaaaaaaaaaaaaaaaaaaaaaa

SEQ ID NO: 4092 - RNA, 1586 nt, synthetic construct
  misc_feature 1..1586: note = mRNA a-1 (hSL-A100) (opt11) from Homo sapiens__NP_000448.3__HNF4A(39-474)(S143A)
  source 1..1586: mol_type = other RNA
aggagagtcccgcagtcggcgtccagcggctctgcttgttcgtgtgtgtgtcgttgcaggccttattcaagcttaccatggacacctcaccatcagaaggcaccaacctcaacgcccccaactccctcggagtctcagccctctgcgcaatctgcggcgaccgcgccaccggcaaacactacggagcctcgtcctgcgacggatgcaaaggattcttcaggcgctccgtacggaaaaaccacatgtactcttgtcgtttctcccgccaatgcgtagtcgacaaagacaaacgcaaccaatgccgctactgtcgcctcaaaaaatgcttccgcgccggcatgaagaaagaagccgtccaaaacgaacgcgaccgcatctccacccgcaggtccgcctacgaagactccagcctaccctccatcaacgcactactccaagccgaagtcctctcccgccaaatcacgtctcccgtctcaggaatcaacggcgacatccgcgctaagaaaatagcatctatcgccgacgtctgtgaatccatgaaagaacaactactcgtactggtagaatgggccaaatacatccccgccttctgcgaacttcccctcgacgaccaagttgcactcctccgagcccacgccggggaacacctactcctcggagccaccaaacgctcaatggtcttcaaagacgtactcctcctcggcaacgactacatcgtgccacgccactgccccgaactagccgaaatgtcccgggtctccattcgaatcctcgacgaactcgtcctccccttccaagaactccaaatagacgacaacgaatacgcttacctcaaagcaataatcttcttcgacccagatgccaaaggcctcagcgacccgggcaagattaaacgcctccgctctcaagtccaagtctcccttgaagactacatcaacgaccgccaatacgactcccgcggtcgattcggggaactactcctactcctcccaacactacaatccatcacctggcaaatgatcgaacaaatccaattcatcaaactcttcggcatggccaaaatcgacaacctcctacaggaaatgctcctaggaggcagcccctccgacgccccccacgcccaccaccccctccacccccacctaatgcaagaacatatgggaaccaacgtaatcgtcgcaaacacaatgcccacccacctctccaacggccaaatgtgcgaatggccccgcccccgcggtcaagcagccacacccgaaacccctcaaccctccccgcccggaggcagcggctccgaaccatacaaactcctcccaggcgccgtagccaccatcgtaaaacccctatcggccataccccaacccacaatcaccaaacaagaagtaatctaaggactagtccctgttcccagagcccacttttttttctttttttgaaataaaatagcctgtctttcagatctcaaaggctcttttcagagccaccaaaaaaaaaaaaaaaaaaaaaaaaaaaaaaaaaaaaaaaaaaaaaaaaaaaaaaaaaaaaaaaaaaaaaaaaaaaaaaaaaaaaaaaaaaaaaaaaaaaaa

SEQ ID NO: 4093 - RNA, 1586 nt, synthetic construct
  misc_feature 1..1586: note = mRNA a-1 (hSL-A100) (opt11) from Homo sapiens__NP_000448.3__HNF4A(39-474)(T166A)
  source 1..1586: mol_type = other RNA
aggagagtcccgcagtcggcgtccagcggctctgcttgttcgtgtgtgtgtcgttgcaggccttattcaagcttaccatggacacttccccctcagaaggcacaaacctcaacgcacccaactccctaggagtctccgccctatgcgcgatctgtggcgaccgagcaaccggcaagcattacggcgcatcctcctgcgacggatgcaaaggcttcttccgccgatccgtccgaaagaaccacatgtactcctgccgattctcccgccaatgcgtagttgacaaagacaaacgcaatcaatgccgatactgccgcctcaagaaatgcttccgagcaggaatgaagaaagaagccgtccaaaacgaacgcgatcgcatatccacccgccgctcctcctacgaagactcctccctcccctccatcaacgcactcctccaagcggaagtactctcacgccaaatcgcgtccccagtctccggcataaacggagacatccgcgccaagaaaatagcctcaatcgctgacgtctgcgaatctatgaaagaacagctcctcgtcctagtcgaatgggccaaatacatccccgccttctgcgaactcccactagacgaccaagtggcactcctccgcgcccacgccggcgaacacctactactcggagccaccaaacgctccatggtgttcaaagacgtactactcctcggaaatgactacatcgtcccccgacactgccccgaactcgccgaaatgtccagggtctccatccgcatcctcgacgaactggtcctcccattccaagaactccaaatcgacgacaacgaatacgcctacctaaaagccatcatcttcttcgaccccgacgccaaaggcctatccgacccgggcaaaatcaaacgactccgctcccaagtccaagtctcactcgaagactacatcaacgatagacagtacgactcacgcggtagattcggagaactcctactcctactccccacactccaatccataacctggcaaatgatagaacaaatacaattcatcaaactcttcggcatggccaaaatcgacaacctactccaggaaatgctcttaggcggctccccatccgacgccccacacgcccaccaccccctccacccccacctcatgcaagaacacatgggcaccaatgtcatagtagcaaacaccatgcccacacacctctccaacggacaaatgtgcgaatggccccgcccacgcggtcaggccgccacccccgaaaccccacaaccctccccacccggaggctccggatcagaaccctacaaactcctccccggcgccgtcgcaaccatcgttaaaccactatccgccataccccaacccaccatcaccaaacaagaggtcatataaggactagtccctgttcccagagcccacttttttttctttttttgaaataaaatagcctgtctttcagatctcaaaggctcttttcagagccaccaaaaaaaaaaaaaaaaaaaaaaaaaaaaaaaaaaaaaaaaaaaaaaaaaaaaaaaaaaaaaaaaaaaaaaaaaaaaaaaaaaaaaaaaaaaaaaaaaaaaa

SEQ ID NO: 4094 - RNA, 1586 nt, synthetic construct
  misc_feature 1..1586: note = mRNA a-1 (hSL-A100) (opt11) from Homo sapiens__NP_000448.3__HNF4A(39-474)(S167E)
  source 1..1586: mol_type = other RNA
aggagagtcccgcagtcggcgtccagcggctctgcttgttcgtgtgtgtgtcgttgcaggccttattcaagcttaccatggacacctccccctctgaaggcaccaacctcaacgcacccaacagccttggcgtcagcgccttatgcgccatttgcggagaccgcgccaccggcaaacactacggagcatcctcatgcgacggctgcaaaggcttcttccgccgatcagtccgaaaaaaccacatgtactcctgccgcttctctcgccagtgcgtagtcgataaagataaaagaaatcaatgccgctactgccgcctcaaaaaatgcttccgcgccggcatgaaaaaagaagcagttcaaaacgaacgcgaccgaatctccacccgccgctcatcctacgaagactcttccctcccctctataaacgccctcctccaagccgaagtactctcacgccaaatcaccgaacctgtctccggcattaacggagacatacgcgccaagaaaatagccagcatcgccgacgtctgcgaatcaatgaaagaacaactcctcgtcctagtcgaatgggccaaatacatccccgcattctgcgaacttcccctcgacgaccaagtcgccctcctccgtgcccatgcaggcgaacacctcctcctcggcgccaccaaacgctccatggtctttaaagacgtcctcctcctgggcaacgactacatcgtcccccgacactgcccagaactcgccgagatgagccgcgtgtccatacgcatactcgacgaactcgtcctccccttccaagaactccagatagacgataacgaatacgcatacctaaaagccataatattcttcgaccccgacgctaaaggtctctcagacccaggaaaaatcaaacgtctcagaagccaagtccaagtctcactcgaagactacatcaacgaccgccaatacgactctcgcggccgcttcggcgaactcctcttattactcccaacactccaatcaatcacctggcaaatgatcgaacaaatacaatttatcaaactcttcggcatggctaaaatcgacaatctcctccaagaaatgctcctcggaggctccccctcagatgccccccacgcccaccacccccttcatccccacttaatgcaagaacatatgggcaccaacgtcatcgtagccaacaccatgcccacacacctatccaacggccaaatgtgcgaatggccccgcccccgaggacaagccgccaccccagaaacaccccaaccctccccccccggaggcagcggctccgaaccatacaaactcctcccaggtgccgtcgccactatcgtcaaacccctctcagccatcccccaaccaaccatcacaaagcaagaagtcatctaaggactagtccctgttcccagagcccacttttttttctttttttgaaataaaatagcctgtctttcagatctcaaaggctcttttcagagccaccaaaaaaaaaaaaaaaaaaaaaaaaaaaaaaaaaaaaaaaaaaaaaaaaaaaaaaaaaaaaaaaaaaaaaaaaaaaaaaaaaaaaaaaaaaaaaaaaaaaaa

SEQ ID NO: 4095 - RNA, 1586 nt, synthetic construct
  misc_feature 1..1586: note = mRNA a-1 (hSL-A100) (opt11) from Homo sapiens__NP_000448.3__HNF4A(39-474)(S167A)
  source 1..1586: mol_type = other RNA
aggagagtcccgcagtcggcgtccagcggctctgcttgttcgtgtgtgtgtcgttgcaggccttattcaagcttaccatggacacctcaccctccgaaggtaccaacctcaacgcgcccaactccctcggcgtctcagccctctgcgccatctgcggcgaccgcgcgaccggcaaacactacggtgcctcctcatgcgacggatgcaaaggcttcttccgacgctcagtccgcaaaaaccacatgtactcctgccgcttctcacgacaatgcgtcgttgacaaagacaaacgcaaccaatgccgctactgccgcctcaaaaaatgcttccgcgcaggaatgaaaaaagaagcagttcaaaacgaacgcgaccgcatctcaacccgcagatcatcatacgaagactcatccctaccatcaataaacgccctcctacaagccgaagtcctctccagacaaatcaccgcccccgtctcaggcataaacggcgacatccgtgcaaaaaaaatcgcctccatcgctgacgtctgcgaatccatgaaagaacaactccttgtcctcgtcgaatgggccaaatacattcctgccttctgcgaactccccctcgacgaccaagtcgcactactcagagcccacgcaggcgaacacctcctcctcggagcaacaaaacgctccatggtcttcaaagacgtcctcctactcggaaatgactacatcgtccccagacactgccccgaactcgctgaaatgtcaagagtctccatacgaatactagacgaactagtcctacccttccaagaactgcaaatagacgacaacgaatacgcctacctcaaagccatcatattcttcgaccccgacgccaagggactctcagaccccggcaaaatcaaacgcctacgctcccaagtgcaagtcagcctcgaagactacataaacgatcgccagtacgactcacgaggacgattcggagaactcctcctcctcctcccaacactccagtccatcacctggcaaatgatcgaacaaatccaatttatcaaactcttcggcatggccaaaatcgacaacctactacaagaaatgctcctcggaggatccccctcagacgccccccacgcccaccaccctctccacccccacctaatgcaagaacacatggggaccaacgtaatcgtcgccaataccatgccaactcatctatcaaacggtcaaatgtgcgaatggccccgcccccggggacaagccgccacccccgagacaccgcaaccctccccccctggcggatccggctcagaaccctataaactactccccggcgcggtcgccaccatagtcaaaccactctctgccatcccccaaccaaccataaccaaacaagaagtcatctaaggactagtccctgttcccagagcccacttttttttctttttttgaaataaaatagcctgtctttcagatctcaaaggctcttttcagagccaccaaaaaaaaaaaaaaaaaaaaaaaaaaaaaaaaaaaaaaaaaaaaaaaaaaaaaaaaaaaaaaaaaaaaaaaaaaaaaaaaaaaaaaaaaaaaaaaaaaaaa

SEQ ID NO: 4096 - RNA, 1586 nt, synthetic construct
  misc_feature 1..1586: note = mRNA a-1 (hSL-A100) (opt11) from Homo sapiens__NP_000448.3__HNF4A(39-474)(S167A_S378A_T429A_T432A _S436A)
  source 1..1586: mol_type = other RNA
aggagagtcccgcagtcggcgtccagcggctctgcttgttcgtgtgtgtgtcgttgcaggccttattcaagcttaccatggacacaagcccctccgaaggcacaaatctcaacgcccccaactcactaggcgtctcagccctatgtgctatctgcggcgaccgcgccaccggcaaacactacggcgcatcatcatgtgacggatgcaaaggattcttccgacgctccgtccgaaagaaccacatgtactcctgccgattcagcagacaatgtgttgtcgacaaagacaaacgcaaccaatgtcgctactgccgcctcaaaaaatgctttagagccggaatgaaaaaagaagccgtccaaaacgaacgcgaccgcatctccacacgccgaagctcatacgaagactcatctctcccctccatcaacgcactcctccaagccgaagtcctatctcgccaaatcaccgcacccgtctccggcatcaacggcgacatacgcgccaaaaaaatagcctccatagcagacgtatgcgaatccatgaaagagcaactcctcgtgctagtcgaatgggccaaatacatccccgccttctgcgagctcccactagacgaccaagtcgccctcctccgcgcccacgccggcgaacacctgctcctaggcgccaccaaaagaagcatggtattcaaagacgtcctactcctcggcaacgactatatagtccctcgccactgtccagaactcgcagaaatgtccagagtcagcatccgaatcctcgacgaactcgtcctacccttccaagaactacaaatcgacgacaacgaatacgcctaccttaaagccatcatcttcttcgaccccgacgccaaaggcctatccgaccccggcaaaatcaaacgcttacgatcccaagtccaggtcagcctcgaagactacataaacgaccgccaatacgactcacgcggccgcttcggcgaactactcctcctcctcccaaccctccaaagcatcacctggcaaatgatagaacaaatacaattcatcaaacttttcggcatggccaaaatcgacaaccttttacaagaaatgctactcggtggcgcgcccagcgacgctccgcacgcccaccaccccctccacccacacctcatgcaggaacacatgggcaccaacgtaatagtcgccaacacaatgccaacccacctctcaaacggccagatgtgcgaatggccccgaccccgaggccaagccgcagccccagaagccccccaaccagcccccccaggaggatccggctcagaaccctataaactcttacccggtgccgtcgcgaccattgtcaaacccctctccgccataccccagcccacaatcaccaaacaagaagtcatctaaggactagtccctgttcccagagcccacttttttttctttttttgaaataaaatagcctgtctttcagatctcaaaggctcttttcagagccaccaaaaaaaaaaaaaaaaaaaaaaaaaaaaaaaaaaaaaaaaaaaaaaaaaaaaaaaaaaaaaaaaaaaaaaaaaaaaaaaaaaaaaaaaaaaaaaaaaaaaa

SEQ ID NO: 4097 - RNA, 1586 nt, synthetic construct
  misc_feature 1..1586: note = mRNA a-1 (hSL-A100) (opt11) from Homo sapiens__NP_000448.3__HNF4A(39-474)(S167E_S378E_T429E_T432E _S436E)
  source 1..1586: mol_type = other RNA
aggagagtcccgcagtcggcgtccagcggctctgcttgttcgtgtgtgtgtcgttgcaggccttattcaagcttaccatggacacctccccctcagaaggcaccaacctcaacgctccaaactccctaggggtctccgcactctgcgcaatctgcggcgaccgtgccaccggcaaacattacggcgcctcatcctgcgacggctgcaaaggattcttccggcgatccgtccgaaagaaccacatgtacagctgcagattcagccgacaatgcgtcgtggacaaagataaacgcaaccaatgccgctactgccgactcaagaaatgcttccgcgcaggcatgaagaaagaagcagtacaaaacgaacgcgaccgcatctcaacaagacgtagctcctacgaagactcaagcctcccatccatcaacgccctcctccaagccgaagtactctcacgtcaaatcaccgaacccgtgtcaggaatcaacggcgacatccgcgccaagaaaatcgcctccatcgcagacgtctgcgaatccatgaaagaacaactcctcgtcctggtcgaatgggctaaatacatccccgcattctgcgaactccccctagatgaccaagtcgccctactgcgcgcccacgcaggcgaacatctattactcggcgccaccaaacgcagcatggtattcaaagacgtcctcctcctcggcaacgactacatagtcccacgccactgcccagaactggccgaaatgagccgagtctctatccgcatactcgacgagctagtcctccccttccaagaactccaaattgacgacaacgaatacgcctacctcaaagccatcatattcttcgaccccgacgcgaaaggcctatccgaccccggtaaaatcaaaagactacgctcacaagtccaagtctcccttgaagactacatcaacgaccgccagtacgacagccgcggccgcttcggcgaactacttctcctcctccccaccctccaatccatcacctggcaaatgatcgaacaaatccaattcataaaactattcggaatggccaaaatcgacaacctcctgcaagaaatgctcctcggaggcgaaccctcagacgcaccccacgcccatcaccccctccatccacacttaatgcaagaacacatgggcaccaacgtaatcgtagccaacactatgcccacccacctatccaatggccaaatgtgcgaatggcccagaccaagaggacaagccgccgaacccgaagaaccacaaccagaacctcccggtggatccggctcagaaccctacaaactactccccggagccgtagctaccatcgtcaagcccctatcagccatcccccaacccacaatcaccaaacaggaagtcatctaaggactagtccctgttcccagagcccacttttttttctttttttgaaataaaatagcctgtctttcagatctcaaaggctcttttcagagccaccaaaaaaaaaaaaaaaaaaaaaaaaaaaaaaaaaaaaaaaaaaaaaaaaaaaaaaaaaaaaaaaaaaaaaaaaaaaaaaaaaaaaaaaaaaaaaaaaaaaaa

SEQ ID NO: 4098 - RNA, 1586 nt, synthetic construct
  misc_feature 1..1586: note = mRNA a-1 (hSL-A100) (opt11) from Homo sapiens__NP_000448.3__HNF4A(39-474)(S87A)
  source 1..1586: mol_type = other RNA
aggagagtcccgcagtcggcgtccagcggctctgcttgttcgtgtgtgtgtcgttgcaggccttattcaagcttaccatggacacctcaccctcagagggcaccaatctcaacgccccaaactcactcggagtaagtgcactatgcgcgatctgcggcgaccgcgccaccggcaaacactacggcgcatcctcctgcgacggctgcaaaggattcttccgacgcgccgtccgcaaaaaccacatgtactcatgccgcttctcacgccagtgcgtcgtagacaaagacaaacgcaatcaatgccgctactgccgactcaagaaatgcttccgcgccggaatgaagaaagaagcagtacaaaacgaacgcgaccgaatctccacccgccgctcctcctacgaagattcctccctcccctccatcaacgccctactccaagccgaagtactctcccgccaaatcacctctccagtttccggcataaacggcgacatacgagcaaagaaaattgcatctatcgccgacgtctgcgaatcgatgaaagagcaactcctagtactcgtagaatgggccaaatacatccccgcattctgcgaactcccacttgacgaccaagtcgcccttctccgagcacacgccggcgaacatctcctgctcggcgctacaaaaagaagcatggtcttcaaagacgtcctcctactcggcaacgactacatcgtcccccgccactgccccgaactagccgaaatgagccgagtctccatcagaatcctcgacgaactcgtactccccttccaagaactccaaatagacgacaacgaatatgcatacctcaaagcaatcatattcttcgaccccgacgccaaaggactttccgaccccggcaaaataaaacgcctccgatcccaagtacaggtctccctcgaagactacatcaacgacagacaatacgacagccgtggacgattcggagagttactcctactacttcccacccttcagtcaatcacctggcaaatgatagaacaaatccaattcatcaaactgttcggaatggctaaaatcgacaacctgctacaagaaatgctcctcggcggctcccctagcgacgccccacacgcacaccaccccctccacccacacctcatgcaagagcacatgggcacaaacgtaatagtagccaacacaatgcccacccacctctcgaacggccaaatgtgcgaatggccccgcccccgcggacaagccgcaaccccagaaacaccccaaccttcacccccaggcggctccggatccgaaccctacaaactactccccggagccgtagcaaccatagtcaaaccgctcagcgccatcccccaacccacaataaccaaacaagaagtcatctagggactagtccctgttcccagagcccacttttttttctttttttgaaataaaatagcctgtctttcagatctcaaaggctcttttcagagccaccaaaaaaaaaaaaaaaaaaaaaaaaaaaaaaaaaaaaaaaaaaaaaaaaaaaaaaaaaaaaaaaaaaaaaaaaaaaaaaaaaaaaaaaaaaaaaaaaaaaaa

SEQ ID NO: 4099 - RNA, 1586 nt, synthetic construct
  misc_feature 1..1586: note = mRNA a-1 (hSL-A100) (opt11) from Homo sapiens__NP_000448.3__HNF4A(39-474)(S87E)
  source 1..1586: mol_type = other RNA
aggagagtcccgcagtcggcgtccagcggctctgcttgttcgtgtgtgtgtcgttgcaggccttattcaagcttaccatggacacctccccctccgaaggaaccaacctaaacgcaccaaattccctcggcgtctccgccctttgcgccatatgtggggaccgcgcaacaggaaaacactacggcgcctcctcctgcgacggatgcaaaggattcttccgacgcgaagtcagaaaaaaccacatgtactcatgtcgattctcccgccagtgcgtcgtcgacaaagacaaaagaaaccaatgcagatactgtcgcctaaaaaaatgcttccgcgccggaatgaaaaaggaagcagtacagaacgaacgcgaccgcatctccaccagacgctcctcctacgaagactcatccctgccctcgatcaacgcacttctccaagccgaggtcctatcaagacaaatcacttctccagtatccggcatcaatggcgacatccgcgccaaaaaaatcgcctcaatcgccgacgtctgcgagtccatgaaagaacaactactagtccttgtagaatgggctaaatatattcccgccttctgcgaacttcccctagacgaccaagtagcactcctccgcgctcacgccggcgagcacctactactcggcgcaaccaaaagatcaatggtcttcaaagacgtcctcctcctgggcaacgactacatcgtcccccgacactgccccgaactcgcggaaatgtcccgcgtcagcatccgcatcctcgacgaactcgtactccccttccaagaactacaaatcgacgacaacgaatacgcctacctcaaagcgataatcttcttcgacccagacgccaaaggtctatccgacccaggaaaaatcaaacgtctccgctctcaagtacaagtctctctcgaagactacataaacgaccgccaatacgactccagaggccggttcggcgaactcctcctcctactccccacactccaaagcatcacctggcaaatgatcgaacaaatccaattcataaaactattcggcatggccaaaatagacaacctgctacaagaaatgctcctcggaggttccccctcagacgccccccacgcccaccacccccttcacccacacctaatgcaagaacacatgggcactaacgtaatagtagccaacacaatgcccacccacctctccaacggccaaatgtgtgaatggccaagaccacgcggacaagccgcaacccctgagaccccccagccctccccacccggcggctctggcagcgaaccctacaaactgctacccggggccgtcgccacaatcgtaaaaccactctcggcaatcccccaacccaccatcaccaaacaagaagttatctaaggactagtccctgttcccagagcccacttttttttctttttttgaaataaaatagcctgtctttcagatctcaaaggctcttttcagagccaccaaaaaaaaaaaaaaaaaaaaaaaaaaaaaaaaaaaaaaaaaaaaaaaaaaaaaaaaaaaaaaaaaaaaaaaaaaaaaaaaaaaaaaaaaaaaaaaaaaaaa

SEQ ID NO: 4100 - RNA, 1586 nt, synthetic construct
  misc_feature 1..1586: note = mRNA a-1 (hSL-A100) (opt11) from Homo sapiens__NP_000448.3__HNF4A(39-474)(R2V)
  source 1..1586: mol_type = other RNA
aggagagtcccgcagtcggcgtccagcggctctgcttgttcgtgtgtgtgtcgttgcaggccttattcaagcttaccatggacacctccccctccgaaggcacaaacctcaacgcccccaactccctcggcgtctccgccctatgcgccatatgcggagaccgagccaccggcaagcactacggcgcttcctcctgcgacggatgcaaaggcttcttccggagaagcgtccggaaaaaccacatgtattcctgccgattctcacgccaatgcgtagtcgacaaagacaaacgcaaccaatgccgctactgccgccttaagaaatgtttcagagccggaatgaagaaagaagccgtccaaaacgaacgcgaccgcataagcacccgccgctcctcatacgaagacagcagcctcccctccatcaacgccctcctccaagcagaagtgctctcccgacaaatcaccagccccgtaagcggaatcaacggcgacatacgcgccaagaaaatcgcctccatcgccgacgtctgcgaatcaatgaaagaacaactactcgtccttgtagaatgggccaaatacatccccgccttctgcgagctcccactcgacgaccaagtcgccctcctccgcgcacacgccggtgaacatctcctactaggagcaaccaaacgatcaatggtattcaaagacgtcctcctcctcggtaacgactacatagtcccaagacactgccccgaactagccgaaatgtcacgcgtctccatccgcatcctagacgaactcgtccttccctttcaagaactacaaatcgacgacaacgaatacgcctacctcaaagccatcatcttcttcgacccagacgcaaaaggactctcagaccccggcaaaatcaaacgcctccgctcccaagtccaagtcagcctcgaagactacatcaacgacagacaatacgactcacgaggccgcttcggagaactactactcttgctccccacactacaatcgataacctggcaaatgatcgaacaaatccaatttatcaaactattcggaatggcaaaaatagacaaccttctgcaagaaatgctccttggcggctctccctctgacgctccccacgcccaccaccccctccacccccaccttatgcaagaacacatgggaaccaacgtcatcgtagccaacacaatgcccacccacctatcaaacggccaaatgtgcgaatggccacggccacgcggccaagccgcaacacccgaaaccccacaaccctcacccccaggcggctccggctcagagccgtacaaactactacccggcgccgtagccaccatcgtgaaacctctctccgccatccctcaacccacaatcaccaaacaagaggtcatctaaggactagtccctgttcccagagcccacttttttttctttttttgaaataaaatagcctgtctttcagatctcaaaggctcttttcagagccaccaaaaaaaaaaaaaaaaaaaaaaaaaaaaaaaaaaaaaaaaaaaaaaaaaaaaaaaaaaaaaaaaaaaaaaaaaaaaaaaaaaaaaaaaaaaaaaaaaaaaa

SEQ ID NO: 4101 - RNA, 1586 nt, synthetic construct
  misc_feature 1..1586: note = mRNA a-1 (hSL-A100) (opt11) from Homo sapiens__NP_000448.3__HNF4A(39-474)(R2V_K5V)
  source 1..1586: mol_type = other RNA
aggagagtcccgcagtcggcgtccagcggctctgcttgttcgtgtgtgtgtcgttgcaggccttattcaagcttaccatggacacctccccctcagaaggtaccaacctcaacgcacccaactcgctcggcgtatcagccctttgtgccatctgcggtgatcgcgcaaccggaaaacactacggcgcatcctcatgcgacggctgcaaaggcttcttccgccgatccgtccgtaaaaaccatatgtactcctgtcgattctcccgccaatgtgtcgtagataaagacaaacgcaaccaatgcagatactgccgcctaaaaaaatgcttccgggcaggtatgaagaaagaagcagtccaaaacgaacgcgaccgcatcagcacccgccgctcctcctacgaagactcgtccctcccatccatcaacgccctactccaagccgaagtcttatcccgacaaatcacttcccccgtctccggcataaacggcgacatccgcgcaaaaaaaatcgcctccatagccgacgtctgcgaatcaatgaaagaacaactcctagtccttgtcgaatgggccaaatacatccccgcattctgcgaactcccactcgatgaccaggtagccctcctccgcgcccacgcgggtgaacacctcctcctcggggccaccaaacgctccatggtattcaaagacgtcctcctcctcggaaacgactacatcgtcccacgccattgccccgagctagccgaaatgtctagagtctccatacgcatcctcgacgaactcgtactccccttccaagaactccaaattgatgacaacgaatacgcctacctcaaagcaatcatcttcttcgaccccgacgccaaagggctctccgacccaggaaaaatcaaacgcctcagatcccaagtccaggtatcactcgaagactacatcaacgaccgacaatacgactcccgaggccgtttcggcgaactcctactcctcttaccaaccctacaatccatcacatggcaaatgatcgaacaaattcaattcatcaaactcttcggaatggccaaaatcgacaatctcctacaagaaatgctcctcggaggatcaccctcagacgccccacacgcccaccaccctttacatccccacctaatgcaagaacacatgggaaccaacgtcatcgtagccaacaccatgccaacacacctctcaaacggacaaatgtgcgagtggcccagaccccgaggccaagccgccacaccagaaacaccccagccctcaccacccggcggctcaggctccgaaccctacaaactactccccggagccgtcgccaccatcgtcaagccactatcagcaatcccacaacccaccatcaccaaacaagaagtaatctaaggactagtccctgttcccagagcccacttttttttctttttttgaaataaaatagcctgtctttcagatctcaaaggctcttttcagagccaccaaaaaaaaaaaaaaaaaaaaaaaaaaaaaaaaaaaaaaaaaaaaaaaaaaaaaaaaaaaaaaaaaaaaaaaaaaaaaaaaaaaaaaaaaaaaaaaaaaaaa

SEQ ID NO: 4102 - RNA, 1586 nt, synthetic construct
  misc_feature 1..1586: note = mRNA a-1 (hSL-A100) (opt11) from Homo sapiens__NP_000448.3__HNF4A(39-474)(K179R_K180R)
  source 1..1586: mol_type = other RNA
aggagagtcccgcagtcggcgtccagcggctctgcttgttcgtgtgtgtgtcgttgcaggccttattcaagcttaccatggacacctccccctccgaaggaaccaacctaaacgcccccaactccctaggcgtctccgccctctgcgcaatatgcggagaccgcgcaaccggcaaacattacggcgcttcctcctgtgacggttgcaaaggatttttccgccgatccgtccgtaaaaaccacatgtactcctgccgcttcagccgacaatgcgtggtagataaagacaaacgcaaccaatgccgttactgccgactcaaaaaatgcttccgagccggaatgaaaaaagaagcagtccaaaacgaacgcgaccgcatctctacacgcagatcttcatatgaagatagcagcctccccagcatcaacgccctcctccaagccgaagtcctctcccgacaaatcacctccccagtaagcggcataaatggcgacatccgtgcccggcgcatcgcatcaatcgccgacgtatgcgaatcaatgaaagaacaactactagtcctcgtcgaatgggcaaaatacatacccgcattctgcgaactccccctcgacgaccaagtagccctcctacgcgcccacgccggagaacacctactcctcggggccacgaaacgatccatggtcttcaaagacgtcctactcctcggaaatgactacatagtccccaggcactgccccgaactcgccgaaatgtcccgcgtctcaattcgaatcctagacgaactcgtcctacccttccaagaactccaaatagacgacaacgaatacgcttacctcaaagccattatcttcttcgacccagacgccaaaggactctccgacccgggaaaaataaaacgactacgcagccaagtccaagtctccttagaagactacatcaacgaccgccagtacgactcccgcggccgattcggagagcttctcctactcctccccaccctccaatccatcacatggcaaatgatcgaacaaatccaattcataaaactcttcggcatggccaaaatcgataatctactccaagaaatgctcctcggcgggtccccatcagacgccccccacgcacaccacccgctgcacccacacctaatgcaagaacacatgggaacaaacgtcatcgtcgccaacacaatgcccacccacctctcaaacggacagatgtgcgaatggccccgcccacgcggccaagcggcaacccccgaaacaccacagccctccccccccggcggcagcggctcagaaccctacaaactcctcccaggagcagtcgccaccatagtcaagcccctctcagccatcccacaaccaaccatcaccaaacaagaagtaatatagggactagtccctgttcccagagcccacttttttttctttttttgaaataaaatagcctgtctttcagatctcaaaggctcttttcagagccaccaaaaaaaaaaaaaaaaaaaaaaaaaaaaaaaaaaaaaaaaaaaaaaaaaaaaaaaaaaaaaaaaaaaaaaaaaaaaaaaaaaaaaaaaaaaaaaaaaaaaa

SEQ ID NO: 4103 - RNA, 1586 nt, synthetic construct
  misc_feature 1..1586: note = mRNA a-1 (hSL-A100) (opt11) from Homo sapiens__NP_000448.3__HNF4A(39-474)(K234R)
  source 1..1586: mol_type = other RNA
aggagagtcccgcagtcggcgtccagcggctctgcttgttcgtgtgtgtgtcgttgcaggccttattcaagcttaccatggacacctccccatccgaaggcaccaaccttaacgcacccaactccctcggagtatccgccctctgcgccatctgcggcgaccgcgccacaggcaaacactacggagcctcatcctgcgacggctgcaaaggcttcttccgacgctccgtcagaaaaaaccacatgtactcctgccgattctcccgtcaatgcgtagtcgacaaagacaaacgcaaccaatgccgatactgccgcctcaaaaagtgcttccgagccggcatgaaaaaagaagccgtccagaacgagcgcgaccgaatctccacaagaagatcatcatacgaagactcctccctcccctccatcaacgccctactccaagccgaagtcctctccagacaaatcacaagccccgtatccggtatcaacggcgacataagagccaaaaaaatcgcctccatagccgacgtctgcgaatccatgaaagaacaactcctcgtgctcgtagaatgggccaaatacattcccgccttctgcgaactccctctcgacgaccaggtcgctctactcagggctcacgccggcgaacacctcctcctcggcgcaacccgccgctccatggtattcaaagacgtcctactactcggaaacgactacatcgttccccgccactgcccagagctcgctgaaatgtctcgcgtctccatccgcatcctcgacgaactcgtcctcccattccaagaactccaaatcgacgacaacgaatacgcctacctaaaagccataatcttcttcgaccccgacgcaaaaggactctccgacccagggaaaattaaacgactccgctcccaagtacaggtaagcctcgaagactacatcaacgaccgccaatacgattcccgaggccgcttcggcgaacttctcctactactacccaccctacagtccatcacctggcaaatgatcgaacaaatccaattcatcaaacttttcggaatggccaaaatcgacaacctcctccaagaaatgctcctcggcggctccccctccgacgccccccacgcacaccaccccctccacccacaccttatgcaagaacatatgggcacaaacgtcatcgtcgccaacaccatgcccacccacctctctaacggccaaatgtgcgaatggccccgcccaagaggccaagccgccaccccagaaaccccgcaacctagcccacccggcggctccggcagcgaaccctacaaactattacccggagcagtggccacgatcgtaaagcccctcagcgcaatcccacaaccaacaatcactaaacaagaagtcatctaaggactagtccctgttcccagagcccacttttttttctttttttgaaataaaatagcctgtctttcagatctcaaaggctcttttcagagccaccaaaaaaaaaaaaaaaaaaaaaaaaaaaaaaaaaaaaaaaaaaaaaaaaaaaaaaaaaaaaaaaaaaaaaaaaaaaaaaaaaaaaaaaaaaaaaaaaaaaaa

SEQ ID NO: 4104 - RNA, 1586 nt, synthetic construct
  misc_feature 1..1586: note = mRNA a-1 (hSL-A100) (opt11) from Homo sapiens__NP_000448.3__HNF4A(39-474)(K300R)
  source 1..1586: mol_type = other RNA
aggagagtcccgcagtcggcgtccagcggctctgcttgttcgtgtgtgtgtcgttgcaggccttattcaagcttaccatggacacctccccctcggaaggcaccaacctcaacgcccccaactcccttggggtcagtgcactatgcgccatctgcggcgatagagccaccggaaagcactacggcgcctcctcatgcgacggctgcaaaggcttcttccgccgatccgtccgcaaaaaccacatgtactcatgcagattcagcagacaatgcgtcgtcgacaaagacaagagaaaccagtgccgatactgccgcctcaagaaatgtttccgcgccggcatgaagaaagaagcagtccaaaacgaacgcgaccgcatctccacccgccgctcatcctacgaagactccagcctaccctccataaatgccctactccaagcagaagtcctctcccgccaaataacctccccagtatccggaatcaacggcgacatccgcgccaagaaaatcgcctcaatagcagacgtctgcgaatccatgaaagaacaactacttgtcttagtagaatgggccaaatacatccccgccttttgcgaactaccccttgacgaccaagtcgccctcctccgcgcacacgccggcgaacacctattactaggcgccactaaacgctccatggtcttcaaagacgtactcctcctcggcaacgactatatcgtcccccgacactgccccgaactcgccgaaatgtcccgcgtctcaatacgaatcctcgacgaactcgtcctccccttccaagaactacagatcgacgacaacgaatacgcctacctcaaagcaatcatcttcttcgaccccgacgcccgcggcctatccgaccctggcaaaatcaaacgcctgcgctcccaagtacaagtgtccctcgaagactacatcaacgaccgacagtacgattcccgaggccgattcggcgaactcctcctcctactcccaacactccaatccatcacctggcaaatgatcgaacaaatccaattcattaaactcttcggcatggcaaaaatcgacaacctcctacaagaaatgctcctcggtgggtccccctccgatgctccccacgcccaccaccccctccacccccacctcatgcaggaacacatgggcaccaacgtcatcgtcgccaacacaatgccaacccacctctcaaacggacaaatgtgtgaatggccccgaccccgaggccaagcagccacacccgaaacaccccaaccctcacccccaggcggctccggctcagaaccctacaaactactcccaggagccgtcgccaccatcgtaaaaccactaagcgccataccccaaccaactatcacaaaacaggaggtcatctaaggactagtccctgttcccagagcccacttttttttctttttttgaaataaaatagcctgtctttcagatctcaaaggctcttttcagagccaccaaaaaaaaaaaaaaaaaaaaaaaaaaaaaaaaaaaaaaaaaaaaaaaaaaaaaaaaaaaaaaaaaaaaaaaaaaaaaaaaaaaaaaaaaaaaaaaaaaaaa

SEQ ID NO: 4105 - RNA, 1586 nt, synthetic construct
  misc_feature 1..1586: note = mRNA a-1 (hSL-A100) (opt11) from Homo sapiens__NP_000448.3__HNF4A(39-474)(K300R_K307R_K309R)
  source 1..1586: mol_type = other RNA
aggagagtcccgcagtcggcgtccagcggctctgcttgttcgtgtgtgtgtcgttgcaggccttattcaagcttaccatggacacctccccatccgaaggcaccaacctcaacgccccaaactccctcggtgtatccgcactctgcgcaatctgcggcgaccgcgctacaggcaaacactacggcgcatcctcctgcgacggatgcaagggcttcttccgccgctcagtccggaaaaaccacatgtactcttgccgcttctcacgtcagtgcgtggtcgacaaagacaaacgcaaccaatgccgctactgccgactcaaaaaatgcttccgcgccggaatgaaaaaagaagcagtacaaaacgaacgagaccgcatcagcacccgtcgctccagctacgaagactcttcacttccctccatcaacgccctcctccaagccgaagtcctctcacgccaaatcacgtcccccgtctccggcataaacggcgacatccgagcaaaaaaaatcgcctccatcgcagacgtatgcgaatccatgaaagaacagctcctagtcctcgtcgaatgggccaaatacatcccagcattctgcgaacttcccctagacgaccaagtcgcccttctcagagcacacgctggggaacacctcctactaggcgcaacaaaacgctccatggtcttcaaagacgtactactcctcggcaacgactacatagtccctcgccactgccccgaactcgcagaaatgtcccgagtctcaatacgaatactagacgaactagtcctccctttccaagaactacaaatcgacgacaacgaatacgcttacctaaaagccatcattttcttcgacccagacgcccgcgggctctccgaccccggccgcatacgacgccttcgctcccaagtccaagtatcattagaagactacatcaacgaccgccaatacgactcccgcggccgcttcggagaactcctactcctcctacccacactccagtccatcacctggcaaatgatcgaacaaatccaattcattaaactattcggcatggccaaaatcgacaacctactccaagaaatgctcctcggcggaagcccctctgacgcccctcacgcacaccaccccctacacccacacttgatgcaggaacacatggggaccaacgtcatcgtcgccaacaccatgcccacacatctctcaaatggccaaatgtgcgaatggccacgacctcgcggtcaagctgctaccccagaaaccccccaaccttccccacccggcggttcaggctcggaaccctacaaactccttcccggcgccgtcgccacaatagtcaaaccactatccgcaatcccccaacccacaattaccaaacaagaagtaatctagggactagtccctgttcccagagcccacttttttttctttttttgaaataaaatagcctgtctttcagatctcaaaggctcttttcagagccaccaaaaaaaaaaaaaaaaaaaaaaaaaaaaaaaaaaaaaaaaaaaaaaaaaaaaaaaaaaaaaaaaaaaaaaaaaaaaaaaaaaaaaaaaaaaaaaaaaaaaa

SEQ ID NO: 4106 - RNA, 1586 nt, synthetic construct
  misc_feature 1..1586: note = mRNA a-1 (hSL-A100) (opt11) from Homo sapiens__NP_000448.3__HNF4A(39-474)(K447R_K470R)
  source 1..1586: mol_type = other RNA
aggagagtcccgcagtcggcgtccagcggctctgcttgttcgtgtgtgtgtcgttgcaggccttattcaagcttaccatggacacctccccatccgaaggaacaaacctcaacgctcccaacagcttaggtgtctccgccctctgcgccatctgcggagatcgcgccaccggcaaacactacggcgcctcatcatgcgacggctgcaaaggcttcttccgacgctcagtccgcaaaaaccacatgtactcctgcagattctcaagacaatgtgtcgttgacaaagacaaacgaaaccaatgccgatactgccgccttaaaaaatgcttccgcgcaggaatgaaaaaagaagcagtccagaacgaacgcgaccgcatatccacccgccgttccagctacgaagacagctcactcccttcaatcaacgccctactacaagccgaagtcctctcccgacaaataacctcacccgtatccggcatcaacggagacatacgcgccaaaaaaatagcctcaatcgccgacgtctgcgaatccatgaaagaacaactcctagtcctagtcgaatgggccaaatacatacccgcattctgcgaactccccctagacgaccaggtagccctcctccgagcccacgccggcgagcacctcttacttggcgcaaccaaacgctccatggtattcaaggacgtcctactcctaggcaatgactacatcgtcccccgccactgccccgaactcgctgaaatgtcccgagtctcaatcagaattctagatgaactagtcctacccttccaagaactccaaatagacgacaacgaatacgcatacctcaaagccatcatattcttcgaccccgatgccaaaggtctaagcgaccccggaaaaataaagcgactacggtcgcaagtacaagtctccctggaagactacataaacgaccgccaatacgacagccgcggacgattcggagaactactcctactcctccccactctccaatccataacatggcaaatgatcgaacaaatccaattcatcaaactattcggcatggccaaaatcgacaatcttttacaggaaatgctacttggaggatccccatccgacgcccctcacgcgcaccacccactccacccacacctcatgcaagaacacatgggcaccaacgtgatagtagcaaacaccatgcccacccacctctccaacggccaaatgtgcgagtggccacgaccacggggccaagccgccaccccagagacaccacaaccctcaccccccggaggctccggctccgaaccctaccgactactgccaggagccgtcgcaaccatcgtaaaaccactcagcgccatcccccaacccaccatcacccggcaagaagtcatctaaggactagtccctgttcccagagcccacttttttttctttttttgaaataaaatagcctgtctttcagatctcaaaggctcttttcagagccaccaaaaaaaaaaaaaaaaaaaaaaaaaaaaaaaaaaaaaaaaaaaaaaaaaaaaaaaaaaaaaaaaaaaaaaaaaaaaaaaaaaaaaaaaaaaaaaaaaaaaa

SEQ ID NO: 4107 - RNA, 1586 nt, synthetic construct
  misc_feature 1..1586: note = mRNA a-1 (hSL-A100) (opt11) from Homo sapiens__NP_000448.3__HNF4A(39-474)(K458R)
  source 1..1586: mol_type = other RNA
aggagagtcccgcagtcggcgtccagcggctctgcttgttcgtgtgtgtgtcgttgcaggccttattcaagcttaccatggacacaagcccatctgaaggaactaacctcaacgcccccaactccctaggagtatccgctctctgcgccatctgcggagaccgcgccaccgggaaacactacggcgcctcctcatgcgacggatgcaaaggcttcttccgccgctcagtccgcaaaaaccacatgtactcctgtcgattctcccgacaatgcgtcgtcgacaaagacaaacgcaaccaatgccgatactgccgcctcaagaaatgcttcagagccggcatgaagaaagaagccgtacaaaacgaacgagaccgcatctccacacgccgtagctcctacgaagactcaagcctcccctcaatcaacgccctacttcaggccgaagtcctctcccgacaaattaccagcccagtctccggcatcaacggcgacatccgagccaagaaaatcgcatcaatagccgatgtctgcgaaagcatgaaagaacaactccttgtcctcgtagaatgggccaaatacatccccgccttctgcgaactacccctcgatgaccaagtagccctactcagagcccacgccggcgaacacctcctcctcggcgccaccaaacgcagcatggtcttcaaagatgtactcctcctcggcaacgactacatcgtcccccgacactgccccgaacttgcagaaatgagcagagtctcaatccgcatcctcgacgaactcgtactaccattccaagaactccagatcgacgacaacgaatacgcctacctgaaagcaattatcttcttcgaccccgacgccaaaggcctctcagaccccggcaaaattaaacgcctcagaagtcaagtccaagtatccctcgaagactatatcaatgaccgccaatacgactcccgcgggcgcttcggcgaactcctcctccttctcccaaccctccaatcaatcacctggcaaatgatcgaacaaatccaattcataaaattattcggaatggccaaaatcgacaacctactccaggaaatgctcctcggcgggtccccctccgacgccccacacgcccaccaccccctccacccccacctaatgcaagaacatatgggcaccaacgtcatcgtcgcaaacaccatgccaacccacctctcaaacggacaaatgtgcgaatggccccgtccccgaggccaggccgccacccccgaaacccctcaaccctcgcctcccggaggctccggctcagaaccctacaaactcctcccaggtgcagttgcaacaatagtcagacccctctccgccatcccccagcccacaataacaaaacaagaagtcatctaaggactagtccctgttcccagagcccacttttttttctttttttgaaataaaatagcctgtctttcagatctcaaaggctcttttcagagccaccaaaaaaaaaaaaaaaaaaaaaaaaaaaaaaaaaaaaaaaaaaaaaaaaaaaaaaaaaaaaaaaaaaaaaaaaaaaaaaaaaaaaaaaaaaaaaaaaaaaaa

SEQ ID NO: 4108 - RNA, 1586 nt, synthetic construct
  misc_feature 1..1586: note = mRNA a-1 (hSL-A100) (opt11) from Homo sapiens__NP_000448.3__HNF4A(39-474)(K106R_K108R_K126R_K127R )
  source 1..1586: mol_type = other RNA
aggagagtcccgcagtcggcgtccagcggctctgcttgttcgtgtgtgtgtcgttgcaggccttattcaagcttaccatggacacctcaccctccgaaggcaccaacctcaacgctcccaactccctaggcgtctcagccctctgcgcgatatgcggagaccgagccaccggtaaacactacggcgcttcgagctgcgacggctgcaaaggcttcttccgtcgctcagtccgcaaaaaccacatgtactcatgccgattctcacgccaatgcgtagtagaccgcgaccgccgcaaccagtgccgatactgccgtcttaagaaatgcttccgcgccggcatgcgcagagaagcagtccaaaacgaacgcgaccgcatctcaacccggcgcagctcttacgaagactcaagccttccctcaatcaacgccctactacaagccgaagtcctaagccgccaaatcacttcacccgtatccggaataaacggcgacatccgagccaagaaaatagcctccatcgccgacgtctgcgaaagcatgaaagaacaactcctcgtcttagtcgaatgggccaaatacatccccgcattctgcgaactcccactggacgaccaagtagccctgctccgagcccacgccggcgaacacctcctcctcggcgccacgaaacgaagcatggtcttcaaagacgtccttctccttggcaacgactacatcgtcccacgccactgcccagagctagccgaaatgtcacgagtctcaatccgcatactcgacgagctagtactcccattccaagaactacaaatagacgacaacgaatacgcctatctcaaagcgatcatattcttcgaccccgacgccaaaggcctctccgacccaggcaaaatcaaacgcctccgctcccaagtccaggtgtcccttgaagactacataaacgatcgccaatacgactcacgaggaagattcggcgaactccttcttcttctccccacactccagtcaatcacatggcaaatgatcgaacagatacaattcatcaaacttttcggcatggccaaaatagacaacctcctacaggaaatgctactaggaggatccccatcagacgcaccccacgcccaccaccccctacacccccacctcatgcaagaacacatgggcaccaacgtcatagtcgccaacaccatgcccacccacctaagcaacggacaaatgtgcgagtggccccgcccacgcggccaagccgccacccccgaaacaccacaaccaagcccacccggcggctccggctccgaaccatacaaacttctcccaggcgctgtagccaccatcgtaaaaccactctcagccataccccaacccactatcaccaaacaagaggttatctagggactagtccctgttcccagagcccacttttttttctttttttgaaataaaatagcctgtctttcagatctcaaaggctcttttcagagccaccaaaaaaaaaaaaaaaaaaaaaaaaaaaaaaaaaaaaaaaaaaaaaaaaaaaaaaaaaaaaaaaaaaaaaaaaaaaaaaaaaaaaaaaaaaaaaaaaaaaaa

SEQ ID NO: 4109 - RNA, 1586 nt, synthetic construct
  misc_feature 1..1586: note = mRNA a-1 (hSL-A100) (opt11) from Homo sapiens__NP_000448.3__HNF4A(39-474)(E285Q)
  source 1..1586: mol_type = other RNA
aggagagtcccgcagtcggcgtccagcggctctgcttgttcgtgtgtgtgtcgttgcaggccttattcaagcttaccatggacacctcgccatccgaaggcacgaacctaaatgcccccaactcccttggcgtctccgcactctgcgccatctgcggcgaccgcgcaaccgggaaacactacggcgcctcatcctgcgacggctgcaaaggattcttccgtcgatctgtacgcaaaaaccacatgtactcttgccgattcagccgacaatgcgtcgttgacaaagacaaacgcaaccaatgccgctactgccgactcaaaaagtgcttccgcgcaggtatgaaaaaggaagcagtacaaaacgaacgagaccgcatttccacccgacgatcatcctatgaagactcctccctcccctcaatcaacgccctacttcaagccgaagtcctctcccgacaaataacctcccccgtcagcggcatcaacggcgacatcagagccaagaaaatcgcaagcatcgcagacgtatgcgagtcaatgaaagaacaactcctcgtcctagtcgaatgggcaaaatacatccccgccttctgcgaactcccactagacgaccaagtagccctcctccgcgcccacgccggagaacacctcctcctaggcgccactaaacgctccatggtcttcaaagacgtcctcctcctaggcaatgattacatcgttccccgacattgccccgaactagccgaaatgtcccgagtatccatccgcatcctcgacgaactcgtcctaccattccaagaactacaaatcgacgacaaccaatatgcatacctaaaagcaatcatcttcttcgaccccgacgccaaaggccttagcgacccaggcaaaatcaagcgactacgcagccaagtacaagtatccctagaagattacatcaacgatcgccaatacgactcccgcggccggttcggcgaactcctcctcctcctccccactctacaatccataacctggcaaatgatagaacaaatccaattcatcaagttattcggcatggccaaaatagacaacctcctccaagaaatgctactcggcggctccccatccgacgccccacacgcccatcaccccctccacccacaccttatgcaagaacacatgggcaccaacgtaatagtcgccaacaccatgccaacccacctctccaacggacaaatgtgcgaatggccacggccacgcggacaagccgccacaccggaaacaccacaacccagcccacccggcggttccggctccgaaccctacaaactactacccggcgcagtcgccaccatcgtcaaaccgctctcagccatccctcaaccaaccatcaccaaacaagaagtcatataaggactagtccctgttcccagagcccacttttttttctttttttgaaataaaatagcctgtctttcagatctcaaaggctcttttcagagccaccaaaaaaaaaaaaaaaaaaaaaaaaaaaaaaaaaaaaaaaaaaaaaaaaaaaaaaaaaaaaaaaaaaaaaaaaaaaaaaaaaaaaaaaaaaaaaaaaaaaaa

SEQ ID NO: 4110 - RNA, 1586 nt, synthetic construct
  misc_feature 1..1586: note = mRNA a-1 (hSL-A100) (opt11) from Homo sapiens__NP_000448.3__HNF4A(39-474)(T166E)
  source 1..1586: mol_type = other RNA
aggagagtcccgcagtcggcgtccagcggctctgcttgttcgtgtgtgtgtcgttgcaggccttattcaagcttaccatggacactagcccctccgaaggcaccaacctcaacgcaccaaactccttaggggtttcagccctatgcgccatatgcggcgatagagcaacaggaaaacactacggcgcctcatcatgcgatggctgcaaaggcttcttccgccgatccgtccgaaagaaccacatgtactcatgccgcttctcacgacaatgcgtcgtcgacaaagacaagcgaaaccaatgccgctactgccgcctaaagaaatgcttccgcgccggcatgaagaaagaagcagtacaaaacgaacgcgatcgcatctccacccgcagatcgtcctacgaagacagcagcctccccagcatcaacgccctcctccaagctgaagtcctctcccgccaaatcgaatcacccgtctcaggcatcaacggtgatatccgcgcaaagaaaatagcctccatcgccgacgtctgcgaatccatgaaagaacaactcctagtcctagtagaatgggccaaatacatcccagcattctgcgagctccccctggacgatcaagtcgctctcctccgcgcccacgccggcgaacacctcctactcggagcaaccaaacgcagtatggtattcaaagacgtcctactactcggtaacgactacatagtaccccgccactgcccagaactcgccgaaatgtcccgtgtctccatacgcatcctagacgaactcgtcctccccttccaagaactacaaatcgacgacaacgaatacgcctacctaaaagccatcatcttcttcgaccccgacgctaaaggcctctccgatccaggcaaaatcaaacgcctacgaagccaagtccaagtttccctcgaagactacatcaacgacagacaatacgactcccgcggccgcttcggcgaactactcctcctacttccaacactccaaagcataacgtggcaaatgatagaacaaatccaattcatcaaactcttcggcatggctaaaatagacaacctcctccaggaaatgctccttggaggctccccctccgacgcaccccacgcccaccacccactccaccctcacctcatgcaagaacacatgggcacaaacgtaatcgttgccaacactatgcccacccacctatccaacggacaaatgtgcgaatggccccgaccccgcggccaagccgccaccccagagactccccaaccctcgccacccggagggtccggctccgaaccctacaaactactccccggagcagtagcaacaatcgtaaaaccactctccgccataccccaacccactatcaccaaacaagaagtcatctaaggactagtccctgttcccagagcccacttttttttctttttttgaaataaaatagcctgtctttcagatctcaaaggctcttttcagagccaccaaaaaaaaaaaaaaaaaaaaaaaaaaaaaaaaaaaaaaaaaaaaaaaaaaaaaaaaaaaaaaaaaaaaaaaaaaaaaaaaaaaaaaaaaaaaaaaaaaaaa

SEQ ID NO: 4111 - RNA, 1586 nt, synthetic construct
  misc_feature 1..1586: note = mRNA a-1 (hSL-A100) (opt11) from Homo sapiens__NP_000448.3__HNF4A(39-474)(S148A)
  source 1..1586: mol_type = other RNA
aggagagtcccgcagtcggcgtccagcggctctgcttgttcgtgtgtgtgtcgttgcaggccttattcaagcttaccatggacacctctccctccgaaggcaccaacctcaacgcacccaactccctcggagtctccgccctctgcgccatctgtggcgaccgagcaaccgggaaacattacggcgcatcctcctgcgacggctgcaaaggcttcttccgccgatccgtcagaaaaaaccacatgtactcgtgccgattctcacgccaatgcgtagttgacaaagacaaacgcaaccaatgccgctactgccgccttaaaaaatgcttccgcgccggaatgaaaaaagaggccgtacaaaatgaacgcgaccgaatcagcacacgccgctcttcatacgaagactccgcactcccatccatcaacgccctactacaagccgaagtcctcagccggcaaatcacatccccagtgtccggtattaacggagacatacgcgccaagaaaatagcctccatagcagacgtctgcgagtcaatgaaagaacaactcctcgtactcgtagaatgggcaaaatacatccccgccttctgcgaacttcccctcgacgaccaagtcgcactcctccgcgcccacgccggcgaacatctcctactaggagccaccaaacgttcaatggtcttcaaagacgtcctgctactcggcaacgactatatcgtccccagacactgccccgaactagcagaaatgtccagagtctcaatacgaatcctagacgaactcgtcctcccattccaagaactacaaatcgacgacaacgaatacgcctacctcaaagccatcatcttctttgaccccgacgccaaagggctctccgaccccggaaaaatcaaacgcctgcgctcacaagtccaagtatccctcgaagactacatcaacgaccgccagtacgacagccgaggacgtttcggcgaactcctactcctcctcccaacactccagtccatcacctggcaaatgatcgaacaaatccaattcataaaactcttcggcatggccaaaatcgacaacctactccaagaaatgctcctcggcggatccccgtccgacgccccccacgcccaccaccccctacacccacacctcatgcaagaacacatgggaacaaacgtcatcgtagccaacaccatgcccacccacctctccaacggccaaatgtgcgaatggccccgcccacgcggccaagctgcaacaccagaaaccccacaaccatccccccccggcggcagcggctccgaaccctacaagcttctccccggtgccgtggccacaatagtcaaaccactctcggccattccccaaccaacaataacaaaacaagaagtgatctaaggactagtccctgttcccagagcccacttttttttctttttttgaaataaaatagcctgtctttcagatctcaaaggctcttttcagagccaccaaaaaaaaaaaaaaaaaaaaaaaaaaaaaaaaaaaaaaaaaaaaaaaaaaaaaaaaaaaaaaaaaaaaaaaaaaaaaaaaaaaaaaaaaaaaaaaaaaaaa

SEQ ID NO: 4112 - RNA, 1586 nt, synthetic construct
  misc_feature 1..1586: note = mRNA a-1 (hSL-A100) (opt11) from Homo sapiens__NP_000448.3__HNF4A(39-474)(S148E)
  source 1..1586: mol_type = other RNA
aggagagtcccgcagtcggcgtccagcggctctgcttgttcgtgtgtgtgtcgttgcaggccttattcaagcttaccatggacacctcaccctctgaaggaaccaacctcaacgcacccaactccctcggcgtatccgccctgtgcgccatctgcggtgatcgcgccaccggcaaacactacggggcctcaagctgcgacggctgcaaaggcttcttccgccgctctgtcaggaaaaaccacatgtacagctgccgattctcccgccaatgcgtagtcgataaagacaaacggaaccaatgccgatactgtcgcctcaagaaatgcttccgagcaggcatgaaaaaggaagcagtccaaaacgaacgggaccgaatctccactcgccgctcatcctacgaagacagcgaactaccctccattaatgccctcctccaagcagaagtactttcacgacaaataacctcccccgtctcaggcatcaacggcgacatcagagccaagaaaatcgcctccatcgccgacgtatgcgaatccatgaaagaacaactcctggtgctagtcgaatgggcaaaatatatccccgctttctgcgaactccccctagacgaccaagtcgcactcctccgagcccacgccggagagcacctcttactaggcgccaccaaacgaagcatggtcttcaaagacgtcctcctcctcggaaatgactacatcgtccccagacactgccccgaactcgccgaaatgtcacgagtctccatcagaatcctcgacgaactggtcctaccatttcaagaactacaaatcgatgacaacgaatacgcatacctcaaagcgatcatcttcttcgaccccgacgccaaagggctctccgacccaggcaaaatcaaacgcctcagaagccaggtccaagtctccctagaagactacataaacgaccgccagtatgactcccgcggcagattcggcgaactcctccttctacttccgaccctccaatccatcacctggcaaatgatcgaacaaatccaattcatcaaactcttcggcatggccaaaattgacaacctcctacaagaaatgctcctaggcggcagcccctcagacgcgccccacgcccaccacccactccacccacacctcatgcaagagcacatgggcaccaacgtcatagtagccaacaccatgcccacacacctctccaacggccagatgtgcgaatggccacgcccacgtggtcaagcagccacccccgaaaccccgcaaccatccccacccggcggatccggatccgaaccctacaaactcctacccggcgcagtcgccacaatcgtaaaacccctcagcgccatccctcagcccaccataaccaaacaagaagtcatctgaggactagtccctgttcccagagcccacttttttttctttttttgaaataaaatagcctgtctttcagatctcaaaggctcttttcagagccaccaaaaaaaaaaaaaaaaaaaaaaaaaaaaaaaaaaaaaaaaaaaaaaaaaaaaaaaaaaaaaaaaaaaaaaaaaaaaaaaaaaaaaaaaaaaaaaaaaaaaa

SEQ ID NO: 4113 - RNA, 1586 nt, synthetic construct
  misc_feature 1..1586: note = mRNA a-1 (hSL-A100) (opt11) from Homo sapiens__NP_000448.3__HNF4A(39-474)(S183A)
  source 1..1586: mol_type = other RNA
aggagagtcccgcagtcggcgtccagcggctctgcttgttcgtgtgtgtgtcgttgcaggccttattcaagcttaccatggacacctccccctcggagggaacaaacctcaacgcccccaactcactcggcgtcagcgcactctgcgccatatgcggcgaccgcgccaccggaaaacactacggagcctcaagctgcgacggctgcaaaggattcttcagacgcagcgtccggaaaaaccacatgtactcctgccgcttctcccgacaatgcgtcgtcgacaaagacaaacgaaaccaatgccgatactgccgcctaaaaaaatgcttccgcgctggaatgaaaaaagaagcagtacaaaacgaacgcgaccgcatatccaccagaagatcctcctacgaagactccagcctaccctcaatcaacgctctcctccaagcagaagtcctcagccgccaaatcacctcacccgtcagcggcatcaacggggacatccgcgccaaaaaaatcgccgcgattgccgacgtgtgcgaatccatgaaagagcaactcctcgtcctcgtagaatgggccaaatacatccccgccttctgcgaactacccctagacgaccaagtagcccttctacgcgcccacgccggggaacacctcctactcggcgcaaccaaaaggtcaatggtcttcaaagacgtcctcctactcggaaacgactacatcgtgcccaggcactgtccggaactcgccgaaatgtccagagtctcaatccggatactagacgaactcgtactccccttccaagaactacaaatcgacgacaacgaatacgcatacctaaaagccatcatcttcttcgacccagacgctaaaggactaagcgacccaggcaagatcaaacgactacgttcccaagtacaagtatccctggaagactacatcaacgaccgccaatacgactcacgaggtcgcttcggcgaactgctcctactcctacccaccctccaatccatcacatggcaaatgatcgaacaaatccaattcatcaaactcttcggtatggctaaaatcgacaacctactccaagaaatgcttctcggcggctccccatccgacgccccccacgcccaccacccactccacccccacctaatgcaagaacacatgggcaccaatgtcatagtcgccaacaccatgcccacccacctctcaaacggacaaatgtgcgaatggccccgaccacggggacaagcagccacaccagaaaccccccaacctagcccacccggaggctccggctcggaaccctacaaactcctccccggcgccgtagccaccatagtaaaacctttatccgccatcccacaacccaccatcacgaaacaggaagtaatataaggactagtccctgttcccagagcccacttttttttctttttttgaaataaaatagcctgtctttcagatctcaaaggctcttttcagagccaccaaaaaaaaaaaaaaaaaaaaaaaaaaaaaaaaaaaaaaaaaaaaaaaaaaaaaaaaaaaaaaaaaaaaaaaaaaaaaaaaaaaaaaaaaaaaaaaaaaaaa

SEQ ID NO: 4114 - RNA, 1586 nt, synthetic construct
  misc_feature 1..1586: note = mRNA a-1 (hSL-A100) (opt11) from Homo sapiens__NP_000448.3__HNF4A(39-474)(S183E)
  source 1..1586: mol_type = other RNA
aggagagtcccgcagtcggcgtccagcggctctgcttgttcgtgtgtgtgtcgttgcaggccttattcaagcttaccatggatacctccccctcggaagggaccaacctcaacgccccaaattcacttggagtctccgccctatgcgccatatgtggagaccgcgctaccggaaaacactatggcgcgtcatcctgcgacggatgcaaaggcttcttcagacgctcggtccgcaaaaaccacatgtactcctgccgattctcccgccaatgcgtcgtcgacaaagacaaaagaaaccaatgcaggtactgccgtctgaagaaatgcttccgcgccggaatgaagaaagaagccgtccaaaacgaacgcgaccgaatcagcaccagacgcagctcctacgaagactcctcactcccatcaatcaacgccctactccaagccgaagtcctctcccgccaaatcacctccccagtaagcggaatcaacggcgacatccgcgccaagaaaatagccgaaatagccgacgtctgcgaatcaatgaaagaacagctactcgtcctcgtcgaatgggccaaatacatacccgccttctgcgaactccctctcgacgaccaagtcgcactactcagagcccacgccggagaacacctactcctcggagccacgaaacgatccatggtattcaaagacgtactcctccttggtaacgattacatcgtcccaagacactgcccagaactcgccgaaatgtccagagtatcaatccgaatcctcgacgagctagtactcccctttcaggaactacaaatagatgacaacgaatacgcatacctaaaagccatcatcttctttgaccccgacgccaaaggcctctccgacccaggcaaaatcaaacgcctacgctcccaagttcaagtatccctcgaagactacatcaatgaccgccaatacgacagccgaggacgcttcggcgaactactcctgctactccccaccctacaatccatcacttggcaaatgatcgaacaaatccaattcatcaaactcttcggcatggccaaaatcgacaaccttctccaggaaatgctcctcggtggcagcccctccgacgcaccccacgcccaccaccccctccacccacacctcatgcaagaacacatgggcaccaacgtcatagtagcaaacaccatgcccacccacctatcaaacggacaaatgtgcgaatggccgcgcccgagaggacaagccgccacacccgaaacaccccaaccaagccctcccggcggctcaggttcagaaccctataaactcctacccggcgccgtagccaccatcgtaaaacccctcagcgccatcccccaacccaccatcaccaaacaagaagtgatataaggactagtccctgttcccagagcccacttttttttctttttttgaaataaaatagcctgtctttcagatctcaaaggctcttttcagagccaccaaaaaaaaaaaaaaaaaaaaaaaaaaaaaaaaaaaaaaaaaaaaaaaaaaaaaaaaaaaaaaaaaaaaaaaaaaaaaaaaaaaaaaaaaaaaaaaaaaaaa

SEQ ID NO: 4115 - RNA, 1586 nt, synthetic construct
  misc_feature 1..1586: note = mRNA a-1 (hSL-A100) (opt11) from Homo sapiens__NP_000448.3__HNF4A(39-474)(S461A)
  source 1..1586: mol_type = other RNA
aggagagtcccgcagtcggcgtccagcggctctgcttgttcgtgtgtgtgtcgttgcaggccttattcaagcttaccatggacacatcccccagcgaaggcaccaatctaaacgcacccaactccctcggggtctcagcactatgcgccatctgcggagatcgcgctactggcaaacactacggagcctcctcctgcgacggctgcaaaggcttcttccgaagatcagtccgcaaaaaccacatgtactcatgccgcttctctcgccaatgcgtcgtcgacaaagacaaacgaaaccagtgccgctactgccgcctaaagaaatgctttcgcgccggcatgaagaaagaagcagtacaaaacgaacgcgaccgcatctccacccgccggtcaagctacgaggactcatcactcccatcaatcaacgctctcctccaagcagaagtccttagccgacaaatcacatcccccgtttccggaatcaacggcgacatccgagcaaagaaaatcgcctctatcgcagacgtatgcgaatccatgaaagaacaactcctagtcctagtcgaatgggcaaaatatatacccgccttctgcgaactgcccctagacgatcaagtcgcactactccgagcccacgccggcgagcacctcctgctcggcgccacaaaacgatccatggtattcaaagacgtactactcctcgggaacgactacatcgtaccccgccactgccccgagctcgccgaaatgtcacgtgtctcaattcgcatactagacgagctagtcctccccttccaagaactacaaatagacgacaacgaatacgcatacctaaaagccatcatcttcttcgaccccgatgccaaaggactatccgaccccggcaaaatcaaacgccttcgttcacaagtgcaagtctcgctcgaagactacatcaacgaccgccaatacgactccagaggccgattcggagaactcctactcctcctccccaccctccaatccatcacatggcaaatgatagaacaaatccaattcataaaactcttcggcatggccaaaatcgacaacctgctccaagaaatgctcctcggcggatcaccctccgacgccccacacgcccaccaccccctacacccccaccttatgcaagaacacatgggaaccaacgtcatcgtcgccaacacaatgcccacacacctatcaaacggacaaatgtgcgagtggcctcgcccccgcggccaagcagccacacccgaaacaccccagccctccccacccggcggctccggctcggaaccctacaaacttctcccaggcgccgtcgccaccatcgtaaaaccactcgccgcaataccccaaccaaccatcaccaaacaagaggtaatctaaggactagtccctgttcccagagcccacttttttttctttttttgaaataaaatagcctgtctttcagatctcaaaggctcttttcagagccaccaaaaaaaaaaaaaaaaaaaaaaaaaaaaaaaaaaaaaaaaaaaaaaaaaaaaaaaaaaaaaaaaaaaaaaaaaaaaaaaaaaaaaaaaaaaaaaaaaaaaa

SEQ ID NO: 4116 - RNA, 1586 nt, synthetic construct
  misc_feature 1..1586: note = mRNA a-1 (hSL-A100) (opt11) from Homo sapiens__NP_000448.3__HNF4A(39-474)(S461E)
  source 1..1586: mol_type = other RNA
aggagagtcccgcagtcggcgtccagcggctctgcttgttcgtgtgtgtgtcgttgcaggccttattcaagcttaccatggacacctctccatccgaaggcacaaacctcaacgcacccaactccctcggcgtctccgcactttgcgcaatctgcggcgaccgagccaccggcaaacattacggagcctccagctgcgacggctgcaagggattcttccgccgcagcgtccgcaaaaaccacatgtactcgtgccgcttctcacgacagtgcgtagtcgacaaagacaaacgcaaccaatgcagatactgcagacttaaaaagtgcttccgcgcgggaatgaagaaagaagccgtccaaaacgaacgagatcgcatctccacccgccggagctcatacgaagactcatcactaccatcaataaacgccctcctacaagccgaagtcctatcccgccaaataacctcccccgtctctggcatcaacggagacatccgcgccaagaaaatcgcaagcatcgccgacgtctgcgaatcaatgaaagagcaactactcgtcctagtagaatgggcaaaatacataccagccttctgcgaactccccctagacgaccaagtcgcgctactccgagcccacgcaggagaacaccttctcctaggcgcaaccaaacgctccatggtatttaaagacgtcctactcctgggcaacgactacatagtcccccgccattgcccagaactcgccgaaatgtcacgcgtatcgatacgcatcctcgacgagctagtcctccccttccaagaactacaaatagacgacaacgaatacgcctacttgaaagccataatcttcttcgacccagacgccaaaggcctctccgacccaggcaaaataaaacgcctacgcagccaggtacaggtcagcctcgaagactatatcaacgaccgtcaatacgactcccgaggccgattcggagaactcctcctactcctaccaaccctccaatcaatcacctggcaaatgatcgaacaaatacaattcatcaaactgttcggcatggcaaaaatagacaacctacttcaagaaatgctcttaggaggctccccctccgacgccccacacgcccaccaccccctccacccacacctcatgcaagaacacatggggaccaacgtaatagtcgccaacaccatgcccacccacctatccaacggccaaatgtgcgaatggccccgcccgcgcggccaagccgccacccctgaaacaccacaaccctcccctcccggcggatcaggctccgaaccctacaaactccttcccggcgccgtagccactatcgtcaaacccctcgaagccatacctcaaccaaccatcaccaaacaagaggtcatctaaggactagtccctgttcccagagcccacttttttttctttttttgaaataaaatagcctgtctttcagatctcaaaggctcttttcagagccaccaaaaaaaaaaaaaaaaaaaaaaaaaaaaaaaaaaaaaaaaaaaaaaaaaaaaaaaaaaaaaaaaaaaaaaaaaaaaaaaaaaaaaaaaaaaaaaaaaaaaa

SEQ ID NO: 4117 - RNA, 1586 nt, synthetic construct
  misc_feature 1..1586: note = mRNA a-1 (hSL-A100) (opt11) from Homo sapiens__NP_000448.3__HNF4A(39-474)(S142A_S143A_S313A)
  source 1..1586: mol_type = other RNA
aggagagtcccgcagtcggcgtccagcggctctgcttgttcgtgtgtgtgtcgttgcaggccttattcaagcttaccatggacacctcaccctctgaagggaccaacctaaacgcaccaaactcactcggagtcagcgccctatgcgccatctgcggcgaccgcgcaaccggaaaacactacggcgcctcctcttgcgacggctgcaaaggcttcttccgaagatccgtcagaaaaaaccatatgtacagctgccgcttctcacgacaatgcgtcgtcgacaaagacaaaagaaaccaatgcagatattgccgactcaaaaaatgctttcgagccggcatgaaaaaggaagcagtccaaaacgaacgcgaccgcatttccacccgcagagccgcctacgaagacagctccctccccagcatcaacgcactactccaagctgaagtattatcccgccaaatcacctccccagtctccggcatcaacggcgacatacgggccaaaaaaatcgcctcaatcgccgacgtctgcgaatccatgaaagaacaactcctagtcctagtcgaatgggccaaatacatacccgcattctgcgaactacctttagacgaccaagtcgccctcttacgagcccacgccggcgaacatctactgcttggcgccaccaaacgatccatggttttcaaagacgtactactcctcggaaacgactacatcgtcccacgtcactgcccagaactagccgaaatgtcccgcgtctcaatccgcatcctcgacgaactcgtactcccctttcaagaactacaaatcgacgacaacgagtacgcctacctcaaagccatcatcttcttcgaccccgacgcaaaaggcctctccgaccccggcaaaattaaacgacttagagcacaagtacaagtcagcctagaagactacataaatgaccgccaatacgacagcagaggccgcttcggcgagctcctactcctcctccccaccctacaatcaattacctggcagatgatcgaacaaatacaattcataaaacttttcggaatggccaaaatcgacaacctactccaagaaatgctcctcggcggctcccccagcgacgccccccacgcacaccaccccctacacccccacctaatgcaagagcacatgggaaccaacgtcatagtagccaacacaatgcccactcacctcagcaacggccaaatgtgcgaatggccccgcccccgaggacaagccgccacccccgaaaccccccaaccgagcccccccggcggctccggctccgaaccctacaaactcctccctggcgccgtagccacgatagtaaaaccgctctccgccatcccccaaccgacaataacgaaacaagaagtaatctaaggactagtccctgttcccagagcccacttttttttctttttttgaaataaaatagcctgtctttcagatctcaaaggctcttttcagagccaccaaaaaaaaaaaaaaaaaaaaaaaaaaaaaaaaaaaaaaaaaaaaaaaaaaaaaaaaaaaaaaaaaaaaaaaaaaaaaaaaaaaaaaaaaaaaaaaaaaaaa

SEQ ID NO: 4118 - RNA, 1586 nt, synthetic construct
  misc_feature 1..1586: note = mRNA a-1 (hSL-A100) (opt11) from Homo sapiens__NP_000448.3__HNF4A(39-474)(S142A_S143A_S313A_K458R )
  source 1..1586: mol_type = other RNA
aggagagtcccgcagtcggcgtccagcggctctgcttgttcgtgtgtgtgtcgttgcaggccttattcaagcttaccatggacacatccccctccgagggcaccaacctcaacgcccccaactctctcggcgtctctgccctctgcgccatctgcggcgaccgcgccaccggaaaacactacggagccagctcatgcgacggctgcaaaggattctttcgacgctccgttagaaaaaaccacatgtactcatgccgtttctctcgccaatgcgtcgtcgacaaagacaaacgtaaccagtgccgctactgccgcctaaaaaaatgcttccgcgcaggcatgaaaaaagaagccgtccaaaacgagagagaccgcatatccacccgccgagccgcctacgaagactcttcactaccgtccataaacgccctcctacaagccgaagtcctatcacgacaaataacctcccccgtcagcggcatcaacggcgacatcagagccaagaaaatagcctctatagcagacgtatgcgaatcaatgaaagaacaactcctagtactagtcgaatgggccaaatacattcccgccttctgcgaactgccactcgacgaccaagtggccctactccgtgcccacgccggcgaacatttactcctcggcgccaccaaacgatcaatggtattcaaagacgtactactcctcggcaacgactacatagtcccccgccactgccccgaactcgccgaaatgtcacgtgtctctatccggatcctagacgaactcgtcctccccttccaagaactccaaatcgacgacaacgaatacgcctacctaaaagccatcatattcttcgatcccgacgccaagggtctctccgacccaggaaaaatcaaacgcctacgcgcacaagtacaagtatccctcgaagactacatcaacgaccgacaatacgacagccgcggccgattcggcgaactactccttctcctccccacactacaatcaataacctggcaaatgatcgaacaaatccagttcataaaactctttggcatggccaaaatagacaacctcctccaggaaatgctcctcggaggaagcccctccgacgccccccacgcccaccacccactccacccccacctcatgcaagagcacatgggcaccaacgtcatcgtcgccaacaccatgcccacacacctatcaaacggccaaatgtgtgaatggcccagacctcgcggccaagccgccacacccgaaaccccacaaccctcccccccggggggctcaggctccgaaccctacaaactcctcccaggtgccgtcgccacaatcgtacgacccctctccgccatccctcaaccaacaataaccaaacaagaagtcatctaaggactagtccctgttcccagagcccacttttttttctttttttgaaataaaatagcctgtctttcagatctcaaaggctcttttcagagccaccaaaaaaaaaaaaaaaaaaaaaaaaaaaaaaaaaaaaaaaaaaaaaaaaaaaaaaaaaaaaaaaaaaaaaaaaaaaaaaaaaaaaaaaaaaaaaaaaaaaaa

SEQ ID NO: 4119 - RNA, 1586 nt, synthetic construct
  misc_feature 1..1586: note = mRNA a-1 (hSL-A100) (opt11) from Homo sapiens__NP_000448.3__HNF4A(39-474)(S142A_S143A_S167A_S313A _S378A_T429A_T432A_S436A_K458R)
  source 1..1586: mol_type = other RNA
aggagagtcccgcagtcggcgtccagcggctctgcttgttcgtgtgtgtgtcgttgcaggccttattcaagcttaccatggacacatcgccaagcgaaggaaccaaccttaacgccccaaactccctgggcgtctccgccctttgcgccatctgcggagaccgcgccacaggcaaacactatggcgcctccagctgcgacggctgcaaaggcttcttccgacgctcagtacggaaaaaccacatgtactcatgccgcttctcacgccaatgcgtcgtcgacaaagacaaacgcaaccaatgccgctactgccgactcaaaaaatgcttccgcgcaggcatgaaaaaggaagccgtccaaaacgaacgcgaccgtatctcaacccgacgtgctgcatacgaagactcatccctcccctccatcaacgccctactccaggccgaagtcctgagtcgacaaatcacagcccccgtctcaggcatcaacggcgacatccgagcaaagaaaatcgcctctatagccgacgtctgcgaatcaatgaaagaacaactcctcgtcctcgtagaatgggccaaatacatccccgcattctgcgaactacccctcgacgaccaagtcgccctactaagagcccacgccggcgaacaccttctgcttggcgccacaaaacgcagcatggtattcaaagacgtactactcctcggcaacgactacatcgtaccccgacactgccccgaactcgccgaaatgtcccgcgtctccatacgcatcctagacgaactggtcctccccttccaggaactccaaatcgacgacaacgaatacgcctacctcaaagccatcatattcttcgacccagacgcaaaaggcctcagcgaccccggcaaaatcaaaagactccgcgcccaagtacaagtcagcctagaagattacataaacgaccgccaatacgatagcagaggccgattcggcgaactcctcctactcctacccacactacaatcaatcacctggcaaatgatagaacaaatccaattcatcaagctattcggcatggcaaaaattgacaacctactacaagaaatgctcctcggcggcgccccaagcgacgcaccacacgcccaccaccccctccacccgcacctcatgcaagaacacatgggcaccaacgtcatcgtcgccaacacaatgcccacacacctctccaatggacaaatgtgcgaatggccacgcccacgaggccaagcggccgcgcccgaagccccacaacctgccccgcccggaggctctggaagcgaaccctacaaactactccccggcgcagtcgccacgatagtccgcccactatccgccatcccccagcccacaataaccaaacaagaagtcatataaggactagtccctgttcccagagcccacttttttttctttttttgaaataaaatagcctgtctttcagatctcaaaggctcttttcagagccaccaaaaaaaaaaaaaaaaaaaaaaaaaaaaaaaaaaaaaaaaaaaaaaaaaaaaaaaaaaaaaaaaaaaaaaaaaaaaaaaaaaaaaaaaaaaaaaaaaaaaa

SEQ ID NO: 4120 - RNA, 1586 nt, synthetic construct
  misc_feature 1..1586: note = mRNA a-1 (hSL-A100) (opt11) from Homo sapiens__NP_000448.3__HNF4A(39-474)(S142A_S143A_S148A_S167A _S313A_S378A_T429A_T432A_S436A_K458R)
  source 1..1586: mol_type = other RNA
aggagagtcccgcagtcggcgtccagcggctctgcttgttcgtgtgtgtgtcgttgcaggccttattcaagcttaccatggacacctccccatccgaaggcaccaacctcaacgcccccaactcactaggagtctccgccctttgcgccatctgcggcgaccgcgccacaggaaaacactacggcgcgtcaagctgcgatggatgcaaaggtttcttccgtcgttccgtccgcaaaaaccacatgtattcctgccgattctcgcgccaatgcgtcgtcgacaaagacaaacgaaaccaatgccgatactgccgcctcaaaaagtgcttccgcgccggcatgaagaaagaagccgtccaaaacgaacgcgacagaatatcaacccgacgagccgcctacgaagactcagccctcccctcaataaatgccctcctccaagcagaggtcctttccagacagatcaccgcccccgtctccggcatcaacggcgacatcagagccaagaaaatcgcctccatcgccgacgtctgcgaatccatgaaagaacaacttctagttctcgtcgaatgggccaaatacatccccgccttctgcgaactaccccttgacgaccaagtcgctctcctgcgcgcccacgccggcgaacacctccttctcggagcaactaaacgctccatggtgttcaaagacgtcctcctcctcggcaacgactacatcgtcccccgacactgccccgaactagctgaaatgtcacgcgtcagcatcagaatcctcgacgaactcgtcctccccttccaagaactccaaatcgatgacaacgagtacgcctatcttaaagccatcatattcttcgacccagacgcaaaaggtctctccgaccccggcaaaataaaacgactccgcgcccaagtccaagtttccctcgaagactacatcaacgaccgacaatacgattcccgcggccgattcggcgaactcctcctactccttcccaccctccagtccataacatggcaaatgatcgaacaaatccaattcataaaactcttcggcatggccaaaatagacaacctcctccaagagatgctactcggcggtgctccatccgacgccccacacgcacaccaccccctccacccccacctcatgcaagagcacatgggcaccaacgtcatagtagcaaacaccatgcctacccacctatccaacggacaaatgtgcgaatggccccgcccacggggccaagccgccgcccccgaagccccacaacccgccccacccggaggatccggcagcgaaccctacaaactactacccggtgccgtcgccacaatcgtccgccccctatccgccataccacagcccaccatcaccaaacaagaagtcatatagggactagtccctgttcccagagcccacttttttttctttttttgaaataaaatagcctgtctttcagatctcaaaggctcttttcagagccaccaaaaaaaaaaaaaaaaaaaaaaaaaaaaaaaaaaaaaaaaaaaaaaaaaaaaaaaaaaaaaaaaaaaaaaaaaaaaaaaaaaaaaaaaaaaaaaaaaaaaa

SEQ ID NO: 4121 - RNA, 1586 nt, synthetic construct
  misc_feature 1..1586: note = mRNA a-1 (hSL-A100) (opt11) from Homo sapiens__NP_000448.3__HNF4A(39-474)(K106R_K108R_K126R_K127R _S142A_S143A_S148A_S167A_S313A_S378A_T429A_T432A_S436A_K458 R)
  source 1..1586: mol_type = other RNA
aggagagtcccgcagtcggcgtccagcggctctgcttgttcgtgtgtgtgtcgttgcaggccttattcaagcttaccatggacacctcaccatccgaaggcacaaacctaaacgcccccaactcacttggcgtttcggccctctgcgccatatgcggagaccgcgccaccggcaaacactacggagcatcctcctgcgacggctgtaaaggcttcttcagacgatccgtacgcaaaaaccacatgtactcctgccgcttcagcagacaatgcgtcgtcgaccgcgaccgccgcaaccaatgccgctactgccgcctaaagaaatgcttccgcgcaggcatgcgccgagaagcagtccaaaacgaacgagaccgaataagcacccgcagagccgcgtacgaagactccgccctcccatcaatcaacgcacttctacaagccgaagtactctcccgccaaataaccgccccagtatccggaatcaacggcgacatccgcgccaagaaaatcgcttccatagcagacgtctgtgaatccatgaaagagcaactcctcgtcctcgtcgagtgggccaaatacatccccgccttctgcgagctacccctcgacgaccaagtcgccctcctccgagcccacgctggcgaacacctcctactcggcgccaccaaaagatccatggttttcaaagacgtactccttctgggaaacgactacatcgtacccaggcactgccccgagctagccgaaatgtccagagtctcaatccgcatactcgacgagctcgtccttccctttcaagaacttcaaatagacgacaacgaatacgcatacctgaaagccatcatcttcttcgaccccgacgccaaaggactatccgacccaggcaaaatcaaacgcctacgagcacaagtacaagtctccctagaagactacataaacgaccgccaatacgactcgagaggccgcttcggcgaactactccttctcctccctaccctacaaagcatcacctggcaaatgatcgaacaaatccaattcataaaactcttcggaatggccaaaatcgacaatttactccaggaaatgttactcggcggcgcaccatccgacgcaccccacgcccaccaccccctacacccccacctcatgcaagaacacatgggaaccaatgtcatagtcgccaacacaatgcctacacatctctccaacggccaaatgtgcgaatggccgcgtccccgaggacaagcagccgcccccgaagcaccccagcccgccccgcccggcggatccggatcagaaccctacaaactcctcccaggcgccgtcgcaaccatcgtccgccccctctcagcaatcccccaacccaccatcaccaaacaagaagtcatctaaggactagtccctgttcccagagcccacttttttttctttttttgaaataaaatagcctgtctttcagatctcaaaggctcttttcagagccaccaaaaaaaaaaaaaaaaaaaaaaaaaaaaaaaaaaaaaaaaaaaaaaaaaaaaaaaaaaaaaaaaaaaaaaaaaaaaaaaaaaaaaaaaaaaaaaaaaaaaa

SEQ ID NO: 4122 - RNA, 1586 nt, synthetic construct
  misc_feature 1..1586: note = mRNA a-1 (hSL-A100) (opt11) from Homo sapiens__NP_000448.3__HNF4A(39-474)(S142A_S143A_S148A_T166A _S167A_S313A_S378A_T429A_T432A_S436A_K458R)
  source 1..1586: mol_type = other RNA
aggagagtcccgcagtcggcgtccagcggctctgcttgttcgtgtgtgtgtcgttgcaggccttattcaagcttaccatggacacctccccctcagaaggaaccaacctaaatgcccccaactctctcggcgtctccgctctctgcgccatctgcggcgaccgagccaccggaaaacactacggagcctcctcctgcgacgggtgcaaaggcttcttcagaagatccgtccgcaaaaaccacatgtactcatgccggttctcccgacaatgcgtagtcgacaaagacaaacgcaaccaatgccgctactgccgcctcaaaaaatgctttcgcgccggcatgaagaaagaagcagtacaaaacgaaagagacagaatctcaactcgcagagccgcctacgaagactcggcgctcccctctatcaacgccctgcttcaagccgaagtcctctcacgccaaatcgccgcacccgtatccggaatcaacggcgatatccgcgcaaaaaaaatcgcatccatcgccgacgtctgcgaatccatgaaggaacaactgctagtcctcgtagaatgggccaaatacatccctgccttctgtgaactccccctagacgatcaagtcgccctcctacgcgcccacgccggcgagcacctactacttggagccaccaaacgttctatggtcttcaaagacgtactcttactcggcaacgactacatagtcccccgccactgcccagaactggccgaaatgagccgcgtctcaatacgaatcctagacgaactcgtgctaccattccaagaactacaaatcgacgacaacgaatacgcatacctaaaagctattatcttcttcgaccccgacgccaaaggcctatccgaccccggcaaaataaaacgcctgcgagcccaagtacaagtaagcctcgaagactacatcaacgaccgacagtacgactcccgaggccgcttcggcgaactcctacttctcctccccaccctacaatccatcacctggcaaatgatagaacaaatccaattcatcaaactcttcggaatggcaaaaatcgataacctgctccaagaaatgctcctcggcggagccccaagcgatgcaccacacgcacaccacccactacacccacacctcatgcaagaacacatgggaaccaacgtcatagtcgccaacacaatgccaacccacctatccaacggccaaatgtgcgaatggccccgcccccgcggtcaagcagcagctcccgaagcacctcaaccagccccccccggaggctccggctccgaaccttacaaactcctcccaggagccgtcgccacaatcgtaagacccctctcagccatcccccaaccaaccatcacaaaacaagaagtgatataaggactagtccctgttcccagagcccacttttttttctttttttgaaataaaatagcctgtctttcagatctcaaaggctcttttcagagccaccaaaaaaaaaaaaaaaaaaaaaaaaaaaaaaaaaaaaaaaaaaaaaaaaaaaaaaaaaaaaaaaaaaaaaaaaaaaaaaaaaaaaaaaaaaaaaaaaaaaaa

SEQ ID NO: 4123 - RNA, 1586 nt, synthetic construct
  misc_feature 1..1586: note = mRNA a-1 (hSL-A100) (opt11) from Homo sapiens__NP_000448.3__HNF4A(39-474)(S87A_S142A_S143A_S148A_ T166A_S167A_S313A_S378A_T429A_T432A_S436A_K458R)
  source 1..1586: mol_type = other RNA
aggagagtcccgcagtcggcgtccagcggctctgcttgttcgtgtgtgtgtcgttgcaggccttattcaagcttaccatggacacctcaccatcagaaggtacaaacctcaacgcccctaactcactcggcgtatctgcactatgcgcaatatgcggagaccgtgccactggcaaacactacggagcctcatcatgtgacggctgcaaaggcttcttccgacgtgcagtccgcaaaaaccatatgtactcctgccgattctcccgacaatgcgtcgtagacaaagacaaacgaaaccaatgccggtactgccgcctaaagaaatgcttccgcgccgggatgaagaaagaagccgtacaaaacgaacgagatcgcatctccacacgccgagccgcctacgaagactccgccctcccctccatcaacgccctactccaggccgaagtactgtcgcgccaaatcgccgcgccagtttccggaataaacggcgacatccgcgccaagaaaatcgcctcaatcgcagacgtatgcgaatccatgaaagaacaactcctcgtcctcgtagaatgggccaaatacatccccgcattctgcgaactacccctagatgaccaagtagcactattacgcgctcacgccggagaacacctcctcctcggagccactaaacgctccatggtcttcaaagacgtcctcctcctcggcaacgactacatcgtaccccgccactgccccgaactcgcagaaatgtcaagggtctccataagaatcctagacgagctagtcctaccgttccaagaactccaaatcgacgacaatgaatacgcatacctcaaagccataatcttcttcgacccagacgccaaaggcctctcagaccccggcaaaatcaaacgactacgcgcccaggtccaagtctccctagaagactacatcaacgacagacaatacgacagccgagggagattcggcgaactcctcctactcctccccaccctccaatcaataacatggcaaatgatcgaacaaatccagttcatcaaactcttcggcatggccaaaatcgacaacctactccaagaaatgctcctcggaggcgccccaagcgacgcaccccacgcacaccaccccctccacccacacctcatgcaagaacacatgggaaccaacgtcatagtagcaaacacaatgcccacccacctctcaaacggccaaatgtgcgaatggccccgcccacgaggccaagcagcggcccccgaagctccccaacccgcccctcccggagggtccggcagcgaaccctacaaactcctcccaggcgcagtagccaccatcgtacgcccgctttccgcaatacctcagcccacaatcacaaaacaagaagtaatataaggactagtccctgttcccagagcccacttttttttctttttttgaaataaaatagcctgtctttcagatctcaaaggctcttttcagagccaccaaaaaaaaaaaaaaaaaaaaaaaaaaaaaaaaaaaaaaaaaaaaaaaaaaaaaaaaaaaaaaaaaaaaaaaaaaaaaaaaaaaaaaaaaaaaaaaaaaaaa

SEQ ID NO: 4124 - RNA, 1586 nt, synthetic construct
  misc_feature 1..1586: note = mRNA a-1 (hSL-A100) (opt11) from Homo sapiens__NP_000448.3__HNF4A(39-474)(S87A_K106R_K108R_K126R_ K127R_S142A_S143A_S148A_T166A_S167A_S313A_S378A_T429A_T432A _S436A_K458R)
  source 1..1586: mol_type = other RNA
aggagagtcccgcagtcggcgtccagcggctctgcttgttcgtgtgtgtgtcgttgcaggccttattcaagcttaccatggacacctccccatccgaaggtaccaacttaaacgcccccaactccttaggcgtctccgccctctgcgcaatctgcggcgaccgagctacaggtaaacactacggcgcatcaagctgtgacggctgcaaaggcttcttccgacgagccgtccgcaaaaaccacatgtactcatgcagattctcccgacaatgcgtcgtggacagagaccgacgaaaccaatgccgctactgccgcctcaaaaaatgcttccgcgccggcatgcgacgtgaagcagtccaaaacgaacgtgatcgcataagcactagacgcgccgcctacgaagactccgccctgccctccatcaacgccctactacaagccgaagtccttagcagacaaatagccgccccagtctccggaataaacggagacatacgtgccaaaaaaatagcatccatcgccgacgtatgcgaaagcatgaaagaacaactccttgtcctagtagaatgggctaaatacatccccgcattctgcgaactccccctagacgaccaagtagccctcctccgagcacacgccggcgaacacctcctactcggcgccacaaaaagaagcatggtcttcaaagacgtcctacttctaggaaacgactacatcgtccctcgccactgccccgaactcgccgagatgagtagagtctctatcagaatcctcgacgaactcgtactcccattccaagaactacaaatagacgacaacgaatacgcctacctcaaagcgatcatcttcttcgaccccgacgccaaaggcctatcagaccccggcaaaatcaaaagactccgcgcccaagtacaagtctccctagaagactacatcaacgaccgccagtacgacagccgaggccgattcggcgaactacttctactcctcccaacactacaatcaatcacctggcagatgatcgaacaaatccaattcatcaaactattcggcatggccaaaatagacaaccttctacaagaaatgctcctaggcggcgcccccagcgacgcaccacacgcacaccacccccttcacccccacctaatgcaagagcacatgggcaccaacgtcattgtagccaacacaatgcccacccacctctcgaacggtcaaatgtgcgaatggccccgcccacgcggccaagcagccgcacccgaagcaccccaaccagccccacccggaggatccggttcggaaccctacaaactcctacccggcgccgtggccacaatagtaagacccctctcagcaatcccccaacccaccatcaccaaacaagaagtcatctaaggactagtccctgttcccagagcccacttttttttctttttttgaaataaaatagcctgtctttcagatctcaaaggctcttttcagagccaccaaaaaaaaaaaaaaaaaaaaaaaaaaaaaaaaaaaaaaaaaaaaaaaaaaaaaaaaaaaaaaaaaaaaaaaaaaaaaaaaaaaaaaaaaaaaaaaaaaaaa

SEQ ID NO: 4125 - RNA, 1586 nt, synthetic construct
  misc_feature 1..1586: note = mRNA a-1 (hSL-A100) (opt11) from Homo sapiens__NP_000448.3__HNF4A(39-474)(S87A_K106R_K108R_K126R_ K127R)
  source 1..1586: mol_type = other RNA
aggagagtcccgcagtcggcgtccagcggctctgcttgttcgtgtgtgtgtcgttgcaggccttattcaagcttaccatggacaccagcccatctgaaggtaccaacctcaacgcaccaaactccctcggcgtttcagctctatgcgccatatgcggagaccgcgccaccggcaaacactacggagcctcctcttgcgacggctgcaaaggcttcttccgcagagccgtacgcaaaaaccacatgtacagctgtagattttcccgccaatgcgtcgtcgaccgcgaccgccgcaaccagtgcagatattgccgactcaagaaatgcttccgcgcaggaatgcgccgcgaagccgtacaaaacgaacgcgaccgcatctccacacgccgctcatcttacgaagactcctccctaccaagcatcaacgcactacttcaagcagaagtcctatcccgacaaatcacctcccccgtctcaggcataaacggcgacataagggcaaagaaaatcgcctccatagccgacgtatgcgaatcaatgaaagaacaactcctagtcctcgtcgaatgggccaaatacatccccgccttctgcgaactgcccctcgacgaccaagtagcacttctccgcgcccacgccggcgaacacctcctactcggcgccaccaaacgttccatggtcttcaaagacgtcctcctacttggtaacgactacatcgtaccccgccactgccctgaactcgcagaaatgtcccgcgtctcaataagaatcctcgacgagctagttctccccttccaagaactacaaatcgacgacaacgaatacgcctacctcaaagccatcatatttttcgaccccgacgccaaaggcctttccgaccccggcaaaataaaacgcctccgctctcaagtccaggtcagcctcgaagactacatcaacgaccgccaatacgactctcgtggccgcttcggagaactactactactcctccccacactacaatccatcacctggcaaatgatcgaacaaatccaattcatcaaactcttcggcatggccaaaattgacaacctactccaagaaatgctcctaggcggctccccatccgacgcaccccacgcccaccaccccctccacccccacctcatgcaagaacacatgggaaccaacgtaatcgtcgcaaacacaatgccaacccacctatccaacggtcaaatgtgcgaatggccacgaccccgcggccaagcagctacccccgaaaccccacaaccctcaccaccaggaggcagcggttccgaaccatacaaactcctacccggggccgtcgccaccatcgtaaaacccctctccgccatcccccaacctacaatcaccaaacaagaagtcatctaaggactagtccctgttcccagagcccacttttttttctttttttgaaataaaatagcctgtctttcagatctcaaaggctcttttcagagccaccaaaaaaaaaaaaaaaaaaaaaaaaaaaaaaaaaaaaaaaaaaaaaaaaaaaaaaaaaaaaaaaaaaaaaaaaaaaaaaaaaaaaaaaaaaaaaaaaaaaaa

SEQ ID NO: 4126 - RNA, 1586 nt, synthetic construct
  misc_feature 1..1586: note = mRNA a-1 (hSL-A100) (opt11) from Homo sapiens__NP_000448.3__HNF4A(39-474)(S87A_K106R_K108R_K126R_ K127R_S142A_S143A_S148A_T166A_S167A_S313A_S378A_T429A_T432A _S436A_K458R_S461A)
  source 1..1586: mol_type = other RNA
aggagagtcccgcagtcggcgtccagcggctctgcttgttcgtgtgtgtgtcgttgcaggccttattcaagcttaccatggacacctctcccagcgaaggcacaaacctcaacgcccccaactcactcggggtctccgccctctgcgccatatgcggtgaccgtgcaaccggcaaacactacggcgcctcatcctgcgacggctgcaaaggattcttccgacgcgccgtacgcaaaaaccacatgtactcctgcagattctcacgccaatgcgtcgtggaccgagaccgccgcaaccaatgccgttactgccgcctcaagaaatgcttccgagccggaatgcgaagagaagccgtacaaaacgaacgcgaccgcatctccacacgacgagcagcctacgaagactccgccctaccctccataaacgcactcctccaagccgaagtactctcccgacaaatagccgcaccagtctccggcataaacggagacatccgagcaaagaaaatagcctcaatcgccgacgtatgcgaatcaatgaaagaacaacttctcgtcctcgtcgaatgggccaaatatatacccgccttctgcgaactccccctagacgaccaagtggcccttcttcgcgcccacgccggcgaacacctcctactcggagccaccaaacgctccatggtcttcaaagacgtactactcctcggtaacgactacatcgtcccacgacactgccccgaactagccgaaatgtcacgcgtctccatccgcatcctagacgaactcgtactcccattccaagaactccaaatcgacgacaacgaatacgcatacctcaaagccatcatcttcttcgacccagacgccaaaggcctatccgacccaggaaaaataaaacgcttacgcgcacaagtccaagtctccctcgaagactacatcaacgaccgtcagtacgacagccgggggagattcggcgaactgctactactacttcccaccctccaatccatcacctggcaaatgatagaacaaatacaattcatcaaactattcggcatggccaaaatcgacaacctcctacaagaaatgctactcggcggcgccccctccgacgcaccccacgcccaccaccccctccacccccatctaatgcaagaacacatgggcacaaacgtcatcgttgccaacacaatgcccacccacctttccaacggccaaatgtgcgaatggccacgcccccgtggccaagccgccgcccccgaagccccacaaccggccccaccaggtggatccggctcggaaccctacaaactactcccaggagcggtcgctaccatcgtacgccctttggccgccatcccccaacccacaatcaccaaacaagaagttatctagggactagtccctgttcccagagcccacttttttttctttttttgaaataaaatagcctgtctttcagatctcaaaggctcttttcagagccaccaaaaaaaaaaaaaaaaaaaaaaaaaaaaaaaaaaaaaaaaaaaaaaaaaaaaaaaaaaaaaaaaaaaaaaaaaaaaaaaaaaaaaaaaaaaaaaaaaaaaa

SEQ ID NO: 4127 - RNA, 1586 nt, synthetic construct
  misc_feature 1..1586: note = mRNA a-1 (hSL-A100) (opt11) from Homo sapiens__NP_000448.3__HNF4A(39-474)(S87A_K106R_K108R_K126R_ K127R_S142A_S143A_S148A_T166A_S167A_S313A_S378A_T429A_T432A _S436A_K458R_S461E)
  source 1..1586: mol_type = other RNA
aggagagtcccgcagtcggcgtccagcggctctgcttgttcgtgtgtgtgtcgttgcaggccttattcaagcttaccatggacacctcaccatccgaaggcacaaacctcaacgccccgaactccctaggagtctcagccctctgcgccatatgcggcgaccgagccacaggcaaacactacggcgcctcatcgtgcgacggatgcaaaggattcttccgacgagctgtccgcaaaaaccacatgtactcctgccgcttctcccgccaatgcgtcgttgaccgcgaccggcgcaaccaatgcagatactgccgactcaagaaatgcttccgcgcaggcatgcgacgagaagccgtccaaaacgaacgcgaccgcatctcaaccagacgcgccgcctacgaagactctgcactccccagcatcaacgccctcctgcaagccgaagtattatcccgacagatcgccgcccccgtatccggcatcaacggcgacatccgcgccaagaaaatcgcctccatcgcagatgtctgcgaaagcatgaaagaacaattactcgtactcgtcgaatgggcaaaatacatccccgcattctgcgaactccccctcgacgaccaagtcgccctattacgcgcccacgcaggagaacaccttctcttaggcgcaacgaaacgcagcatggtcttcaaagacgtcctactcctcggcaacgactacatcgtcccccgtcactgccccgaactcgccgaaatgtcccgcgtatccatccgcatcctcgacgaactcgtcctaccattccaagaactccaaatcgacgacaacgaatacgcctacctcaaagcaatcatcttcttcgaccccgacgcaaaaggactatccgaccccggcaaaatcaaacgcctccgcgcacaagtccaagtctccctcgaagactacataaacgacagacaatacgacagccgaggcagattcggagaacttctcctcctcctccccacactacaatccatcacatggcaaatgatcgaacaaatacaattcatcaaactcttcggcatggcaaaaatcgacaacctgctccaagaaatgctacttggcggagcccccagcgacgccccacacgcacaccaccccctccacccccacctcatgcaagagcacatgggcaccaacgtcatcgtagccaacacaatgcccacacacctctccaacggccaaatgtgcgaatggccccgtccccgcggccaagccgcagcccccgaagcaccacaacccgcacctccaggcggcagcggctctgaaccctacaaactcctccccggcgcagtcgccacaatcgtccgccccctagaggccataccccaacccacaattaccaaacaagaggtaatctaaggactagtccctgttcccagagcccacttttttttctttttttgaaataaaatagcctgtctttcagatctcaaaggctcttttcagagccaccaaaaaaaaaaaaaaaaaaaaaaaaaaaaaaaaaaaaaaaaaaaaaaaaaaaaaaaaaaaaaaaaaaaaaaaaaaaaaaaaaaaaaaaaaaaaaaaaaaaaa

SEQ ID NO: 4128 - RNA, 1586 nt, synthetic construct
  misc_feature 1..1586: note = mRNA a-1 (hSL-A100) (opt11) from Homo sapiens__NP_000448.3__HNF4A(39-474)(S87A_K106R_K108R_K126R_ K127R_S142A_S143A_S148E_T166A_S167E_S313A_S378E_T429E_T432E _S436E_K458R_S461E)
  source 1..1586: mol_type = other RNA
aggagagtcccgcagtcggcgtccagcggctctgcttgttcgtgtgtgtgtcgttgcaggccttattcaagcttaccatggacacaagccccagcgaagggaccaacctcaacgcgccaaacagcctaggcgtctcagccctatgtgccatctgcggagacagagccaccggcaaacactacggagcctcatcctgcgacggatgcaaaggcttcttccgacgcgccgtccgcaaaaaccacatgtactcctgccgtttctcccgacaatgcgtcgtagaccgcgaccgccgcaaccaatgccgctattgccgcctaaagaaatgcttccgcgccggcatgcgacgcgaagccgtccagaacgagcgcgaccgaatctccacacgtcgcgctgcctacgaagactctgaactcccctcgataaacgcactgctccaagccgaagttctatcacgccaaatagccgaacccgtcagcggcatcaacggcgacatccgcgccaagaaaatcgcatcaatcgcagatgtatgcgaatccatgaaagaacagctcctcgtcctcgtagaatgggctaaatacatccccgccttctgtgagctccccctcgacgaccaggtagccctgctaagagcccatgccggcgaacacctcctccttggcgccactaaacgatcaatggtattcaaagacgtcctcctactaggaaacgactacatagtccccagacactgccccgaacttgcagaaatgagccgagtctccatccgcatcttagacgaactcgtcctcccattccaagaactccagatcgacgacaacgaatacgcataccttaaagcaataatcttcttcgaccccgacgccaaaggactatcagaccccgggaaaattaaaagactccgagcacaagtccaagtctcactcgaagactacatcaacgatcgccaatacgactcacgcggacgatttggcgaactcctcctgttactccccaccctacaaagcatcacctggcaaatgatcgaacaaatccagttcataaaactcttcggaatggccaaaatcgacaacctgctccaagaaatgctcctcggcggcgaaccctccgacgcaccccacgcccaccaccccctccacccacacctaatgcaagaacacatgggaaccaacgtcatagtcgccaacaccatgccaacacacctctcgaacggccaaatgtgcgaatggccccgaccacgcggccaagccgctgaacccgaagaaccccaacccgaacccccaggaggctccggctccgaaccctacaaactcctccctggcgccgtcgcaaccatagtacgccccctagaagctatcccacaacccacaataaccaaacaagaagtcatctgaggactagtccctgttcccagagcccacttttttttctttttttgaaataaaatagcctgtctttcagatctcaaaggctcttttcagagccaccaaaaaaaaaaaaaaaaaaaaaaaaaaaaaaaaaaaaaaaaaaaaaaaaaaaaaaaaaaaaaaaaaaaaaaaaaaaaaaaaaaaaaaaaaaaaaaaaaaaaa

SEQ ID NO: 4129 - RNA, 1586 nt, synthetic construct
  misc_feature 1..1586: note = mRNA a-1 (hSL-A100) (opt11) from Homo sapiens__NP_000448.3__HNF4A(39-474)(S87A_K106R_K108R_K126R_ K127R_S142A_S143A_S148A_T166A_S167A_K179R_K180R_S313A_S378A _T429A_T432A_S436A_K458R_S461E)
  source 1..1586: mol_type = other RNA
aggagagtcccgcagtcggcgtccagcggctctgcttgttcgtgtgtgtgtcgttgcaggccttattcaagcttaccatggacacatccccctcagaaggaaccaacctcaacgcacccaactccctcggagtttccgccctatgcgcaatctgcggcgatcgagccaccggcaaacactacggcgcctcgtcttgcgacggctgcaaaggcttcttccgccgcgccgtcagaaaaaaccacatgtactcatgccggttctccagacaatgcgtcgtcgaccgagaccgccgaaaccaatgcaggtactgccgcctgaaaaaatgcttccgcgcaggcatgcgccgcgaagccgtccaaaacgagcgagaccgaatctcaacgcgacgcgccgcctacgaagactcagccctcccatccatcaacgcactactacaagccgaagtactatcccgacaaatagccgcaccagtctcaggaatcaacggagacatacgcgccagacgaatagcctccattgccgacgtatgcgaaagcatgaaagaacaactactcgttctcgtcgagtgggccaaatacattcccgctttctgcgaattacccctagacgaccaagtcgccctcctcagagcccacgcaggcgaacacctcctactcggagccaccaaacgatccatggtcttcaaagacgtcttactcctcggcaacgactacatcgtccccagacactgtcccgaactcgccgaaatgtcccgcgtctccatccgaatcctcgacgaactcgtactccccttccaggaactccaaatcgacgacaacgaatacgcctacctaaaagccatcatttttttcgaccctgatgccaaaggcctctctgaccccggcaaaatcaaacgactacgcgcccaagtccaagtctcactcgaagactacatcaacgatcgccagtacgactcccgaggccgcttcggtgaactcctcctcctcctgcccaccctacaatcaataacttggcaaatgatcgaacaaatacaattcatcaaactcttcggcatggccaaaattgacaacctcctacaagaaatgcttctcggcggagcacccagcgatgccccacacgcccaccaccccctccacccacacctcatgcaagaacacatgggcaccaacgtaatcgtcgccaacacaatgcccacacacctctccaacggacaaatgtgcgaatggccccgcccccgaggccaagcagccgccccagaagcaccccaacccgccccacccggaggctcaggctctgaaccctacaaactcctcccaggagcagtcgcaaccatcgtccggcccctcgaagcaatcccccaacccacaatcacaaaacaagaggtaatctagggactagtccctgttcccagagcccacttttttttctttttttgaaataaaatagcctgtctttcagatctcaaaggctcttttcagagccaccaaaaaaaaaaaaaaaaaaaaaaaaaaaaaaaaaaaaaaaaaaaaaaaaaaaaaaaaaaaaaaaaaaaaaaaaaaaaaaaaaaaaaaaaaaaaaaaaaaaaa

SEQ ID NO: 4130 - RNA, 1586 nt, synthetic construct
  misc_feature 1..1586: note = mRNA a-1 (hSL-A100) (opt11) from Homo sapiens__NP_000448.3__HNF4A(39-474)(S87A_K106R_K108R_K126R_ K127R_S142A_S143A_S148A_T166A_S167A_K300R_K307R_K309R_S313A _S378A_T429A_T432A_S436A_K458R_S461E)
  source 1..1586: mol_type = other RNA
aggagagtcccgcagtcggcgtccagcggctctgcttgttcgtgtgtgtgtcgttgcaggccttattcaagcttaccatggacacatccccatcagaagggaccaacctaaacgcccccaactccctcggcgtctccgcactctgcgcaatctgcggcgacagagccaccggaaaacactacggcgcctcctcatgcgacggatgcaaaggattcttccgaagagccgtccgaaaaaaccacatgtactcatgccgattctcgcgccaatgcgtcgtcgatcgcgacagacgcaaccaatgccgatactgcagacttaaaaaatgcttccgtgctggcatgcgacgcgaagctgtccaaaatgagcgcgaccgcatatctacccgaagagccgcctacgaagactcagcactaccctcaatcaacgccctactccaggccgaagtcctatcccgacaaatcgcagcccccgtgtccggcataaacggtgacatccgcgccaaaaaaatcgcctcaatagccgacgtctgtgaaagcatgaaagaacaactactagttctcgtcgaatgggcaaaatacatacccgcattctgcgaactcccactagacgaccaagtggccctcctccgagcccatgcaggagaacacctcctcctcggggccacaaaacgctccatggtgttcaaagacgtactactcctaggaaacgactacatcgtaccccgccactgccccgaactagctgaaatgtcacgcgtctcgatccgcatcctcgacgaactcgtcctaccattccaagaactgcaaatcgacgacaacgagtacgcgtacctaaaagcaataatattcttcgaccccgacgcccgcggcctctccgaccccggaagaatcaggcgactccgcgcccaagtccaagtaagcctcgaagactacatcaacgaccgccaatacgactcacgaggcagattcggcgaactactcctcctcctcccaacacttcaatcaatcacctggcaaatgatcgaacaaatccaattcatcaagctattcggcatggccaaaatcgacaacctcctacaagaaatgctactgggaggcgccccctccgacgccccccacgcccaccaccccctacatccacacctcatgcaggaacatatgggaaccaacgtcatcgtcgcaaacaccatgcccacccacctttccaacggccaaatgtgcgaatggccccgcccccgcggccaagcagccgcccccgaagccccccaacccgcaccacccggcggcagtggctcggaaccctacaaactcctccccggcgccgtagccaccatcgtccgaccactagaagcaataccacaacccaccataaccaaacaagaagtaatctaaggactagtccctgttcccagagcccacttttttttctttttttgaaataaaatagcctgtctttcagatctcaaaggctcttttcagagccaccaaaaaaaaaaaaaaaaaaaaaaaaaaaaaaaaaaaaaaaaaaaaaaaaaaaaaaaaaaaaaaaaaaaaaaaaaaaaaaaaaaaaaaaaaaaaaaaaaaaaa

SEQ ID NO: 4131 - RNA, 1586 nt, synthetic construct
  misc_feature 1..1586: note = mRNA a-1 (hSL-A100) (opt11) from Homo sapiens__NP_000448.3__HNF4A(39-474)(S87A_K106R_K108R_K126R_ K127R_S142A_S143A_S148A_T166A_S167A_S313A_S378A_T429A_T432A _S436A_K447R_K458R_S461E_K470R)
  source 1..1586: mol_type = other RNA
aggagagtcccgcagtcggcgtccagcggctctgcttgttcgtgtgtgtgtcgttgcaggccttattcaagcttaccatggacacatccccctccgaaggaacaaacctaaacgcccccaactccctcggtgtgtccgccttatgcgccatctgcggagaccgcgccacaggcaaacactacggcgcatcaagctgcgacggctgtaaaggattcttccgccgcgccgtgcgcaaaaaccacatgtactcatgccgcttctcccgccagtgcgtcgtcgaccgcgaccgccgcaaccaatgccgatactgccgcctcaagaaatgcttccgagccggcatgcgacgagaagcagtccaaaacgaacgcgatcgcatctccacaagacgcgcagcatatgaagactcggccctcccatcaatcaacgccctcctacaagccgaagtactatcccgccaaatcgccgcccccgtctccggcatcaacggcgacatacgcgctaagaaaatcgcctcaatagcagacgtctgcgaatcaatgaaagaacaactgctcgtactcgtggaatgggccaaatacatcccagcgttctgcgaactccccctcgacgaccaagtagcattactacgcgcccacgccggcgaacaccttctactaggagcaaccaaacgatccatggtcttcaaagacgtcctgctcctaggaaatgactacatcgtcccccgccattgccctgaactagcagaaatgtcgcgcgtctcaatccgaatcctcgacgaactcgttctaccattccaagaactacaaatcgacgacaacgaatacgcctaccttaaagcaataatcttcttcgacccagatgcaaaaggcctctccgaccccggcaaaatcaaacgcctacgagcacaagtccaagtctctctcgaagactacatcaacgaccgccaatacgactcacgtggccgcttcggcgaactcctcctcctcctacccacccttcaatcaatcacatggcaaatgatcgaacaaatacaattcataaaactattcggcatggccaaaatcgacaacctcctccaagaaatgctactcggcggtgccccgtccgacgcaccccacgcccaccaccccctccatccacacctcatgcaggaacacatgggaaccaacgtcatcgtcgccaacaccatgcccactcacctcagcaacggacaaatgtgcgaatggccaagaccgcgaggacaagccgccgcccccgaagccccacaacctgcacccccaggaggctccggatcagaaccttaccgcctcctccccggcgccgtcgccacaatcgtacgcccactcgaagccatcccccaaccaaccatcacccgccaagaagtcatctaaggactagtccctgttcccagagcccacttttttttctttttttgaaataaaatagcctgtctttcagatctcaaaggctcttttcagagccaccaaaaaaaaaaaaaaaaaaaaaaaaaaaaaaaaaaaaaaaaaaaaaaaaaaaaaaaaaaaaaaaaaaaaaaaaaaaaaaaaaaaaaaaaaaaaaaaaaaaaa

SEQ ID NO: 4132 - RNA, 1586 nt, synthetic construct
  misc_feature 1..1586: note = mRNA a-1 (hSL-A100) (opt11) from Homo sapiens__NP_000448.3__HNF4A(39-474)(S87A_K106R_K108R_K126R_ K127R_S142A_S143A_S148A_T166A_S167A_K179R_K180R_K234R_K300R _K307R_K309R_S313A_S378A_T429A_T432A_S436A_K447R_K458R_S461 E_K470R)
  source 1..1586: mol_type = other RNA
aggagagtcccgcagtcggcgtccagcggctctgcttgttcgtgtgtgtgtcgttgcaggccttattcaagcttaccatggacacctccccctcggaaggcaccaacctcaacgcccctaactcactcggcgtttccgctctctgcgccatctgcggagaccgagcgacaggaaaacactacggagcctcctcatgcgatggctgcaaaggcttcttccgccgcgcagtacgcaaaaaccacatgtactcatgcagattctcaagacaatgcgtcgtcgaccgcgaccgacgcaaccaatgccgatactgccgcctcaagaaatgcttccgcgccggcatgcgccgagaagcagtccaaaacgaacgcgacagaataagtactcgccgagccgcatacgaagacagcgccctaccatccatcaacgcactcctccaagccgaagtcctatcacgacaaatcgcagctcccgtttccggcatcaacggcgatatccgcgcaagacgaatagcaagcattgcagacgtctgcgaatcaatgaaagaacaactcctcgtcctcgtcgaatgggccaaatacatccccgcattctgcgaactccccctcgacgaccaagtcgccctactaagagcccacgccggcgaacacctcctcctaggcgctacccgacgctccatggtattcaaagacgtcctactcctaggtaacgactacatcgtaccccgccactgccccgaactcgcagaaatgagcagagtttcaatccgcatcctagacgagctagttctccccttccaagaacttcaaatcgacgataacgaatacgcctacctaaaagccatcatcttcttcgacccagacgcccgaggcctctccgacccaggacgaataagaagactacgcgcccaagtacaagtttccctcgaagattacatcaacgacagacagtacgactccagaggccgattcggtgaactcctcctgctactccccaccctccaaagcataacatggcaaatgatcgaacaaatccaattcatcaaactcttcggcatggccaaaatcgacaacctcctacaagaaatgctactgggcggtgcaccctccgacgccccacacgctcaccaccccctccacccccatcttatgcaagaacacatgggaaccaatgtcatcgtcgcaaacacaatgcccacccacctaagcaacggccaaatgtgcgaatggcccagaccacgcggccaagcagccgcccccgaagccccacaaccagcccctcccggaggatcaggatctgaaccctaccgactactccccggagccgtcgccaccatcgtccgccccctcgaagcaataccacaaccgaccataacgcgccaagaagtcatctaaggactagtccctgttcccagagcccacttttttttctttttttgaaataaaatagcctgtctttcagatctcaaaggctcttttcagagccaccaaaaaaaaaaaaaaaaaaaaaaaaaaaaaaaaaaaaaaaaaaaaaaaaaaaaaaaaaaaaaaaaaaaaaaaaaaaaaaaaaaaaaaaaaaaaaaaaaaaaa

SEQ ID NO: 4133 - RNA, 1586 nt, synthetic construct
  misc_feature 1..1586: note = mRNA a-1 (hSL-A100) (opt11) from Homo sapiens__NP_000448.3__HNF4A(39-474)(S87A_S95A_S99A_K106R_K1 08R_K126R_K127R_S142A_S143A_S148A_T166A_S167A_S313A_S378A_T 429A_T432A_S436A_K458R_S461E)
  source 1..1586: mol_type = other RNA
aggagagtcccgcagtcggcgtccagcggctctgcttgttcgtgtgtgtgtcgttgcaggccttattcaagcttaccatggatacctccccatccgaaggaaccaacctcaacgccccaaactcactaggcgtctccgccctctgcgccatctgcggcgaccgcgccaccggcaaacactacggcgcctcttcctgtgacggatgcaaaggctttttccggcgcgcagtccgcaaaaaccacatgtacgcctgccgtttcgcccgacagtgcgtagtcgaccgcgaccgtcgaaaccaatgcagatactgccgactaaagaaatgcttccgcgccggcatgcgcagagaagcagtacaaaacgaacgagaccgcatctcaacccgccgtgcggcatatgaagactcggccctaccatccatcaacgccctgctccaagccgaagtattatcccgccaaatcgcagcccccgttagtggaatcaacggcgacatccgagccaagaaaatcgcctccatagccgacgtctgcgagagcatgaaagaacaactcctcgtactcgtagaatgggcaaaatacatacccgccttctgcgaactccccctagacgaccaagtagccctactccgagcccacgccggtgaacatctactcctcggagccaccaaaagatccatggtattcaaagacgtcctcctcctaggcaacgactacatcgtcccccgccactgccccgaactcgccgaaatgtcccgcgtctcaatccgcatactggacgagctcgtactccccttccaagaactacaaatcgacgacaacgaatacgcttacctaaaagcaatcatcttcttcgacccagacgcgaaaggcctatcagatcccggcaaaatcaaacgcctacgcgcacaagtacaagtatcccttgaagactacataaacgaccgacaatacgacagccggggccgtttcggagaacttctcctcctcctacccacactccaatccattacctggcaaatgatagaacaaatccaattcatcaaactcttcggaatggccaagatcgacaacctcctccaagaaatgctactcggaggcgcccccagtgacgctccccacgcccatcaccccctccacccccacctaatgcaagaacacatgggcaccaacgtcatagtcgccaacaccatgccaacccacctctcaaacggccaaatgtgcgaatggcctcgccccagaggccaagcggccgcccccgaagccccacaacccgccccacccggcggctccggatcagaaccatacaaactcctacccggcgccgtagccactatcgtacgaccactcgaagccatcccacaacccacaatcaccaaacaagaagtcatctaaggactagtccctgttcccagagcccacttttttttctttttttgaaataaaatagcctgtctttcagatctcaaaggctcttttcagagccaccaaaaaaaaaaaaaaaaaaaaaaaaaaaaaaaaaaaaaaaaaaaaaaaaaaaaaaaaaaaaaaaaaaaaaaaaaaaaaaaaaaaaaaaaaaaaaaaaaaaaa

SEQ ID NO: 4134 - RNA, 1586 nt, synthetic construct
  misc_feature 1..1586: note = mRNA a-1 (hSL-A100) (opt11) from Homo sapiens__NP_000448.3__HNF4A(39-474)(S87A_K106R_K108R_K126R_ K127R_S138A_T139A_S142A_S143A_S148A_T166A_S167A_S313A_S378A _T429A_T432A_S436A_K458R_S461E)
  source 1..1586: mol_type = other RNA
aggagagtcccgcagtcggcgtccagcggctctgcttgttcgtgtgtgtgtcgttgcaggccttattcaagcttaccatggacacctctccttccgaaggcaccaacctcaacgccccaaactccctcggcgtctccgccttgtgcgccatctgcggcgaccgagccacaggaaaacactacggagcctcctcctgcgatggctgcaaaggcttcttccgccgcgcagtaagaaaaaaccacatgtactcatgccgcttctcccgccagtgcgtcgtagaccgcgaccgccgcaaccaatgccgctactgccgcctcaaaaaatgcttccgagccggaatgcgaagagaagccgtccaaaacgaacgcgaccgcatcgccgcccgacgggccgcatacgaggatagcgccctcccaagcatcaatgctcttctccaagccgaggtcctttcccgtcaaatcgcagcccccgtatccggaatcaacggagacatacgcgccaaaaaaatcgcaagcatcgccgacgtctgcgaaagcatgaaagaacaactcctcgtactcgtcgaatgggccaaatacataccagccttctgcgaactacccctcgacgatcaagtagccctcctacgagcccacgccggagaacacctcctacttggcgccacaaaacgaagcatggttttcaaggacgtcctcctcctcggcaacgactacatagtaccccgccactgccccgaactagcagaaatgtcccgggtatcgatccgcatactagacgaactagtcctcccctttcaagaactccaaatcgatgacaacgaatacgcttacctgaaagcaataatcttcttcgaccctgacgccaaaggcctctccgacccaggaaaaataaaacgcctccgcgcccaagtacaagtctccctagaagactacataaacgaccgacaatacgactcccgaggacgattcggcgaactactattattactacctacactacaatccatcacctggcaaatgatcgaacaaatccaattcatcaaactattcggcatggccaaaatcgacaacctactccaagaaatgctcctaggcggcgcccccagcgacgccccacacgcccaccaccccctccacccccacctaatgcaagaacacatgggcacaaacgtcatagtagccaacaccatgcccacccacctcagcaacggccaaatgtgcgagtggccccgaccacgcggccaagccgcagcccctgaagccccccaacctgccccccccggcggctccggctccgaaccatacaaactactccccggggccgtcgccacaatcgtcagacccctcgaagcaatcccccaacctacaatcaccaaacaagaagtaatttaaggactagtccctgttcccagagcccacttttttttctttttttgaaataaaatagcctgtctttcagatctcaaaggctcttttcagagccaccaaaaaaaaaaaaaaaaaaaaaaaaaaaaaaaaaaaaaaaaaaaaaaaaaaaaaaaaaaaaaaaaaaaaaaaaaaaaaaaaaaaaaaaaaaaaaaaaaaaaa

SEQ ID NO: 4135 - RNA, 1586 nt, synthetic construct
  misc_feature 1..1586: note = mRNA a-1 (hSL-A100) (opt11) from Homo sapiens__NP_000448.3__HNF4A(39-474)(S87A_S95A_S99A_K106R_K1 08R_K126R_K127R_S138A_T139A_S142A_S143A_S148A_T166A_S167A_S 313A_S378A_T429A_T432A_S436A_K458R_S461E)
  source 1..1586: mol_type = other RNA
aggagagtcccgcagtcggcgtccagcggctctgcttgttcgtgtgtgtgtcgttgcaggccttattcaagcttaccatggacacctcccccagcgaaggcaccaacctaaacgcccctaactcactcggagtgtccgcactatgcgcaatctgcggggaccgcgccaccggcaaacactacggcgcctccagctgcgacggctgcaaaggcttcttccgccgagccgtccgcaagaaccacatgtacgcctgccgcttcgctcgccaatgcgtcgtagaccgagaccgcagaaaccaatgcagatactgcagactcaagaaatgcttccgcgccggcatgcgacgcgaagccgtacaaaacgaacgcgaccgcatcgccgctcgtcgagcagcctatgaagactcagcccttccctcaataaacgcactactccaagccgaagtcctcagccgacaaatcgccgccccagtctcaggcatcaacggcgacatccgcgccaagaaaatagcctccatcgcggacgtctgcgagtccatgaaagaacaactcctagttctggtcgaatgggctaaatacatccccgcattctgcgaactcccactcgacgaccaagtagccctactccgagcccacgcaggagaacacctactcctaggagccacaaaacgttccatggtatttaaagacgtcctcctactaggcaacgactacatcgtcccccgccactgccccgaactcgccgaaatgtcccgcgtctccatccgcatcctagacgagctcgtactcccattccaagaactccaaatagacgacaacgaatacgcctacctaaaagccatcatcttcttcgatccagacgcaaaaggcctctcagacccaggcaaaatcaaaagacttagagcccaagtccaagtatcactcgaagactacatcaacgaccgacaatacgactcccgcggaaggttcggcgaactcctcctcctcctccccacactacaatccatcacctggcaaatgatagaacaaattcaattcataaaactattcggcatggccaagatagacaacctcctccaagaaatgctcctcggcggagccccctccgacgcaccccacgcccaccaccccctacacccccacctgatgcaagaacacatgggaacaaacgtaatcgtagccaacaccatgccgacacatctctctaacggccaaatgtgcgaatggccacgcccacgcggccaagccgcagcccccgaagcaccacaaccagccccacccggaggctccggatccgaaccctacaagttgctccccggcgccgtagccacaatcgtccgccccctagaggccataccacaacccacaatcacaaaacaagaagtcatataaggactagtccctgttcccagagcccacttttttttctttttttgaaataaaatagcctgtctttcagatctcaaaggctcttttcagagccaccaaaaaaaaaaaaaaaaaaaaaaaaaaaaaaaaaaaaaaaaaaaaaaaaaaaaaaaaaaaaaaaaaaaaaaaaaaaaaaaaaaaaaaaaaaaaaaaaaaaaa

SEQ ID NO: 4136 - RNA, 1586 nt, synthetic construct
  misc_feature 1..1586: note = mRNA a-1 (hSL-A100) (opt28) from Homo sapiens__NP_000448.3__HNF4A(39-474)
  source 1..1586: mol_type = other RNA
aggagagtcccgcagtcggcgtccagcggctctgcttgttcgtgtgtgtgtcgttgcaggccttattcaagcttaccatggacacatctcccagtgagggcactaacctgaatgcccctaactcactgggggtgagcgctctgtgcgcaatctgcggagacagggccaccggcaaacactacggggcttcctcttgtgatggatgcaagggctttttcagacgcagcgtccggaaaaatcatatgtacagttgccgattttcaaggcagtgcgtggtggacaaggacaagagaaaccagtgccgctattgtcggctgaaaaagtgcttcagggcaggaatgaaaaaggaagccgtccagaatgagagagatcgaatttccacacggcgcagctcttacgaagacagctccctgccaagtatcaacgctctgctgcaggcagaggtgctgtcaaggcagatcactagccccgtgtctgggattaacggcgatatcagagccaagaaaattgcttccatcgcagacgtctgcgaaagcatgaaggagcagctgctggtgctggtggagtgggccaaatacatccctgcattttgcgaactgccactggacgatcaggtcgctctgctgcgggcccacgcaggagagcatctgctgctgggcgctaccaagcgaagtatggtgttcaaggacgtgctgctgctggggaatgactatattgtccccaggcactgccctgaactggccgagatgtcaagagtgtctatccgcatcctggatgaactggtgctgccattccaggagctgcagattgacgataacgaatacgcatacctgaaagctatcatctttttcgaccccgacgccaagggactgtccgatcctggcaaaattaagcggctgaggagccaggtccaggtgagtctggaggactatatcaatgacagacagtacgatagccgagggcggtttggagaactgctgctgctgctgccaacactgcagtccattacctggcagatgatcgagcagatccagttcattaaactgttcggcatggcaaagatcgacaacctgctgcaggagatgctgctgggagggtcaccctctgatgcccctcatgctcaccacccactgcatccccacctgatgcaggaacatatgggcactaatgtgatcgtcgcaaacacaatgcctacccacctgagcaatggacagatgtgtgagtggccacgccccaggggccaggccgcaactcctgaaaccccacagccctcccctccagggggatctggcagcgagccctacaagctgctgcctggagctgtggccacaattgtgaaaccactgagtgcaatcccccagcctaccattactaagcaggaagtcatctgaggactagtccctgttcccagagcccacttttttttctttttttgaaataaaatagcctgtctttcagatctcaaaggctcttttcagagccaccaaaaaaaaaaaaaaaaaaaaaaaaaaaaaaaaaaaaaaaaaaaaaaaaaaaaaaaaaaaaaaaaaaaaaaaaaaaaaaaaaaaaaaaaaaaaaaaaaaaaa

SEQ ID NO: 4137 - RNA, 1586 nt, synthetic construct
  misc_feature 1..1586: note = mRNA a-1 (hSL-A100) (opt28) from Homo sapiens__NP_000448.3__HNF4A(39-474)(S313A)
  source 1..1586: mol_type = other RNA
aggagagtcccgcagtcggcgtccagcggctctgcttgttcgtgtgtgtgtcgttgcaggccttattcaagcttaccatggacacatctccctcagagggcactaacctgaatgcccctaacagtctgggggtgagcgctctgtgcgcaatctgcggagacagggccaccggcaaacactacggggcttcctcttgtgatggatgcaagggctttttcagacgcagcgtccggaaaaatcatatgtactcatgccgatttagtaggcagtgcgtggtggacaaggacaagagaaaccagtgccgctattgtcggctgaaaaagtgcttcagggcaggaatgaaaaaggaagccgtccagaatgagagagatcgaatttccacacggcgcagctcttacgaagacagctccctgccatcaatcaacgctctgctgcaggcagaggtgctgagtaggcagatcactagccccgtgtctgggattaacggcgatatcagagccaagaaaattgcatccatcgctgacgtctgcgaaagcatgaaggagcagctgctggtgctggtggagtgggccaaatacatccctgcattttgcgaactgccactggacgatcaggtcgctctgctgcgggcccacgcaggagagcatctgctgctgggcgctaccaagcgatcaatggtgttcaaggacgtgctgctgctggggaatgactatattgtccccaggcactgccctgaactggccgagatgagtagagtgtctatccgcatcctggatgaactggtgctgccattccaggagctgcagattgacgataacgaatacgcatacctgaaagctatcatctttttcgaccccgacgccaagggactgtccgatcctggcaaaattaagcggctgagggcacaggtccaggtgagcctggaggactatatcaatgacagacagtacgatagccgagggcggtttggagaactgctgctgctgctgccaacactgcagtccattacctggcagatgatcgagcagatccagttcattaaactgttcggcatggccaagatcgacaacctgctgcaggagatgctgctgggagggtcaccctctgatgctcctcatgcacaccacccactgcatccccacctgatgcaggaacatatgggcactaatgtgatcgtcgccaacacaatgcctacccacctgagtaatggacagatgtgtgagtggccacgccccaggggccaggcagctactcctgaaaccccacagcccagccctccagggggatccggctctgagccctacaagctgctgcctggagcagtggccacaattgtgaaaccactgagcgctatcccccagcctaccattactaagcaggaagtcatctgaggactagtccctgttcccagagcccacttttttttctttttttgaaataaaatagcctgtctttcagatctcaaaggctcttttcagagccaccaaaaaaaaaaaaaaaaaaaaaaaaaaaaaaaaaaaaaaaaaaaaaaaaaaaaaaaaaaaaaaaaaaaaaaaaaaaaaaaaaaaaaaaaaaaaaaaaaaaaa

SEQ ID NO: 4138 - RNA, 1586 nt, synthetic construct
  misc_feature 1..1586: note = mRNA a-1 (hSL-A100) (opt28) from Homo sapiens__NP_000448.3__HNF4A(39-474)(S313E)
  source 1..1586: mol_type = other RNA
aggagagtcccgcagtcggcgtccagcggctctgcttgttcgtgtgtgtgtcgttgcaggccttattcaagcttaccatggacacatctccctcagagggcactaacctgaatgcccctaacagtctgggggtgagcgctctgtgcgcaatctgcggagacagggccaccggcaaacactacggggcttcctcttgtgatggatgcaagggctttttcagacgcagcgtccggaaaaatcatatgtactcatgccgatttagtaggcagtgcgtggtggacaaggacaagagaaaccagtgccgctattgtcggctgaaaaagtgcttcagggcaggaatgaaaaaggaagccgtccagaatgagagagatcgaatttccacacggcgcagctcttacgaagacagctccctgccatcaatcaacgctctgctgcaggcagaggtgctgagtaggcagatcactagccccgtgtctgggattaacggcgatatcagagccaagaaaattgcatccatcgctgacgtctgcgaaagcatgaaggagcagctgctggtgctggtggagtgggccaaatacatccctgcattttgcgaactgccactggacgatcaggtcgctctgctgcgggcccacgcaggagagcatctgctgctgggcgctaccaagcgatcaatggtgttcaaggacgtgctgctgctggggaatgactatattgtccccaggcactgccctgaactggccgagatgagtagagtgtctatccgcatcctggatgaactggtgctgccattccaggagctgcagattgacgataacgaatacgcatacctgaaagctatcatctttttcgaccccgacgccaagggactgtccgatcctggcaaaattaagcggctgagggagcaggtccaggtgagcctggaagactatatcaatgacagacagtacgatagccgagggcggtttggagagctgctgctgctgctgccaacactgcagtccattacctggcagatgatcgagcagatccagttcattaaactgttcggcatggcaaagatcgacaacctgctgcaggaaatgctgctgggagggtcaccctctgatgcccctcatgctcaccacccactgcatccccacctgatgcaggagcatatgggcactaatgtgatcgtcgcaaacacaatgcctacccacctgagtaatggacagatgtgtgaatggccacgccccaggggccaggccgcaactcctgagaccccacagcccagccctccagggggatccggctctgaaccctacaagctgctgcctggagctgtggcaacaattgtgaaaccactgagcgccatcccccagcctaccattactaagcaggaggtcatctgaggactagtccctgttcccagagcccacttttttttctttttttgaaataaaatagcctgtctttcagatctcaaaggctcttttcagagccaccaaaaaaaaaaaaaaaaaaaaaaaaaaaaaaaaaaaaaaaaaaaaaaaaaaaaaaaaaaaaaaaaaaaaaaaaaaaaaaaaaaaaaaaaaaaaaaaaaaaaa

SEQ ID NO: 4139 - RNA, 1586 nt, synthetic construct
  misc_feature 1..1586: note = mRNA a-1 (hSL-A100) (opt28) from Homo sapiens__NP_000448.3__HNF4A(39-474)(S142A_S143A)
  source 1..1586: mol_type = other RNA
aggagagtcccgcagtcggcgtccagcggctctgcttgttcgtgtgtgtgtcgttgcaggccttattcaagcttaccatggacacatctccctcagagggcactaacctgaatgcccctaacagtctgggggtgagcgctctgtgcgcaatctgcggagacagggccaccggcaaacactacggggcttcctcttgtgatggatgcaagggctttttcagacgcagcgtccggaaaaatcatatgtactcatgccgatttagtaggcagtgcgtggtggacaaggacaagagaaaccagtgccgctattgtcggctgaaaaagtgcttcagggcaggaatgaaaaaggaagccgtccagaatgagagagatcgaatttccacacggcgcgctgcatacgaagacagctctctgccaagcatcaacgccctgctgcaggcagaggtgctgtccaggcagatcacttcacccgtgagtgggattaacggcgatatcagagctaagaaaattgccagcatcgcagacgtctgcgaatctatgaaggagcagctgctggtgctggtggagtgggctaaatacatccctgccttttgcgaactgccactggacgatcaggtcgcactgctgcgggctcacgccggagagcatctgctgctgggcgcaaccaagcgatccatggtgttcaaggacgtgctgctgctggggaatgactatattgtccccaggcactgccctgaactggctgagatgagcagagtgtcaatccgcatcctggatgaactggtgctgccattccaggagctgcagattgacgataacgaatacgcctacctgaaagcaatcatctttttcgaccccgacgccaagggactgagtgatcctggcaaaattaagcggctgaggtctcaggtccaggtgtccctggaggactatatcaatgacagacagtacgatagccgagggcggtttggagaactgctgctgctgctgccaacactgcagagcattacctggcagatgatcgagcagatccagttcattaaactgttcggcatggctaagatcgacaacctgctgcaggagatgctgctgggagggtccccctcagatgcacctcatgcccaccacccactgcatccccacctgatgcaggaacatatgggcactaatgtgatcgtcgcaaacacaatgcctacccacctgtctaatggacagatgtgtgagtggccacgccccaggggccaggctgcaactcctgaaaccccacagcccagtcctccagggggaagcggctccgagccctacaagctgctgcctggagccgtggctacaattgtgaaaccactgtctgcaatcccccagcctaccattactaagcaggaagtcatctgaggactagtccctgttcccagagcccacttttttttctttttttgaaataaaatagcctgtctttcagatctcaaaggctcttttcagagccaccaaaaaaaaaaaaaaaaaaaaaaaaaaaaaaaaaaaaaaaaaaaaaaaaaaaaaaaaaaaaaaaaaaaaaaaaaaaaaaaaaaaaaaaaaaaaaaaaaaaaa

SEQ ID NO: 4140 - RNA, 1586 nt, synthetic construct
  misc_feature 1..1586: note = mRNA a-1 (hSL-A100) (opt28) from Homo sapiens__NP_000448.3__HNF4A(39-474)(S142E_S143E)
  source 1..1586: mol_type = other RNA
aggagagtcccgcagtcggcgtccagcggctctgcttgttcgtgtgtgtgtcgttgcaggccttattcaagcttaccatggacacatctccctcagagggcactaacctgaatgcccctaacagtctgggggtgagcgctctgtgcgcaatctgcggagacagggccaccggcaaacactacggggcttcctcttgtgatggatgcaagggctttttcagacgcagcgtccggaaaaatcatatgtactcatgccgatttagtaggcagtgcgtggtggacaaggacaagagaaaccagtgccgctattgtcggctgaaaaagtgcttcagggcaggaatgaaaaaggaagccgtccagaatgagagagatcgaatttccacacggcgcgaagagtacgaagacagctctctgccaagcatcaacgctctgctgcaggcagaggtgctgtccaggcagatcacttcacccgtgagtgggattaacggcgatatcagagccaagaaaattgcaagcatcgctgacgtctgcgagtctatgaaggaacagctgctggtgctggtggagtgggccaaatacatccctgcattttgcgaactgccactggacgatcaggtcgctctgctgcgggcccacgcaggagagcatctgctgctgggcgctaccaagcgatccatggtgttcaaggacgtgctgctgctggggaatgactatattgtccccaggcactgccctgaactggccgagatgagcagagtgtcaatccgcatcctggatgaactggtgctgccattccaggagctgcagattgacgataacgaatacgcatacctgaaagctatcatctttttcgaccccgacgccaagggactgagtgatcctggcaaaattaagcggctgaggtctcaggtccaggtgtccctggaggactatatcaatgacagacagtacgatagccgagggcggtttggagagctgctgctgctgctgccaacactgcagagcattacctggcagatgatcgaacagatccagttcattaaactgttcggcatggcaaagatcgacaacctgctgcaggagatgctgctgggagggtccccctcagatgcccctcatgctcaccacccactgcatccccacctgatgcaggaacatatgggcactaatgtgatcgtcgcaaacacaatgcctacccacctgtctaatggacagatgtgtgagtggccacgccccaggggccaggccgcaactcctgaaaccccacagcccagtcctccagggggaagcggctccgagccctacaagctgctgcctggagctgtggcaacaattgtgaaaccactgtctgccatcccccagcctaccattactaagcaggaagtcatctgaggactagtccctgttcccagagcccacttttttttctttttttgaaataaaatagcctgtctttcagatctcaaaggctcttttcagagccaccaaaaaaaaaaaaaaaaaaaaaaaaaaaaaaaaaaaaaaaaaaaaaaaaaaaaaaaaaaaaaaaaaaaaaaaaaaaaaaaaaaaaaaaaaaaaaaaaaaaaa

SEQ ID NO: 4141 - RNA, 1586 nt, synthetic construct
  misc_feature 1..1586: note = mRNA a-1 (hSL-A100) (opt28) from Homo sapiens__NP_000448.3__HNF4A(39-474)(S143A)
  source 1..1586: mol_type = other RNA
aggagagtcccgcagtcggcgtccagcggctctgcttgttcgtgtgtgtgtcgttgcaggccttattcaagcttaccatggacacatctccctcagagggcactaacctgaatgcccctaacagtctgggggtgagcgctctgtgcgcaatctgcggagacagggccaccggcaaacactacggggcttcctcttgtgatggatgcaagggctttttcagacgcagcgtccggaaaaatcatatgtactcatgccgatttagtaggcagtgcgtggtggacaaggacaagagaaaccagtgccgctattgtcggctgaaaaagtgcttcagggcaggaatgaaaaaggaagccgtccagaatgagagagatcgaatttccacacggcgcagcgcttacgaagactctagcctgccatccatcaacgcactgctgcaggccgaggtgctgtcaaggcagatcaccagtcccgtgagcgggattaacggcgatatcagagcaaagaaaattgcttctatcgccgacgtctgcgaatccatgaaggagcagctgctggtgctggtggagtgggcaaaatacatccctgctttttgcgaactgccactggacgatcaggtcgccctgctgcgggcacacgctggagagcatctgctgctgggcgccactaagcgaagcatggtgttcaaggacgtgctgctgctggggaatgactatattgtccccaggcactgccctgaactggcagagatgtcaagagtgagtatccgcatcctggatgaactggtgctgccattccaggagctgcagattgacgataacgaatacgcttacctgaaagccatcatctttttcgaccccgacgcaaagggactgtctgatcctggcaaaattaagcggctgaggtcccaggtccaggtgagcctggaggactatatcaatgacagacagtacgatagccgagggcggtttggagaactgctgctgctgctgccaacactgcagtccattacctggcagatgatcgagcagatccagttcattaaactgttcggcatggccaagatcgacaacctgctgcaggagatgctgctgggagggtcaccctctgatgctcctcatgcacaccacccactgcatccccacctgatgcaggaacatatgggcactaatgtgatcgtcgccaacacaatgcctacccacctgagtaatggacagatgtgtgagtggccacgccccaggggccaggcagctactcctgaaaccccacagcccagccctccagggggatccggctctgagccctacaagctgctgcctggagcagtggccacaattgtgaaaccactgagcgctatcccccagcctaccattactaagcaggaagtcatctgaggactagtccctgttcccagagcccacttttttttctttttttgaaataaaatagcctgtctttcagatctcaaaggctcttttcagagccaccaaaaaaaaaaaaaaaaaaaaaaaaaaaaaaaaaaaaaaaaaaaaaaaaaaaaaaaaaaaaaaaaaaaaaaaaaaaaaaaaaaaaaaaaaaaaaaaaaaaaa

SEQ ID NO: 4142 - RNA, 1586 nt, synthetic construct
  misc_feature 1..1586: note = mRNA a-1 (hSL-A100) (opt28) from Homo sapiens__NP_000448.3__HNF4A(39-474)(T166A)
  source 1..1586: mol_type = other RNA
aggagagtcccgcagtcggcgtccagcggctctgcttgttcgtgtgtgtgtcgttgcaggccttattcaagcttaccatggacacatctccctcagagggcactaacctgaatgcccctaacagtctgggggtgagcgctctgtgcgcaatctgcggagacagggccaccggcaaacactacggggcttcctcttgtgatggatgcaagggctttttcagacgcagcgtccggaaaaatcatatgtactcatgccgatttagtaggcagtgcgtggtggacaaggacaagagaaaccagtgccgctattgtcggctgaaaaagtgcttcagggcaggaatgaaaaaggaagccgtccagaatgagagagatcgaatttccacacggcgcagctcttacgaagacagctccctgccatcaatcaacgctctgctgcaggcagaggtgctgagtaggcagatcgccagccccgtgtctgggattaacggcgatatcagagcaaagaaaattgcttccatcgccgacgtctgcgaaagcatgaaggagcagctgctggtgctggtggagtgggcaaaatacatccctgctttttgcgaactgccactggacgatcaggtcgccctgctgcgggcacacgctggagagcatctgctgctgggcgccactaagcgatcaatggtgttcaaggacgtgctgctgctggggaatgactatattgtccccaggcactgccctgaactggcagagatgagtagagtgtctatccgcatcctggatgaactggtgctgccattccaggagctgcagattgacgataacgaatacgcttacctgaaagccatcatctttttcgaccccgacgcaaagggactgtccgatcctggcaaaattaagcggctgaggagccaggtccaggtgagcctggaggactatatcaatgacagacagtacgattcccgagggcggtttggagaactgctgctgctgctgccaaccctgcagtcaattacatggcagatgatcgagcagatccagttcattaaactgttcggcatggccaagatcgacaacctgctgcaggagatgctgctgggagggtctcccagtgatgctcctcatgcacaccacccactgcatccccacctgatgcaggaacatatgggcaccaatgtgatcgtcgccaacactatgcctacacacctgagcaatggacagatgtgtgagtggccacgccccaggggccaggcagctacccctgaaactccacagccctcccctccagggggatctggcagcgagccctacaagctgctgcctggagcagtggccaccattgtgaaaccactgtcagctatcccccagcctacaattaccaagcaggaagtcatctgaggactagtccctgttcccagagcccacttttttttctttttttgaaataaaatagcctgtctttcagatctcaaaggctcttttcagagccaccaaaaaaaaaaaaaaaaaaaaaaaaaaaaaaaaaaaaaaaaaaaaaaaaaaaaaaaaaaaaaaaaaaaaaaaaaaaaaaaaaaaaaaaaaaaaaaaaaaaaa

SEQ ID NO: 4143 - RNA, 1586 nt, synthetic construct
  misc_feature 1..1586: note = mRNA a-1 (hSL-A100) (opt28) from Homo sapiens__NP_000448.3__HNF4A(39-474)(S167E)
  source 1..1586: mol_type = other RNA
aggagagtcccgcagtcggcgtccagcggctctgcttgttcgtgtgtgtgtcgttgcaggccttattcaagcttaccatggacacatctccctcagagggcactaacctgaatgcccctaacagtctgggggtgagcgctctgtgcgcaatctgcggagacagggccaccggcaaacactacggggcttcctcttgtgatggatgcaagggctttttcagacgcagcgtccggaaaaatcatatgtactcatgccgatttagtaggcagtgcgtggtggacaaggacaagagaaaccagtgccgctattgtcggctgaaaaagtgcttcagggcaggaatgaaaaaggaagccgtccagaatgagagagatcgaatttccacacggcgcagctcttacgaagacagctccctgccatcaatcaacgctctgctgcaggcagaggtgctgagtaggcagatcactgaacccgtgagcgggattaacggcgatatcagagccaagaaaattgcatctatcgctgacgtctgcgagtccatgaaggagcagctgctggtgctggtggaatgggccaaatacatccctgcattttgcgagctgccactggacgatcaggtcgctctgctgcgggcccacgcaggagaacatctgctgctgggcgctaccaagcgaagcatggtgttcaaggacgtgctgctgctggggaatgactatattgtccccaggcactgccctgagctggccgaaatgtcaagagtgagtatccgcatcctggatgagctggtgctgccattccaggaactgcagattgacgataacgagtacgcatacctgaaagctatcatctttttcgaccccgacgccaagggactgtctgatcctggcaaaattaagcggctgaggtcccaggtccaggtgagcctggaagactatatcaatgacagacagtacgatagccgagggcggtttggagagctgctgctgctgctgccaacactgcagtccattacctggcagatgatcgagcagatccagttcattaaactgttcggcatggcaaagatcgacaacctgctgcaggaaatgctgctgggagggtcaccctctgatgcccctcatgctcaccacccactgcatccccacctgatgcaggagcatatgggcactaatgtgatcgtcgcaaacacaatgcctacccacctgagtaatggacagatgtgtgaatggccacgccccaggggccaggccgcaactcctgagaccccacagcccagccctccagggggatccggctctgaaccctacaagctgctgcctggagctgtggcaacaattgtgaaaccactgagcgccatcccccagcctaccattactaagcaggaggtcatctgaggactagtccctgttcccagagcccacttttttttctttttttgaaataaaatagcctgtctttcagatctcaaaggctcttttcagagccaccaaaaaaaaaaaaaaaaaaaaaaaaaaaaaaaaaaaaaaaaaaaaaaaaaaaaaaaaaaaaaaaaaaaaaaaaaaaaaaaaaaaaaaaaaaaaaaaaaaaaa

SEQ ID NO: 4144 - RNA, 1586 nt, synthetic construct
  misc_feature 1..1586: note = mRNA a-1 (hSL-A100) (opt28) from Homo sapiens__NP_000448.3__HNF4A(39-474)(S167A)
  source 1..1586: mol_type = other RNA
aggagagtcccgcagtcggcgtccagcggctctgcttgttcgtgtgtgtgtcgttgcaggccttattcaagcttaccatggacacatctccctcagagggcactaacctgaatgcccctaacagtctgggggtgagcgctctgtgcgcaatctgcggagacagggccaccggcaaacactacggggcttcctcttgtgatggatgcaagggctttttcagacgcagcgtccggaaaaatcatatgtactcatgccgatttagtaggcagtgcgtggtggacaaggacaagagaaaccagtgccgctattgtcggctgaaaaagtgcttcagggcaggaatgaaaaaggaagccgtccagaatgagagagatcgaatttccacacggcgcagctcttacgaagacagctccctgccatcaatcaacgctctgctgcaggcagaggtgctgagtaggcagatcactgcccccgtgagcgggattaacggcgatatcagagcaaagaaaattgcttctatcgccgacgtctgcgaatccatgaaggagcagctgctggtgctggtggagtgggcaaaatacatccctgctttttgcgaactgccactggacgatcaggtcgccctgctgcgggcacacgctggagagcatctgctgctgggcgccaccaagcgaagcatggtgttcaaggacgtgctgctgctggggaatgactatattgtccccaggcactgccctgaactggcagagatgtcaagagtgagtatccgcatcctggatgaactggtgctgccattccaggagctgcagattgacgataacgaatacgcttacctgaaagccatcatctttttcgaccccgacgcaaagggactgtctgatcctggcaaaattaagcggctgaggtcccaggtccaggtgagcctggaggactatatcaatgacagacagtacgatagccgagggcggtttggagaactgctgctgctgctgccaacactgcagtccattacctggcagatgatcgagcagatccagttcattaaactgttcggcatggccaagatcgacaacctgctgcaggagatgctgctgggagggtcaccctctgatgctcctcatgcacaccacccactgcatccccacctgatgcaggaacatatgggcactaatgtgatcgtcgccaacacaatgcctacccacctgagtaatggacagatgtgtgagtggccacgccccaggggccaggcagctactcctgaaaccccacagcccagccctccagggggatccggctctgagccctacaagctgctgcctggagcagtggccacaattgtgaaaccactgagcgctatcccccagcctaccattactaagcaggaagtcatctgaggactagtccctgttcccagagcccacttttttttctttttttgaaataaaatagcctgtctttcagatctcaaaggctcttttcagagccaccaaaaaaaaaaaaaaaaaaaaaaaaaaaaaaaaaaaaaaaaaaaaaaaaaaaaaaaaaaaaaaaaaaaaaaaaaaaaaaaaaaaaaaaaaaaaaaaaaaaaa

SEQ ID NO: 4145 - RNA, 1586 nt, synthetic construct
  misc_feature 1..1586: note = mRNA a-1 (hSL-A100) (opt28) from Homo sapiens__NP_000448.3__HNF4A(39-474)(S167A_S378A_T429A_T432A _S436A)
  source 1..1586: mol_type = other RNA
aggagagtcccgcagtcggcgtccagcggctctgcttgttcgtgtgtgtgtcgttgcaggccttattcaagcttaccatggacacatctccctcagagggcactaacctgaatgcccctaacagtctgggggtgagcgctctgtgcgcaatctgcggagacagggccaccggcaaacactacggggcttcctcttgtgatggatgcaagggctttttcagacgcagcgtccggaaaaatcatatgtactcatgccgatttagtaggcagtgcgtggtggacaaggacaagagaaaccagtgccgctattgtcggctgaaaaagtgcttcagggcaggaatgaaaaaggaagccgtccagaatgagagagatcgaatttccacacggcgcagctcttacgaagacagctccctgccatcaatcaacgctctgctgcaggcagaggtgctgagtaggcagatcactgcccccgtgagcgggattaacggcgatatcagagcaaagaaaattgcttctatcgccgacgtctgcgaatccatgaaggagcagctgctggtgctggtggagtgggcaaaatacatccctgctttttgcgaactgccactggacgatcaggtcgccctgctgcgggcacacgctggagagcatctgctgctgggcgccaccaagcgaagcatggtgttcaaggacgtgctgctgctggggaatgactatattgtccccaggcactgccctgaactggcagagatgtcaagagtgagtatccgcatcctggatgaactggtgctgccattccaggagctgcagattgacgataacgaatacgcttacctgaaagccatcatctttttcgaccccgacgcaaagggactgtctgatcctggcaaaattaagcggctgaggtcccaggtccaggtgagcctggaggactatatcaatgacagacagtacgatagccgagggcggtttggagaactgctgctgctgctgccaacactgcagtccattacctggcagatgatcgagcagatccagttcattaaactgttcggcatggccaagatcgacaacctgctgcaggagatgctgctgggaggggctccctcagatgcacctcatgcccaccacccactgcatccccacctgatgcaggaacatatgggcactaatgtgatcgtcgcaaacacaatgcctacccacctgtctaatggacagatgtgtgagtggccacgccccaggggccaggctgcagcccctgaagctccacagcccgcacctccagggggaagtggcagcgagccctacaagctgctgcctggagccgtggctactattgtgaaaccactgtccgcaatcccccagcctaccattacaaagcaggaagtcatctgaggactagtccctgttcccagagcccacttttttttctttttttgaaataaaatagcctgtctttcagatctcaaaggctcttttcagagccaccaaaaaaaaaaaaaaaaaaaaaaaaaaaaaaaaaaaaaaaaaaaaaaaaaaaaaaaaaaaaaaaaaaaaaaaaaaaaaaaaaaaaaaaaaaaaaaaaaaaaa

SEQ ID NO: 4146 - RNA, 1586 nt, synthetic construct
  misc_feature 1..1586: note = mRNA a-1 (hSL-A100) (opt28) from Homo sapiens__NP_000448.3__HNF4A(39-474)(S167E_S378E_T429E_T432E _S436E)
  source 1..1586: mol_type = other RNA
aggagagtcccgcagtcggcgtccagcggctctgcttgttcgtgtgtgtgtcgttgcaggccttattcaagcttaccatggacacatctccctcagagggcactaacctgaatgcccctaacagtctgggggtgagcgctctgtgcgcaatctgcggagacagggccaccggcaaacactacggggcttcctcttgtgatggatgcaagggctttttcagacgcagcgtccggaaaaatcatatgtactcatgccgatttagtaggcagtgcgtggtggacaaggacaagagaaaccagtgccgctattgtcggctgaaaaagtgcttcagggcaggaatgaaaaaggaagccgtccagaatgagagagatcgaatttccacacggcgcagctcttacgaagacagctccctgccatcaatcaacgctctgctgcaggcagaggtgctgagtaggcagatcactgaacccgtgagcgggattaacggcgatatcagagccaagaaaattgcatctatcgctgacgtctgcgagtccatgaaggagcagctgctggtgctggtggaatgggccaaatacatccctgcattttgcgagctgccactggacgatcaggtcgctctgctgcgggcccacgcaggagaacatctgctgctgggcgctaccaagcgaagcatggtgttcaaggacgtgctgctgctggggaatgactatattgtccccaggcactgccctgagctggccgaaatgtcaagagtgagtatccgcatcctggatgagctggtgctgccattccaggaactgcagattgacgataacgagtacgcatacctgaaagctatcatctttttcgaccccgacgccaagggactgtctgatcctggcaaaattaagcggctgaggtcccaggtccaggtgagcctggaagactatatcaatgacagacagtacgatagccgagggcggtttggagagctgctgctgctgctgccaacactgcagtccattacctggcagatgatcgagcagatccagttcattaaactgttcggcatggcaaagatcgacaacctgctgcaggaaatgctgctgggaggggagccctcagatgcccctcatgctcaccacccactgcatccccacctgatgcaggaacatatgggcactaatgtgatcgtcgcaaacacaatgcctacccacctgtctaatggacagatgtgtgagtggccacgccccaggggccaggccgcagaacctgaggaaccacagcccgagcctccagggggaagtggcagcgagccctacaagctgctgcctggagctgtggcaactattgtgaaaccactgtccgccatcccccagcctaccattacaaagcaggaagtcatctgaggactagtccctgttcccagagcccacttttttttctttttttgaaataaaatagcctgtctttcagatctcaaaggctcttttcagagccaccaaaaaaaaaaaaaaaaaaaaaaaaaaaaaaaaaaaaaaaaaaaaaaaaaaaaaaaaaaaaaaaaaaaaaaaaaaaaaaaaaaaaaaaaaaaaaaaaaaaaa

SEQ ID NO: 4147 - RNA, 1586 nt, synthetic construct
  misc_feature 1..1586: note = mRNA a-1 (hSL-A100) (opt28) from Homo sapiens__NP_000448.3__HNF4A(39-474)(S87A)
  source 1..1586: mol_type = other RNA
aggagagtcccgcagtcggcgtccagcggctctgcttgttcgtgtgtgtgtcgttgcaggccttattcaagcttaccatggacacatctccctcagagggcactaacctgaatgcccctaacagtctgggggtgagcgctctgtgcgcaatctgcggagacagggccaccggcaaacactacggggcttcctcttgtgatggatgcaagggctttttcagacgcgcagtccggaaaaatcatatgtacagctgccgattttcaaggcagtgcgtggtggacaaggacaagagaaaccagtgccgctattgtcggctgaaaaagtgcttcagggccggaatgaaaaaggaagctgtccagaatgagagagatcgaattagtacacggcgctccagctacgaagactctagcctgccatccatcaacgcactgctgcaggccgaggtgctgtcaaggcagatcaccagtcccgtgagcgggattaacggcgatatcagagcaaagaaaattgcttctatcgccgacgtctgcgaatccatgaaggagcagctgctggtgctggtggagtgggcaaaatacatccctgctttttgcgaactgccactggacgatcaggtcgccctgctgcgggcacacgctggagagcatctgctgctgggcgccactaagcgaagcatggtgttcaaggacgtgctgctgctggggaatgactatattgtccccaggcactgccctgaactggcagagatgtcaagagtgagtatccgcatcctggatgaactggtgctgccattccaggagctgcagattgacgataacgaatacgcttacctgaaagccatcatctttttcgaccccgacgcaaagggactgtctgatcctggcaaaattaagcggctgaggtcccaggtccaggtgagcctggaggactatatcaatgacagacagtacgatagccgagggcggtttggagaactgctgctgctgctgccaacactgcagtccattacctggcagatgatcgagcagatccagttcattaaactgttcggcatggccaagatcgacaacctgctgcaggagatgctgctgggagggtcaccctctgatgctcctcatgcacaccacccactgcatccccacctgatgcaggaacatatgggcactaatgtgatcgtcgccaacacaatgcctacccacctgagtaatggacagatgtgtgagtggccacgccccaggggccaggcagctactcctgaaaccccacagcccagccctccagggggatccggctctgagccctacaagctgctgcctggagcagtggccacaattgtgaaaccactgagcgctatcccccagcctaccattactaagcaggaagtcatctgaggactagtccctgttcccagagcccacttttttttctttttttgaaataaaatagcctgtctttcagatctcaaaggctcttttcagagccaccaaaaaaaaaaaaaaaaaaaaaaaaaaaaaaaaaaaaaaaaaaaaaaaaaaaaaaaaaaaaaaaaaaaaaaaaaaaaaaaaaaaaaaaaaaaaaaaaaaaaa

SEQ ID NO: 4148 - RNA, 1586 nt, synthetic construct
  misc_feature 1..1586: note = mRNA a-1 (hSL-A100) (opt28) from Homo sapiens__NP_000448.3__HNF4A(39-474)(S87E)
  source 1..1586: mol_type = other RNA
aggagagtcccgcagtcggcgtccagcggctctgcttgttcgtgtgtgtgtcgttgcaggccttattcaagcttaccatggacacatctccctcagagggcactaacctgaatgcccctaacagtctgggggtgagcgctctgtgcgcaatctgcggagacagggccaccggcaaacactacggggcttcctcttgtgatggatgcaagggctttttcagacgcgaagtccggaaaaatcatatgtacagctgccgattttcaaggcagtgcgtggtggacaaggacaagagaaaccagtgccgctattgtcggctgaaaaagtgcttcagggcaggaatgaaaaaggaggccgtccagaatgaaagagatcgaattagtacacggcgctccagctacgaggactctagcctgccatccatcaacgctctgctgcaggcagaagtgctgtcaaggcagatcaccagtcccgtgagcgggattaacggcgatatcagagccaagaaaattgcatctatcgctgacgtctgcgagtccatgaaggagcagctgctggtgctggtggaatgggccaaatacatccctgcattttgcgagctgccactggacgatcaggtcgctctgctgcgggcccacgcaggagaacatctgctgctgggcgctactaagcgaagcatggtgttcaaggacgtgctgctgctggggaatgactatattgtccccaggcactgccctgagctggccgaaatgtcaagagtgagtatccgcatcctggatgagctggtgctgccattccaggaactgcagattgacgataacgagtacgcatacctgaaagctatcatctttttcgaccccgacgccaagggactgtctgatcctggcaaaattaagcggctgaggtcccaggtccaggtgagcctggaagactatatcaatgacagacagtacgatagccgagggcggtttggagagctgctgctgctgctgccaacactgcagtccattacctggcagatgatcgagcagatccagttcattaaactgttcggcatggcaaagatcgacaacctgctgcaggaaatgctgctgggagggtcaccctctgatgcccctcatgctcaccacccactgcatccccacctgatgcaggagcatatgggcactaatgtgatcgtcgcaaacacaatgcctacccacctgagtaatggacagatgtgtgaatggccacgccccaggggccaggccgcaactcctgagaccccacagcccagccctccagggggatccggctctgaaccctacaagctgctgcctggagctgtggcaacaattgtgaaaccactgagcgccatcccccagcctaccattactaagcaggaggtcatctgaggactagtccctgttcccagagcccacttttttttctttttttgaaataaaatagcctgtctttcagatctcaaaggctcttttcagagccaccaaaaaaaaaaaaaaaaaaaaaaaaaaaaaaaaaaaaaaaaaaaaaaaaaaaaaaaaaaaaaaaaaaaaaaaaaaaaaaaaaaaaaaaaaaaaaaaaaaaaa

SEQ ID NO: 4149 - RNA, 1586 nt, synthetic construct
  misc_feature 1..1586: note = mRNA a-1 (hSL-A100) (opt28) from Homo sapiens__NP_000448.3__HNF4A(39-474)(R2V)
  source 1..1586: mol_type = other RNA
aggagagtcccgcagtcggcgtccagcggctctgcttgttcgtgtgtgtgtcgttgcaggccttattcaagcttaccatggacacatctccctcagagggcactaacctgaatgcccctaacagtctgggggtgagcgctctgtgcgcaatctgcggagaccgggccaccggcaaacactacggggcttcctcttgtgatggatgcaagggctttttcaggagaagcgtgcgcaaaaatcatatgtactcatgccgatttagtcggcagtgcgtggtcgacaaggacaagaggaaccagtgcagatattgtcgcctgaaaaagtgcttccgggcaggaatgaaaaaggaagccgtgcagaatgagagggatagaatttccacacgacggagctcttacgaagacagctccctgccatcaatcaacgctctgctgcaggcagaggtgctgagtcgccagatcactagccccgtctctgggattaacggcgatatcagggccaagaaaattgcatccatcgctgacgtgtgcgaaagcatgaaggagcagctgctggtgctggtcgagtgggccaaatacatccctgcattttgcgaactgccactggacgatcaggtggctctgctgagagcccacgcaggagagcatctgctgctgggcgctaccaagcggtcaatggtgttcaaggacgtcctgctgctggggaatgactatattgtgccccgacactgccctgaactggccgagatgagtagggtgtctatcagaatcctggatgaactggtcctgccattccaggagctgcagattgacgataacgaatacgcatacctgaaagctatcatctttttcgaccccgacgccaagggactgtccgatcctggcaaaattaagcgcctgcggagccaggtccaggtgagcctggaggactatatcaatgacaggcagtacgattccagagggcgatttggagaactgctgctgctgctgccaacactgcagtcaattacctggcagatgatcgagcagatccagttcattaaactgttcggcatggcaaagatcgacaacctgctgcaggagatgctgctgggagggtctcccagtgatgcccctcatgctcaccacccactgcatccccacctgatgcaggaacatatgggcactaatgtgatcgtggcaaacacaatgcctacccacctgagcaatggacagatgtgtgagtggccacggccccgcggccaggccgcaactcctgaaaccccacagccctcccctccagggggatctggcagcgagccctacaagctgctgcctggagctgtggcaacaattgtcaaaccactgtcagccatcccccagcctaccattactaagcaggaagtgatctgaggactagtccctgttcccagagcccacttttttttctttttttgaaataaaatagcctgtctttcagatctcaaaggctcttttcagagccaccaaaaaaaaaaaaaaaaaaaaaaaaaaaaaaaaaaaaaaaaaaaaaaaaaaaaaaaaaaaaaaaaaaaaaaaaaaaaaaaaaaaaaaaaaaaaaaaaaaaaa

SEQ ID NO: 4150 - RNA, 1586 nt, synthetic construct
  misc_feature 1..1586: note = mRNA a-1 (hSL-A100) (opt28) from Homo sapiens__NP_000448.3__HNF4A(39-474)(R2V_K5V)
  source 1..1586: mol_type = other RNA
aggagagtcccgcagtcggcgtccagcggctctgcttgttcgtgtgtgtgtcgttgcaggccttattcaagcttaccatggacacatctccctcagagggcactaacctgaatgcccctaacagtctgggggtgagcgctctgtgcgcaatctgcggagaccgggccaccggcaagcactacggggcttcctcttgtgatggatgcaaaggctttttcaggagaagcgtgcgcaagaatcatatgtactcatgccgatttagtcggcagtgcgtcgtggacaaagacaagaggaaccagtgcagatattgtcgcctgaagaaatgcttccgggcaggaatgaagaaagaagccgtgcagaatgagagggatagaatttccacacgacggagctcttacgaagacagctccctgccatcaatcaacgctctgctgcaggcagaggtcctgagtcgccagatcactagccccgtgtctgggattaacggcgatatcagggccaagaagattgcatccatcgctgacgtgtgcgaaagcatgaaagagcagctgctggtcctggtggagtgggccaagtacatccctgcattttgcgaactgccactggacgatcaggtggctctgctgagagcccacgcaggagagcatctgctgctgggcgctaccaaacggtcaatggtcttcaaggacgtgctgctgctggggaatgactatattgtgccccgacactgccctgaactggccgagatgagtagggtctctatcagaatcctggatgaactggtgctgccattccaggagctgcagattgacgataacgaatacgcatacctgaaggctatcatctttttcgaccccgacgccaaaggactgtccgatcctggcaagattaaacgcctgcggagccaggtgcaggtcagcctggaggactatatcaatgacaggcagtacgattccagagggcgatttggagaactgctgctgctgctgccaacactgcagtcaattacctggcagatgatcgagcagatccagttcattaagctgttcggcatggcaaaaatcgacaacctgctgcaggagatgctgctgggagggtctcccagtgatgcccctcatgctcaccacccactgcatccccacctgatgcaggaacatatgggcactaatgtgatcgtggcaaacacaatgcctacccacctgagcaatggacagatgtgtgagtggccacggccccgcggccaggccgcaactcctgaaaccccacagccctcccctccagggggatctggcagcgagccctacaagctgctgcctggagctgtcgcaacaattgtgaagccactgtcagccatcccccagcctaccattactaaacaggaagtcatctgaggactagtccctgttcccagagcccacttttttttctttttttgaaataaaatagcctgtctttcagatctcaaaggctcttttcagagccaccaaaaaaaaaaaaaaaaaaaaaaaaaaaaaaaaaaaaaaaaaaaaaaaaaaaaaaaaaaaaaaaaaaaaaaaaaaaaaaaaaaaaaaaaaaaaaaaaaaaaa

SEQ ID NO: 4151 - RNA, 1586 nt, synthetic construct
  misc_feature 1..1586: note = mRNA a-1 (hSL-A100) (opt28) from Homo sapiens__NP_000448.3__HNF4A(39-474)(K179R_K180R)
  source 1..1586: mol_type = other RNA
aggagagtcccgcagtcggcgtccagcggctctgcttgttcgtgtgtgtgtcgttgcaggccttattcaagcttaccatggacacatctccctcagagggcactaacctgaatgcccctaacagtctgggggtgagcgctctgtgcgcaatctgcggagacagggccaccggcaaacactacggggcttcctcttgtgatggatgcaagggctttttcagacgcagcgtccggaaaaatcatatgtactcatgccgatttagtaggcagtgcgtggtggacaaggacaagagaaaccagtgccgctattgtcggctgaaaaagtgcttcagggcaggaatgaaaaaggaagccgtccagaatgagagagatcgaatttccacacggcgcagctcttacgaagacagctccctgccatcaatcaacgctctgctgcaggcagaggtgctgagtaggcagatcactagccccgtgtctgggattaacggcgatatcagagcccggcgaattgcatccatcgctgacgtctgcgaaagcatgaaggagcagctgctggtgctggtggagtgggccaaatacatccctgcattttgcgaactgccactggacgatcaggtcgctctgctgagggcccacgcaggagagcatctgctgctgggcgctaccaagagatcaatggtgttcaaagacgtgctgctgctggggaatgactatattgtcccccgccactgccctgaactggccgagatgagtcgggtgtctatcaggatcctggatgaactggtgctgccattccaggagctgcagattgacgataacgaatacgcatacctgaaggctatcatctttttcgaccccgacgccaagggactgtccgatcctggcaaaattaagagactgcgaagccaggtccaggtgagcctggaggactatatcaatgaccggcagtacgattcccgcgggaggtttggagaactgctgctgctgctgccaacactgcagtcaattacctggcagatgatcgagcagatccagttcattaaactgttcggcatggcaaagatcgacaacctgctgcaggagatgctgctgggagggtctcccagtgatgcccctcatgctcaccacccactgcatccccacctgatgcaggaacatatgggcactaatgtgatcgtcgcaaacacaatgcctacccacctgagcaatggacagatgtgtgagtggccaagaccccggggccaggccgcaactcctgaaaccccacagccctcccctccagggggatctggcagcgagccctacaaactgctgcctggagctgtggcaacaattgtgaagccactgtcagccatcccccagcctaccattactaagcaggaagtcatctgaggactagtccctgttcccagagcccacttttttttctttttttgaaataaaatagcctgtctttcagatctcaaaggctcttttcagagccaccaaaaaaaaaaaaaaaaaaaaaaaaaaaaaaaaaaaaaaaaaaaaaaaaaaaaaaaaaaaaaaaaaaaaaaaaaaaaaaaaaaaaaaaaaaaaaaaaaaaaa

SEQ ID NO: 4152 - RNA, 1586 nt, synthetic construct
  misc_feature 1..1586: note = mRNA a-1 (hSL-A100) (opt28) from Homo sapiens__NP_000448.3__HNF4A(39-474)(K234R)
  source 1..1586: mol_type = other RNA
aggagagtcccgcagtcggcgtccagcggctctgcttgttcgtgtgtgtgtcgttgcaggccttattcaagcttaccatggacacatctccctcagagggcactaacctgaatgcccctaacagtctgggggtgagcgctctgtgcgcaatctgcggagacagggccaccggcaaacactacggggcttcctcttgtgatggatgcaagggctttttcagacgcagcgtccggaaaaatcatatgtactcatgccgatttagtaggcagtgcgtggtggacaaggacaagagaaaccagtgccgctattgtcggctgaaaaagtgcttcagggcaggaatgaaaaaggaagccgtccagaatgagagagatcgaatttccacacggcgcagctcttacgaagacagctccctgccatcaatcaacgctctgctgcaggcagaggtgctgagtaggcagatcactagccccgtgtctgggattaacggcgatatcagagccaagaaaattgcatccatcgctgacgtctgcgaaagcatgaaggagcagctgctggtgctggtggagtgggccaaatacatccctgcattttgcgaactgccactggacgatcaggtcgctctgctgcgggcccacgcaggagagcatctgctgctgggcgctacccgaaggtcaatggtgttcaaggacgtgctgctgctggggaatgactatattgtccccagacactgccctgaactggccgagatgagtcgcgtgtctatccggatcctggatgaactggtgctgccattccaggagctgcagattgacgataacgaatacgcatacctgaaggctatcatctttttcgaccccgacgccaaaggactgtccgatcctggcaagattaaaaggctgagaagccaggtccaggtgagcctggaggactatatcaatgaccgacagtacgattcccgggggcgctttggagaactgctgctgctgctgccaacactgcagtcaattacctggcagatgatcgagcagatccagttcattaagctgttcggcatggcaaaaatcgacaacctgctgcaggagatgctgctgggagggtctcccagtgatgcccctcatgctcaccacccactgcatccccacctgatgcaggaacatatgggcactaatgtgatcgtcgcaaacacaatgcctacccacctgagcaatggacagatgtgtgagtggccaaggcccagaggccaggccgcaactcctgaaaccccacagccctcccctccagggggatctggcagcgagccctacaagctgctgcctggagctgtggcaacaattgtgaagccactgtcagccatcccccagcctaccattactaaacaggaagtcatctgaggactagtccctgttcccagagcccacttttttttctttttttgaaataaaatagcctgtctttcagatctcaaaggctcttttcagagccaccaaaaaaaaaaaaaaaaaaaaaaaaaaaaaaaaaaaaaaaaaaaaaaaaaaaaaaaaaaaaaaaaaaaaaaaaaaaaaaaaaaaaaaaaaaaaaaaaaaaaa

SEQ ID NO: 4153 - RNA, 1586 nt, synthetic construct
  misc_feature 1..1586: note = mRNA a-1 (hSL-A100) (opt28) from Homo sapiens__NP_000448.3__HNF4A(39-474)(K300R)
  source 1..1586: mol_type = other RNA
aggagagtcccgcagtcggcgtccagcggctctgcttgttcgtgtgtgtgtcgttgcaggccttattcaagcttaccatggacacatctccctcagagggcactaacctgaatgcccctaacagtctgggggtgagcgctctgtgcgcaatctgcggagacagggccaccggcaaacactacggggcttcctcttgtgatggatgcaagggctttttcagacgcagcgtccggaaaaatcatatgtactcatgccgatttagtaggcagtgcgtggtggacaaggacaagagaaaccagtgccgctattgtcggctgaaaaagtgcttcagggcaggaatgaaaaaggaagccgtccagaatgagagagatcgaatttccacacggcgcagctcttacgaagacagctccctgccatcaatcaacgctctgctgcaggcagaggtgctgagtaggcagatcactagccccgtgtctgggattaacggcgatatcagagccaagaaaattgcatccatcgctgacgtctgcgaaagcatgaaggagcagctgctggtgctggtggagtgggccaaatacatccctgcattttgcgaactgccactggacgatcaggtcgctctgctgcgggcccacgcaggagagcatctgctgctgggcgctaccaagcgatcaatggtgttcaaggacgtgctgctgctggggaatgactatattgtccccaggcactgccctgaactggccgagatgagtagagtgtctatccgcatcctggatgaactggtgctgccattccaggagctgcagattgacgataacgaatacgcatacctgaaagctatcatctttttcgaccccgacgcccggggactgtccgatcctggcaagattaaaaggctgagaagccaggtccaggtgagcctggaggactatatcaatgaccgacagtacgattcccgggggcgctttggagaactgctgctgctgctgccaacactgcagtcaattacctggcagatgatcgagcagatccagttcattaagctgttcggcatggcaaaaatcgacaacctgctgcaggagatgctgctgggagggtctcccagtgatgcccctcatgctcaccacccactgcatccccacctgatgcaggaacatatgggcactaatgtgatcgtcgcaaacacaatgcctacccacctgagcaatggacagatgtgtgagtggccaaggcccagaggccaggccgcaactcctgaaaccccacagccctcccctccagggggatctggcagcgagccctacaagctgctgcctggagctgtggcaacaattgtgaagccactgtcagccatcccccagcctaccattactaaacaggaagtcatctgaggactagtccctgttcccagagcccacttttttttctttttttgaaataaaatagcctgtctttcagatctcaaaggctcttttcagagccaccaaaaaaaaaaaaaaaaaaaaaaaaaaaaaaaaaaaaaaaaaaaaaaaaaaaaaaaaaaaaaaaaaaaaaaaaaaaaaaaaaaaaaaaaaaaaaaaaaaaaa

SEQ ID NO: 4154 - RNA, 1586 nt, synthetic construct
  misc_feature 1..1586: note = mRNA a-1 (hSL-A100) (opt28) from Homo sapiens__NP_000448.3__HNF4A(39-474)(K300R_K307R_K309R)
  source 1..1586: mol_type = other RNA
aggagagtcccgcagtcggcgtccagcggctctgcttgttcgtgtgtgtgtcgttgcaggccttattcaagcttaccatggacacatctccctcagagggcactaacctgaatgcccctaacagtctgggggtgagcgctctgtgcgcaatctgcggagacagggccaccggcaaacactacggggcttcctcttgtgatggatgcaagggctttttcagacgcagcgtccggaaaaatcatatgtactcatgccgatttagtaggcagtgcgtggtggacaaggacaagagaaaccagtgccgctattgtcggctgaaaaagtgcttcagggcaggaatgaaaaaggaagccgtccagaatgagagagatcgaatttccacacggcgcagctcttacgaagacagctccctgccatcaatcaacgctctgctgcaggcagaggtgctgagtaggcagatcactagccccgtgtctgggattaacggcgatatcagagccaagaaaattgcatccatcgctgacgtctgcgaaagcatgaaggagcagctgctggtgctggtggagtgggccaaatacatccctgcattttgcgaactgccactggacgatcaggtcgctctgctgcgggcccacgcaggagagcatctgctgctgggcgctaccaagcgatcaatggtgttcaaggacgtgctgctgctggggaatgactatattgtccccaggcactgccctgaactggccgagatgagtagagtgtctatccgcatcctggatgaactggtgctgccattccaggagctgcagattgacgataacgaatacgcatacctgaaagctatcatctttttcgaccccgacgcccggggactgtccgatcctggcaggattagacgactgcggagccaggtccaggtgagcctggaggactatatcaatgaccgccagtacgattccagggggagatttggagaactgctgctgctgctgccaacactgcagtcaattacctggcagatgatcgagcagatccagttcattaagctgttcggcatggcaaaaatcgacaacctgctgcaggagatgctgctgggagggtctcccagtgatgcccctcatgctcaccacccactgcatccccacctgatgcaggaacatatgggcactaatgtgatcgtcgcaaacacaatgcctacccacctgagcaatggacagatgtgtgagtggccacggccccgcggccaggccgcaactcctgaaaccccacagccctcccctccagggggatctggcagcgagccctacaagctgctgcctggagctgtggcaacaattgtgaaaccactgtcagccatcccccagcctaccattactaagcaggaagtcatctgaggactagtccctgttcccagagcccacttttttttctttttttgaaataaaatagcctgtctttcagatctcaaaggctcttttcagagccaccaaaaaaaaaaaaaaaaaaaaaaaaaaaaaaaaaaaaaaaaaaaaaaaaaaaaaaaaaaaaaaaaaaaaaaaaaaaaaaaaaaaaaaaaaaaaaaaaaaaaa

SEQ ID NO: 4155 - RNA, 1586 nt, synthetic construct
  misc_feature 1..1586: note = mRNA a-1 (hSL-A100) (opt28) from Homo sapiens__NP_000448.3__HNF4A(39-474)(K447R_K470R)
  source 1..1586: mol_type = other RNA
aggagagtcccgcagtcggcgtccagcggctctgcttgttcgtgtgtgtgtcgttgcaggccttattcaagcttaccatggacacatctccctcagagggcactaacctgaatgcccctaacagtctgggggtgagcgctctgtgcgcaatctgcggagacagggccaccggcaaacactacggggcttcctcttgtgatggatgcaagggctttttcagacgcagcgtccggaaaaatcatatgtactcatgccgatttagtaggcagtgcgtggtggacaaggacaagagaaaccagtgccgctattgtcggctgaaaaagtgcttcagggcaggaatgaaaaaggaagccgtccagaatgagagagatcgaatttccacacggcgcagctcttacgaagacagctccctgccatcaatcaacgctctgctgcaggcagaggtgctgagtaggcagatcactagccccgtgtctgggattaacggcgatatcagagccaagaaaattgcatccatcgctgacgtctgcgaaagcatgaaggagcagctgctggtgctggtggagtgggccaaatacatccctgcattttgcgaactgccactggacgatcaggtcgctctgctgcgggcccacgcaggagagcatctgctgctgggcgctaccaagcgatcaatggtgttcaaggacgtgctgctgctggggaatgactatattgtccccaggcactgccctgaactggccgagatgagtagagtgtctatccgcatcctggatgaactggtgctgccattccaggagctgcagattgacgataacgaatacgcatacctgaaagctatcatctttttcgaccccgacgccaagggactgtccgatcctggcaaaattaagcggctgaggagccaggtccaggtgagcctggaggactatatcaatgacagacagtacgattcccgagggcggtttggagaactgctgctgctgctgccaacactgcagtcaattacctggcagatgatcgagcagatccagttcattaaactgttcggcatggcaaagatcgacaacctgctgcaggagatgctgctgggagggtctcccagtgatgcccctcatgctcaccacccactgcatccccacctgatgcaggaacatatgggcactaatgtgatcgtcgcaaacacaatgcctacccacctgagcaatggacagatgtgtgagtggccacgccccaggggccaggccgcaactcctgaaaccccacagccctcccctccagggggatctggcagcgagccctacagactgctgcctggagctgtggcaacaattgtgaagccactgtcagccatcccccagcctaccattactcggcaggaagtcatctgaggactagtccctgttcccagagcccacttttttttctttttttgaaataaaatagcctgtctttcagatctcaaaggctcttttcagagccaccaaaaaaaaaaaaaaaaaaaaaaaaaaaaaaaaaaaaaaaaaaaaaaaaaaaaaaaaaaaaaaaaaaaaaaaaaaaaaaaaaaaaaaaaaaaaaaaaaaaaa

SEQ ID NO: 4156 - RNA, 1586 nt, synthetic construct
  misc_feature 1..1586: note = mRNA a-1 (hSL-A100) (opt28) from Homo sapiens__NP_000448.3__HNF4A(39-474)(K458R)
  source 1..1586: mol_type = other RNA
aggagagtcccgcagtcggcgtccagcggctctgcttgttcgtgtgtgtgtcgttgcaggccttattcaagcttaccatggacacatctccctcagagggcactaacctgaatgcccctaacagtctgggggtgagcgctctgtgcgcaatctgcggagacagggccaccggcaaacactacggggcttcctcttgtgatggatgcaagggctttttcagacgcagcgtccggaaaaatcatatgtactcatgccgatttagtaggcagtgcgtggtggacaaggacaagagaaaccagtgccgctattgtcggctgaaaaagtgcttcagggcaggaatgaaaaaggaagccgtccagaatgagagagatcgaatttccacacggcgcagctcttacgaagacagctccctgccatcaatcaacgctctgctgcaggcagaggtgctgagtaggcagatcactagccccgtgtctgggattaacggcgatatcagagccaagaaaattgcatccatcgctgacgtctgcgaaagcatgaaggagcagctgctggtgctggtggagtgggccaaatacatccctgcattttgcgaactgccactggacgatcaggtcgctctgctgcgggcccacgcaggagagcatctgctgctgggcgctaccaagcgatcaatggtgttcaaggacgtgctgctgctggggaatgactatattgtccccaggcactgccctgaactggccgagatgagtagagtgtctatccgcatcctggatgaactggtgctgccattccaggagctgcagattgacgataacgaatacgcatacctgaaagctatcatctttttcgaccccgacgccaagggactgtccgatcctggcaaaattaagcggctgaggagccaggtccaggtgagcctggaggactatatcaatgacagacagtacgattcccgagggcggtttggagaactgctgctgctgctgccaacactgcagtcaattacctggcagatgatcgagcagatccagttcattaaactgttcggcatggcaaagatcgacaacctgctgcaggagatgctgctgggagggtctcccagtgatgcccctcatgctcaccacccactgcatccccacctgatgcaggaacatatgggcactaatgtgatcgtcgcaaacacaatgcctacccacctgagcaatggacagatgtgtgagtggccacgccccaggggccaggccgcaactcctgaaaccccacagccctcccctccagggggatctggcagcgagccctacaagctgctgcctggagctgtggcaacaattgtgagaccactgtcagccatcccccagcctaccattactaaacaggaagtcatctgaggactagtccctgttcccagagcccacttttttttctttttttgaaataaaatagcctgtctttcagatctcaaaggctcttttcagagccaccaaaaaaaaaaaaaaaaaaaaaaaaaaaaaaaaaaaaaaaaaaaaaaaaaaaaaaaaaaaaaaaaaaaaaaaaaaaaaaaaaaaaaaaaaaaaaaaaaaaaa

SEQ ID NO: 4157 - RNA, 1586 nt, synthetic construct
  misc_feature 1..1586: note = mRNA a-1 (hSL-A100) (opt28) from Homo sapiens__NP_000448.3__HNF4A(39-474)(K106R_K108R_K126R_K127R )
  source 1..1586: mol_type = other RNA
aggagagtcccgcagtcggcgtccagcggctctgcttgttcgtgtgtgtgtcgttgcaggccttattcaagcttaccatggacacatctccctcagagggcactaacctgaatgcccctaacagtctgggggtgagcgctctgtgcgcaatctgcggagacagggccaccggcaaacactacggggcttcctcttgtgatggatgcaagggctttttcagacgcagcgtccggaaaaatcatatgtactcatgccgatttagtaggcagtgcgtggtggacagagaccgccggaaccagtgcaggtattgtagactgaagaagtgcttccgagcaggaatgcggcgcgaagccgtccagaatgagagggatagaatttccacacggcgaagctcttacgaagacagctccctgccatcaatcaacgctctgctgcaggcagaggtgctgagtaggcagatcactagccccgtgtctgggattaacggcgatatcagagccaaaaagattgcatccatcgctgacgtctgcgaaagcatgaaagagcagctgctggtgctggtggagtgggccaagtacatccctgcattttgcgaactgccactggacgatcaggtcgctctgctgcgcgcccacgcaggagagcatctgctgctgggcgctaccaagcggtcaatggtgttcaaagacgtgctgctgctggggaatgactatattgtccccaggcactgccctgaactggccgagatgagtagagtgtctatccgaatcctggatgaactggtgctgccattccaggagctgcagattgacgataacgaatacgcatacctgaaggctatcatctttttcgaccccgacgccaaaggactgtccgatcctggcaagattaagcggctgcgcagccaggtccaggtgagcctggaggactatatcaatgacaggcagtacgattccagagggcggtttggagaactgctgctgctgctgccaacactgcagtcaattacctggcagatgatcgagcagatccagttcattaaactgttcggcatggcaaagatcgacaacctgctgcaggagatgctgctgggagggtctcccagtgatgcccctcatgctcaccacccactgcatccccacctgatgcaggaacatatgggcactaatgtgatcgtcgcaaacacaatgcctacccacctgagcaatggacagatgtgtgagtggccacgccccaggggccaggccgcaactcctgaaaccccacagccctcccctccagggggatctggcagcgagccctacaaactgctgcctggagctgtggcaacaattgtgaagccactgtcagccatcccccagcctaccattactaaacaggaagtcatctgaggactagtccctgttcccagagcccacttttttttctttttttgaaataaaatagcctgtctttcagatctcaaaggctcttttcagagccaccaaaaaaaaaaaaaaaaaaaaaaaaaaaaaaaaaaaaaaaaaaaaaaaaaaaaaaaaaaaaaaaaaaaaaaaaaaaaaaaaaaaaaaaaaaaaaaaaaaaaa

SEQ ID NO: 4158 - RNA, 1586 nt, synthetic construct
  misc_feature 1..1586: note = mRNA a-1 (hSL-A100) (opt28) from Homo sapiens__NP_000448.3__HNF4A(39-474)(E285Q)
  source 1..1586: mol_type = other RNA
aggagagtcccgcagtcggcgtccagcggctctgcttgttcgtgtgtgtgtcgttgcaggccttattcaagcttaccatggacacatctccctcagagggcactaacctgaatgcccctaacagtctgggggtgagcgctctgtgcgcaatctgcggagacagggccaccggcaaacactacggggcttcctcttgtgatggatgcaagggctttttcagacgcagcgtccggaaaaatcatatgtactcatgccgatttagtaggcagtgcgtggtggacaaggacaagagaaaccagtgccgctattgtcggctgaaaaagtgcttcagggcaggaatgaaaaaggaagccgtccagaatgagagagatcgaatttccacacggcgcagctcttacgaagacagctccctgccatcaatcaacgctctgctgcaggcagaggtgctgagtaggcagatcactagccccgtgtctgggattaacggcgatatcagagccaagaaaattgcatccatcgctgacgtctgcgaaagcatgaaggagcagctgctggtgctggtggagtgggccaaatacatccctgcattttgcgaactgccactggacgatcaggtcgctctgctgcgggcccacgcaggagagcatctgctgctgggcgctaccaagcgatcaatggtgttcaaggacgtgctgctgctggggaatgactatattgtccccaggcactgccctgaactggccgagatgagtagagtgtctatccgcatcctggatgaactggtgctgccattccaggagctgcagattgacgataaccagtacgcatacctgaaagctatcatctttttcgaccccgacgccaagggactgtccgatcctggcaaaattaagcggctgaggagccaggtccaggtgagcctggaagactatatcaatgacagacagtacgattcccgagggcggtttggagagctgctgctgctgctgccaacactgcagtcaattacctggcagatgatcgaacagatccagttcattaaactgttcggcatggcaaagatcgacaacctgctgcaggagatgctgctgggagggtctcccagtgatgcccctcatgctcaccacccactgcatccccacctgatgcaggagcatatgggcactaatgtgatcgtcgcaaacacaatgcctacccacctgagcaatggacagatgtgtgaatggccacgccccaggggccaggccgcaactcctgagaccccacagccctcccctccagggggatctggcagcgaaccctacaagctgctgcctggagctgtggcaacaattgtgaaaccactgtcagccatcccccagcctaccattactaagcaggaggtcatctgaggactagtccctgttcccagagcccacttttttttctttttttgaaataaaatagcctgtctttcagatctcaaaggctcttttcagagccaccaaaaaaaaaaaaaaaaaaaaaaaaaaaaaaaaaaaaaaaaaaaaaaaaaaaaaaaaaaaaaaaaaaaaaaaaaaaaaaaaaaaaaaaaaaaaaaaaaaaaa

SEQ ID NO: 4159 - RNA, 1586 nt, synthetic construct
  misc_feature 1..1586: note = mRNA a-1 (hSL-A100) (opt28) from Homo sapiens__NP_000448.3__HNF4A(39-474)(T166E)
  source 1..1586: mol_type = other RNA
aggagagtcccgcagtcggcgtccagcggctctgcttgttcgtgtgtgtgtcgttgcaggccttattcaagcttaccatggacacatctccctcagagggcactaacctgaatgcccctaacagtctgggggtgagcgctctgtgcgcaatctgcggagacagggccaccggcaaacactacggggcttcctcttgtgatggatgcaagggctttttcagacgcagcgtccggaaaaatcatatgtactcatgccgatttagtaggcagtgcgtggtggacaaggacaagagaaaccagtgccgctattgtcggctgaaaaagtgcttcagggcaggaatgaaaaaggaagccgtccagaatgagagagatcgaatttccacacggcgcagctcttacgaagacagctccctgccatcaatcaacgctctgctgcaggcagaggtgctgagtaggcagatcgaaagccccgtgtctgggattaacggcgatatcagagccaagaaaattgcatccatcgctgacgtctgcgagagcatgaaggagcagctgctggtgctggtggaatgggccaaatacatccctgcattttgcgagctgccactggacgatcaggtcgctctgctgcgggcccacgcaggagaacatctgctgctgggcgctactaagcgatcaatggtgttcaaggacgtgctgctgctggggaatgactatattgtccccaggcactgccctgagctggccgaaatgagtagagtgtctatccgcatcctggatgagctggtgctgccattccaggaactgcagattgacgataacgagtacgcatacctgaaagctatcatctttttcgaccccgacgccaagggactgtccgatcctggcaaaattaagcggctgaggagccaggtccaggtgagcctggaagactatatcaatgacagacagtacgattcccgagggcggtttggagagctgctgctgctgctgccaaccctgcagtcaattacatggcagatgatcgagcagatccagttcattaaactgttcggcatggcaaagatcgacaacctgctgcaggaaatgctgctgggagggtctcccagtgatgcccctcatgctcaccacccactgcatccccacctgatgcaggagcatatgggcaccaatgtgatcgtcgcaaacactatgcctacacacctgagcaatggacagatgtgtgaatggccacgccccaggggccaggccgcaacccctgagactccacagccctcccctccagggggatctggcagcgaaccctacaagctgctgcctggagctgtggcaaccattgtgaaaccactgtcagccatcccccagcctacaattaccaagcaggaggtcatctgaggactagtccctgttcccagagcccacttttttttctttttttgaaataaaatagcctgtctttcagatctcaaaggctcttttcagagccaccaaaaaaaaaaaaaaaaaaaaaaaaaaaaaaaaaaaaaaaaaaaaaaaaaaaaaaaaaaaaaaaaaaaaaaaaaaaaaaaaaaaaaaaaaaaaaaaaaaaaa

SEQ ID NO: 4160 - RNA, 1586 nt, synthetic construct
  misc_feature 1..1586: note = mRNA a-1 (hSL-A100) (opt28) from Homo sapiens__NP_000448.3__HNF4A(39-474)(S148A)
  source 1..1586: mol_type = other RNA
aggagagtcccgcagtcggcgtccagcggctctgcttgttcgtgtgtgtgtcgttgcaggccttattcaagcttaccatggacacatctccctcagagggcactaacctgaatgcccctaacagtctgggggtgagcgctctgtgcgcaatctgcggagacagggccaccggcaaacactacggggcttcctcttgtgatggatgcaagggctttttcagacgcagcgtccggaaaaatcatatgtactcatgccgatttagtaggcagtgcgtggtggacaaggacaagagaaaccagtgccgctattgtcggctgaaaaagtgcttcagggcaggaatgaaaaaggaagccgtccagaatgagagagatcgaatttccacacggcgcagctcttacgaagacagcgctctgccatccatcaacgcactgctgcaggccgaggtgctgtcaaggcagatcaccagtcccgtgagcgggattaacggcgatatcagagcaaagaaaattgcttctatcgccgacgtctgcgaatccatgaaggagcagctgctggtgctggtggagtgggcaaaatacatccctgctttttgcgaactgccactggacgatcaggtcgccctgctgcgggcacacgctggagagcatctgctgctgggcgccactaagcgaagcatggtgttcaaggacgtgctgctgctggggaatgactatattgtccccaggcactgccctgaactggcagagatgtcaagagtgagtatccgcatcctggatgaactggtgctgccattccaggagctgcagattgacgataacgaatacgcttacctgaaagccatcatctttttcgaccccgacgcaaagggactgtctgatcctggcaaaattaagcggctgaggtcccaggtccaggtgagcctggaggactatatcaatgacagacagtacgatagccgagggcggtttggagaactgctgctgctgctgccaacactgcagtccattacctggcagatgatcgagcagatccagttcattaaactgttcggcatggccaagatcgacaacctgctgcaggagatgctgctgggagggtcaccctctgatgctcctcatgcacaccacccactgcatccccacctgatgcaggaacatatgggcactaatgtgatcgtcgccaacacaatgcctacccacctgagtaatggacagatgtgtgagtggccacgccccaggggccaggcagctactcctgaaaccccacagcccagccctccagggggatccggctctgagccctacaagctgctgcctggagcagtggccacaattgtgaaaccactgagcgctatcccccagcctaccattactaagcaggaagtcatctgaggactagtccctgttcccagagcccacttttttttctttttttgaaataaaatagcctgtctttcagatctcaaaggctcttttcagagccaccaaaaaaaaaaaaaaaaaaaaaaaaaaaaaaaaaaaaaaaaaaaaaaaaaaaaaaaaaaaaaaaaaaaaaaaaaaaaaaaaaaaaaaaaaaaaaaaaaaaaa

SEQ ID NO: 4161 - RNA, 1586 nt, synthetic construct
  misc_feature 1..1586: note = mRNA a-1 (hSL-A100) (opt28) from Homo sapiens__NP_000448.3__HNF4A(39-474)(S148E)
  source 1..1586: mol_type = other RNA
aggagagtcccgcagtcggcgtccagcggctctgcttgttcgtgtgtgtgtcgttgcaggccttattcaagcttaccatggacacatctccctcagagggcactaacctgaatgcccctaacagtctgggggtgagcgctctgtgcgcaatctgcggagacagggccaccggcaaacactacggggcttcctcttgtgatggatgcaagggctttttcagacgcagcgtccggaaaaatcatatgtactcatgccgatttagtaggcagtgcgtggtggacaaggacaagagaaaccagtgccgctattgtcggctgaaaaagtgcttcagggcaggaatgaaaaaggaagccgtccagaatgagagagatcgaatttccacacggcgcagctcttacgaagacagcgagctgccatccatcaacgctctgctgcaggcagaagtgctgtcaaggcagatcaccagtcccgtgagcgggattaacggcgatatcagagccaagaaaattgcatctatcgctgacgtctgcgagtccatgaaggagcagctgctggtgctggtggaatgggccaaatacatccctgcattttgcgagctgccactggacgatcaggtcgctctgctgcgggcccacgcaggagaacatctgctgctgggcgctactaagcgaagcatggtgttcaaggacgtgctgctgctggggaatgactatattgtccccaggcactgccctgagctggccgaaatgtcaagagtgagtatccgcatcctggatgagctggtgctgccattccaggaactgcagattgacgataacgagtacgcatacctgaaagctatcatctttttcgaccccgacgccaagggactgtctgatcctggcaaaattaagcggctgaggtcccaggtccaggtgagcctggaagactatatcaatgacagacagtacgatagccgagggcggtttggagagctgctgctgctgctgccaacactgcagtccattacctggcagatgatcgagcagatccagttcattaaactgttcggcatggcaaagatcgacaacctgctgcaggaaatgctgctgggagggtcaccctctgatgcccctcatgctcaccacccactgcatccccacctgatgcaggagcatatgggcactaatgtgatcgtcgcaaacacaatgcctacccacctgagtaatggacagatgtgtgaatggccacgccccaggggccaggccgcaactcctgagaccccacagcccagccctccagggggatccggctctgaaccctacaagctgctgcctggagctgtggcaacaattgtgaaaccactgagcgccatcccccagcctaccattactaagcaggaggtcatctgaggactagtccctgttcccagagcccacttttttttctttttttgaaataaaatagcctgtctttcagatctcaaaggctcttttcagagccaccaaaaaaaaaaaaaaaaaaaaaaaaaaaaaaaaaaaaaaaaaaaaaaaaaaaaaaaaaaaaaaaaaaaaaaaaaaaaaaaaaaaaaaaaaaaaaaaaaaaaa

SEQ ID NO: 4162 - RNA, 1586 nt, synthetic construct
  misc_feature 1..1586: note = mRNA a-1 (hSL-A100) (opt28) from Homo sapiens__NP_000448.3__HNF4A(39-474)(S183A)
  source 1..1586: mol_type = other RNA
aggagagtcccgcagtcggcgtccagcggctctgcttgttcgtgtgtgtgtcgttgcaggccttattcaagcttaccatggacacatctccctcagagggcactaacctgaatgcccctaacagtctgggggtgagcgctctgtgcgcaatctgcggagacagggccaccggcaaacactacggggcttcctcttgtgatggatgcaagggctttttcagacgcagcgtccggaaaaatcatatgtactcatgccgatttagtaggcagtgcgtggtggacaaggacaagagaaaccagtgccgctattgtcggctgaaaaagtgcttcagggcaggaatgaaaaaggaagccgtccagaatgagagagatcgaatttccacacggcgcagctcttacgaagacagctccctgccatcaatcaacgctctgctgcaggcagaggtgctgagtaggcagatcactagccccgtgtctgggattaacggcgatatcagagccaagaaaattgcagctatcgccgacgtctgcgaatccatgaaggagcagctgctggtgctggtggagtgggcaaaatacatccctgctttttgcgaactgccactggacgatcaggtcgccctgctgcgggcacacgctggagagcatctgctgctgggcgccaccaagcgaagcatggtgttcaaggacgtgctgctgctggggaatgactatattgtccccaggcactgccctgaactggcagagatgtcaagagtgagtatccgcatcctggatgaactggtgctgccattccaggagctgcagattgacgataacgaatacgcttacctgaaagccatcatctttttcgaccccgacgcaaagggactgtctgatcctggcaaaattaagcggctgaggtcccaggtccaggtgagcctggaggactatatcaatgacagacagtacgatagccgagggcggtttggagaactgctgctgctgctgccaacactgcagtccattacctggcagatgatcgagcagatccagttcattaaactgttcggcatggccaagatcgacaacctgctgcaggagatgctgctgggagggtcaccctctgatgctcctcatgcacaccacccactgcatccccacctgatgcaggaacatatgggcactaatgtgatcgtcgccaacacaatgcctacccacctgagtaatggacagatgtgtgagtggccacgccccaggggccaggcagctactcctgaaaccccacagcccagccctccagggggatccggctctgagccctacaagctgctgcctggagcagtggccacaattgtgaaaccactgagcgctatcccccagcctaccattactaagcaggaagtcatctgaggactagtccctgttcccagagcccacttttttttctttttttgaaataaaatagcctgtctttcagatctcaaaggctcttttcagagccaccaaaaaaaaaaaaaaaaaaaaaaaaaaaaaaaaaaaaaaaaaaaaaaaaaaaaaaaaaaaaaaaaaaaaaaaaaaaaaaaaaaaaaaaaaaaaaaaaaaaaa

SEQ ID NO: 4163 - RNA, 1586 nt, synthetic construct
  misc_feature 1..1586: note = mRNA a-1 (hSL-A100) (opt28) from Homo sapiens__NP_000448.3__HNF4A(39-474)(S183E)
  source 1..1586: mol_type = other RNA
aggagagtcccgcagtcggcgtccagcggctctgcttgttcgtgtgtgtgtcgttgcaggccttattcaagcttaccatggacacatctccctcagagggcactaacctgaatgcccctaacagtctgggggtgagcgctctgtgcgcaatctgcggagacagggccaccggcaaacactacggggcttcctcttgtgatggatgcaagggctttttcagacgcagcgtccggaaaaatcatatgtactcatgccgatttagtaggcagtgcgtggtggacaaggacaagagaaaccagtgccgctattgtcggctgaaaaagtgcttcagggcaggaatgaaaaaggaagccgtccagaatgagagagatcgaatttccacacggcgcagctcttacgaagacagctccctgccatcaatcaacgctctgctgcaggcagaggtgctgagtaggcagatcactagccccgtgtctgggattaacggcgatatcagagccaagaaaattgcagaaatcgctgacgtctgcgagtccatgaaggagcagctgctggtgctggtggaatgggccaaatacatccctgcattttgcgagctgccactggacgatcaggtcgctctgctgcgggcccacgcaggagaacatctgctgctgggcgctaccaagcgaagcatggtgttcaaggacgtgctgctgctggggaatgactatattgtccccaggcactgccctgagctggccgaaatgtcaagagtgagtatccgcatcctggatgagctggtgctgccattccaggaactgcagattgacgataacgagtacgcatacctgaaagctatcatctttttcgaccccgacgccaagggactgtctgatcctggcaaaattaagcggctgaggtcccaggtccaggtgagcctggaagactatatcaatgacagacagtacgatagccgagggcggtttggagagctgctgctgctgctgccaacactgcagtccattacctggcagatgatcgagcagatccagttcattaaactgttcggcatggcaaagatcgacaacctgctgcaggaaatgctgctgggagggtcaccctctgatgcccctcatgctcaccacccactgcatccccacctgatgcaggagcatatgggcactaatgtgatcgtcgcaaacacaatgcctacccacctgagtaatggacagatgtgtgaatggccacgccccaggggccaggccgcaactcctgagaccccacagcccagccctccagggggatccggctctgaaccctacaagctgctgcctggagctgtggcaacaattgtgaaaccactgagcgccatcccccagcctaccattactaagcaggaggtcatctgaggactagtccctgttcccagagcccacttttttttctttttttgaaataaaatagcctgtctttcagatctcaaaggctcttttcagagccaccaaaaaaaaaaaaaaaaaaaaaaaaaaaaaaaaaaaaaaaaaaaaaaaaaaaaaaaaaaaaaaaaaaaaaaaaaaaaaaaaaaaaaaaaaaaaaaaaaaaaa

SEQ ID NO: 4164 - RNA, 1586 nt, synthetic construct
  misc_feature 1..1586: note = mRNA a-1 (hSL-A100) (opt28) from Homo sapiens__NP_000448.3__HNF4A(39-474)(S461A)
  source 1..1586: mol_type = other RNA
aggagagtcccgcagtcggcgtccagcggctctgcttgttcgtgtgtgtgtcgttgcaggccttattcaagcttaccatggacacatctccctcagagggcactaacctgaatgcccctaacagtctgggggtgagcgctctgtgcgcaatctgcggagacagggccaccggcaaacactacggggcttcctcttgtgatggatgcaagggctttttcagacgcagcgtccggaaaaatcatatgtactcatgccgatttagtaggcagtgcgtggtggacaaggacaagagaaaccagtgccgctattgtcggctgaaaaagtgcttcagggcaggaatgaaaaaggaagccgtccagaatgagagagatcgaatttccacacggcgcagctcttacgaagacagctccctgccatcaatcaacgctctgctgcaggcagaggtgctgagtaggcagatcactagccccgtgtctgggattaacggcgatatcagagccaagaaaattgcatccatcgctgacgtctgcgaaagcatgaaggagcagctgctggtgctggtggagtgggccaaatacatccctgcattttgcgaactgccactggacgatcaggtcgctctgctgcgggcccacgcaggagagcatctgctgctgggcgctaccaagcgatcaatggtgttcaaggacgtgctgctgctggggaatgactatattgtccccaggcactgccctgaactggccgagatgagtagagtgtctatccgcatcctggatgaactggtgctgccattccaggagctgcagattgacgataacgaatacgcatacctgaaagctatcatctttttcgaccccgacgccaagggactgtccgatcctggcaaaattaagcggctgaggagccaggtccaggtgagcctggaggactatatcaatgacagacagtacgattcccgagggcggtttggagaactgctgctgctgctgccaacactgcagtcaattacctggcagatgatcgagcagatccagttcattaaactgttcggcatggcaaagatcgacaacctgctgcaggagatgctgctgggagggtctcccagtgatgcccctcatgctcaccacccactgcatccccacctgatgcaggaacatatgggcactaatgtgatcgtcgcaaacacaatgcctacccacctgagcaatggacagatgtgtgagtggccacgccccaggggccaggccgcaactcctgaaaccccacagccctcccctccagggggatctggcagcgagccctacaagctgctgcctggagctgtggcaacaattgtgaaaccactggccgctatcccccagcctaccattactaagcaggaagtcatctgaggactagtccctgttcccagagcccacttttttttctttttttgaaataaaatagcctgtctttcagatctcaaaggctcttttcagagccaccaaaaaaaaaaaaaaaaaaaaaaaaaaaaaaaaaaaaaaaaaaaaaaaaaaaaaaaaaaaaaaaaaaaaaaaaaaaaaaaaaaaaaaaaaaaaaaaaaaaaa

SEQ ID NO: 4165 - RNA, 1586 nt, synthetic construct
  misc_feature 1..1586: note = mRNA a-1 (hSL-A100) (opt28) from Homo sapiens__NP_000448.3__HNF4A(39-474)(S461E)
  source 1..1586: mol_type = other RNA
aggagagtcccgcagtcggcgtccagcggctctgcttgttcgtgtgtgtgtcgttgcaggccttattcaagcttaccatggacacatctccctcagagggcactaacctgaatgcccctaacagtctgggggtgagcgctctgtgcgcaatctgcggagacagggccaccggcaaacactacggggcttcctcttgtgatggatgcaagggctttttcagacgcagcgtccggaaaaatcatatgtactcatgccgatttagtaggcagtgcgtggtggacaaggacaagagaaaccagtgccgctattgtcggctgaaaaagtgcttcagggcaggaatgaaaaaggaagccgtccagaatgagagagatcgaatttccacacggcgcagctcttacgaagacagctccctgccatcaatcaacgctctgctgcaggcagaggtgctgagtaggcagatcactagccccgtgtctgggattaacggcgatatcagagccaagaaaattgcatccatcgctgacgtctgcgaaagcatgaaggagcagctgctggtgctggtggagtgggccaaatacatccctgcattttgcgaactgccactggacgatcaggtcgctctgctgcgggcccacgcaggagagcatctgctgctgggcgctaccaagcgatcaatggtgttcaaggacgtgctgctgctggggaatgactatattgtccccaggcactgccctgaactggccgagatgagtagagtgtctatccgcatcctggatgaactggtgctgccattccaggagctgcagattgacgataacgaatacgcatacctgaaagctatcatctttttcgaccccgacgccaagggactgtccgatcctggcaaaattaagcggctgaggagccaggtccaggtgagcctggaggactatatcaatgacagacagtacgattcccgagggcggtttggagaactgctgctgctgctgccaacactgcagtcaattacctggcagatgatcgagcagatccagttcattaaactgttcggcatggcaaagatcgacaacctgctgcaggagatgctgctgggagggtctcccagtgatgcccctcatgctcaccacccactgcatccccacctgatgcaggaacatatgggcactaatgtgatcgtcgcaaacacaatgcctacccacctgagcaatggacagatgtgtgagtggccacgccccaggggccaggccgcaactcctgaaaccccacagccctcccctccagggggatctggcagcgagccctacaagctgctgcctggagctgtggcaacaattgtgaaaccactggaagccatcccccagcctaccattactaagcaggaggtcatctgaggactagtccctgttcccagagcccacttttttttctttttttgaaataaaatagcctgtctttcagatctcaaaggctcttttcagagccaccaaaaaaaaaaaaaaaaaaaaaaaaaaaaaaaaaaaaaaaaaaaaaaaaaaaaaaaaaaaaaaaaaaaaaaaaaaaaaaaaaaaaaaaaaaaaaaaaaaaaa

SEQ ID NO: 4166 - RNA, 1586 nt, synthetic construct
  misc_feature 1..1586: note = mRNA a-1 (hSL-A100) (opt28) from Homo sapiens__NP_000448.3__HNF4A(39-474)(S142A_S143A_S313A)
  source 1..1586: mol_type = other RNA
aggagagtcccgcagtcggcgtccagcggctctgcttgttcgtgtgtgtgtcgttgcaggccttattcaagcttaccatggacacatctccctcagagggcactaacctgaatgcccctaacagtctgggggtgagcgctctgtgcgcaatctgcggagacagggccaccggcaaacactacggggcttcctcttgtgatggatgcaagggctttttcagacgcagcgtccggaaaaatcatatgtactcatgccgatttagtaggcagtgcgtggtggacaaggacaagagaaaccagtgccgctattgtcggctgaaaaagtgcttcagggcaggaatgaaaaaggaagccgtccagaatgagagagatcgaatttccacacggcgcgctgcatacgaagacagctctctgccaagcatcaacgccctgctgcaggcagaggtgctgtccaggcagatcacttcacccgtgagtgggattaacggcgatatcagagctaagaaaattgccagcatcgcagacgtctgcgaatctatgaaggagcagctgctggtgctggtggagtgggctaaatacatccctgccttttgcgaactgccactggacgatcaggtcgcactgctgcgggctcacgccggagagcatctgctgctgggcgcaaccaagcgatccatggtgttcaaggacgtgctgctgctggggaatgactatattgtccccaggcactgccctgaactggctgagatgagcagagtgtcaatccgcatcctggatgaactggtgctgccattccaggagctgcagattgacgataacgaatacgcctacctgaaagcaatcatctttttcgaccccgacgccaagggactgagtgatcctggcaaaattaagcggctgagggctcaggtccaggtgtctctggaggactatatcaatgacagacagtacgattcccgagggcggtttggagaactgctgctgctgctgccaacactgcagagcattacctggcagatgatcgagcagatccagttcattaaactgttcggcatggcaaagatcgacaacctgctgcaggagatgctgctgggagggagcccctccgatgcccctcatgcacaccacccactgcatccccacctgatgcaggaacatatgggcactaatgtgatcgtcgctaacacaatgcctacccacctgtcaaatggacagatgtgtgagtggccacgccccaggggccaggcagccactcctgaaaccccacagccctctcctccagggggaagtggcagcgagccctacaagctgctgcctggagctgtggcaacaattgtgaaaccactgtccgccatcccccagcctaccattactaagcaggaagtcatctgaggactagtccctgttcccagagcccacttttttttctttttttgaaataaaatagcctgtctttcagatctcaaaggctcttttcagagccaccaaaaaaaaaaaaaaaaaaaaaaaaaaaaaaaaaaaaaaaaaaaaaaaaaaaaaaaaaaaaaaaaaaaaaaaaaaaaaaaaaaaaaaaaaaaaaaaaaaaaa

SEQ ID NO: 4167 - RNA, 1586 nt, synthetic construct
  misc_feature 1..1586: note = mRNA a-1 (hSL-A100) (opt28) from Homo sapiens__NP_000448.3__HNF4A(39-474)(S142A_S143A_S313A_K458R )
  source 1..1586: mol_type = other RNA
aggagagtcccgcagtcggcgtccagcggctctgcttgttcgtgtgtgtgtcgttgcaggccttattcaagcttaccatggacacatctccctcagagggcactaacctgaatgcccctaacagtctgggggtgagcgctctgtgcgcaatctgcggagacagggccaccggcaaacactacggggcttcctcttgtgatggatgcaagggctttttcagacgcagcgtccggaaaaatcatatgtactcatgccgatttagtaggcagtgcgtggtggacaaggacaagagaaaccagtgccgctattgtcggctgaaaaagtgcttcagggcaggaatgaaaaaggaagccgtccagaatgagagagatcgaatttccacacggcgcgctgcatacgaagacagctctctgccaagcatcaacgccctgctgcaggcagaggtgctgtccaggcagatcacttcacccgtgagtgggattaacggcgatatcagagctaagaaaattgccagcatcgcagacgtctgcgaatctatgaaggagcagctgctggtgctggtggagtgggctaaatacatccctgccttttgcgaactgccactggacgatcaggtcgcactgctgcgggctcacgccggagagcatctgctgctgggcgcaaccaagcgatccatggtgttcaaggacgtgctgctgctggggaatgactatattgtccccaggcactgccctgaactggctgagatgagcagagtgtcaatccgcatcctggatgaactggtgctgccattccaggagctgcagattgacgataacgaatacgcctacctgaaagcaatcatctttttcgaccccgacgccaagggactgagtgatcctggcaaaattaagcggctgagggctcaggtccaggtgtctctggaggactatatcaatgacagacagtacgattcccgagggcggtttggagaactgctgctgctgctgccaacactgcagagcattacctggcagatgatcgagcagatccagttcattaaactgttcggcatggcaaagatcgacaacctgctgcaggagatgctgctgggagggagcccctccgatgcccctcatgcacaccacccactgcatccccacctgatgcaggaacatatgggcactaatgtgatcgtcgctaacacaatgcctacccacctgtcaaatggacagatgtgtgagtggccacgccccaggggccaggcagccactcctgaaaccccacagccctctcctccagggggaagtggcagcgagccctacaagctgctgcctggagctgtggcaacaattgtgagaccactgtccgccatcccccagcctaccattactaaacaggaagtcatctgaggactagtccctgttcccagagcccacttttttttctttttttgaaataaaatagcctgtctttcagatctcaaaggctcttttcagagccaccaaaaaaaaaaaaaaaaaaaaaaaaaaaaaaaaaaaaaaaaaaaaaaaaaaaaaaaaaaaaaaaaaaaaaaaaaaaaaaaaaaaaaaaaaaaaaaaaaaaaa

SEQ ID NO: 4168 - RNA, 1586 nt, synthetic construct
  misc_feature 1..1586: note = mRNA a-1 (hSL-A100) (opt28) from Homo sapiens__NP_000448.3__HNF4A(39-474)(S142A_S143A_S167A_S313A _S378A_T429A_T432A_S436A_K458R)
  source 1..1586: mol_type = other RNA
aggagagtcccgcagtcggcgtccagcggctctgcttgttcgtgtgtgtgtcgttgcaggccttattcaagcttaccatggacacatctccctcagagggcactaacctgaatgcccctaacagtctgggggtgagcgctctgtgcgcaatctgcggagacagggccaccggcaaacactacggggcttcctcttgtgatggatgcaagggctttttcagacgcagcgtccggaaaaatcatatgtactcatgccgatttagtaggcagtgcgtggtggacaaggacaagagaaaccagtgccgctattgtcggctgaaaaagtgcttcagggcaggaatgaaaaaggaagccgtccagaatgagagagatcgaatttccacacggcgcgctgcatacgaagacagctctctgccaagcatcaacgccctgctgcaggcagaggtgctgtccaggcagatcactgctcccgtgtcagggattaacggcgatatcagagccaagaaaattgcaagtatcgctgacgtctgcgaaagcatgaaggagcagctgctggtgctggtggagtgggccaaatacatccctgcattttgcgaactgccactggacgatcaggtcgctctgctgcgggcccacgcaggagagcatctgctgctgggcgctaccaagcgatctatggtgttcaaggacgtgctgctgctggggaatgactatattgtccccaggcactgccctgaactggccgagatgtccagagtgagcatccgcatcctggatgaactggtgctgccattccaggagctgcagattgacgataacgaatacgcatacctgaaagccatcatctttttcgaccccgacgctaagggactgtcagatcctggcaaaattaagcggctgagggcacaggtccaggtgagtctggaggactatatcaatgacagacagtacgattctcgagggcggtttggagaactgctgctgctgctgccaacactgcagtccattacctggcagatgatcgagcagatccagttcattaaactgttcggcatggccaagatcgacaacctgctgcaggagatgctgctgggaggggcacccagcgatgctcctcatgcacaccacccactgcatccccacctgatgcaggaacatatgggcactaatgtgatcgtcgccaacacaatgcctacccacctgagcaatggacagatgtgtgagtggccacgccccaggggccaggctgcagcccctgaagctccacagcccgcacctccagggggatccggctcagagccctacaagctgctgcctggagccgtggctactattgtgagaccactgtctgcaatcccccagcctaccattacaaaacaggaagtcatctgaggactagtccctgttcccagagcccacttttttttctttttttgaaataaaatagcctgtctttcagatctcaaaggctcttttcagagccaccaaaaaaaaaaaaaaaaaaaaaaaaaaaaaaaaaaaaaaaaaaaaaaaaaaaaaaaaaaaaaaaaaaaaaaaaaaaaaaaaaaaaaaaaaaaaaaaaaaaaa

SEQ ID NO: 4169 - RNA, 1586 nt, synthetic construct
  misc_feature 1..1586: note = mRNA a-1 (hSL-A100) (opt28) from Homo sapiens__NP_000448.3__HNF4A(39-474)(S142A_S143A_S148A_S167A _S313A_S378A_T429A_T432A_S436A_K458R)
  source 1..1586: mol_type = other RNA
aggagagtcccgcagtcggcgtccagcggctctgcttgttcgtgtgtgtgtcgttgcaggccttattcaagcttaccatggacacatctccctcagagggcactaacctgaatgcccctaacagtctgggggtgagcgctctgtgcgcaatctgcggagacagggccaccggcaaacactacggggcttcctcttgtgatggatgcaagggctttttcagacgcagcgtccggaaaaatcatatgtactcatgccgatttagtaggcagtgcgtggtggacaaggacaagagaaaccagtgccgctattgtcggctgaaaaagtgcttcagggcaggaatgaaaaaggaagccgtccagaatgagagagatcgaatttccacacggcgcgctgcatacgaagacagcgccctgccatctatcaacgcactgctgcaggctgaggtgctgagcaggcagatcactgcccccgtgtccgggattaacggcgatatcagagcaaagaaaattgcttcaatcgccgacgtctgcgaaagtatgaaggagcagctgctggtgctggtggagtgggcaaaatacatccctgctttttgcgaactgccactggacgatcaggtcgccctgctgcgggcacacgctggagagcatctgctgctgggcgccaccaagcgaagcatggtgttcaaggacgtgctgctgctggggaatgactatattgtccccaggcactgccctgaactggcagagatgtctagagtgtccatccgcatcctggatgaactggtgctgccattccaggagctgcagattgacgataacgaatacgcctacctgaaagctatcatctttttcgaccccgacgcaaagggactgagcgatcctggcaaaattaagcggctgagggcccaggtccaggtgtcactggaggactatatcaatgacagacagtacgatagtcgagggcggtttggagaactgctgctgctgctgccaacactgcagtctattacctggcagatgatcgagcagatccagttcattaaactgttcggcatggcaaagatcgacaacctgctgcaggagatgctgctgggaggggctccctccgatgcacctcatgcccaccacccactgcatccccacctgatgcaggaacatatgggcactaatgtgatcgtcgctaacacaatgcctacccacctgagcaatggacagatgtgtgagtggccacgccccaggggccaggcagccgctcctgaagcaccacagcccgcccctccagggggaagcggctccgagccctacaagctgctgcctggagctgtggcaactattgtgagaccactgtcagccatcccccagcctaccattacaaaacaggaagtcatctgaggactagtccctgttcccagagcccacttttttttctttttttgaaataaaatagcctgtctttcagatctcaaaggctcttttcagagccaccaaaaaaaaaaaaaaaaaaaaaaaaaaaaaaaaaaaaaaaaaaaaaaaaaaaaaaaaaaaaaaaaaaaaaaaaaaaaaaaaaaaaaaaaaaaaaaaaaaaaa

SEQ ID NO: 4170 - RNA, 1586 nt, synthetic construct
  misc_feature 1..1586: note = mRNA a-1 (hSL-A100) (opt28) from Homo sapiens__NP_000448.3__HNF4A(39-474)(K106R_K108R_K126R_K127R _S142A_S143A_S148A_S167A_S313A_S378A_T429A_T432A_S436A_K458 R)
  source 1..1586: mol_type = other RNA
aggagagtcccgcagtcggcgtccagcggctctgcttgttcgtgtgtgtgtcgttgcaggccttattcaagcttaccatggacacatctccctcagagggcactaacctgaatgcccctaacagtctgggggtgagcgctctgtgcgcaatctgcggagacagggccaccggcaaacactacggggcttcctcttgtgatggatgcaagggctttttcagacgcagcgtccggaaaaatcatatgtactcatgccgatttagtaggcagtgcgtggtggacagagaccgccggaaccagtgcaggtattgtagactgaagaagtgcttccgagcaggaatgcggcgcgaagccgtccagaatgagagggatagaatttccacacggcgagctgcatacgaagacagcgccctgccatctatcaacgcactgctgcaggctgaggtgctgagcaggcagatcactgcccccgtgtccgggattaacggcgatatcagagctaaaaagattgcatcaatcgccgacgtctgcgaaagtatgaaagagcagctgctggtgctggtggagtgggcaaagtacatccctgctttttgcgaactgccactggacgatcaggtcgccctgctgcgcgcacacgctggagagcatctgctgctgggcgccaccaagcggagcatggtgttcaaagacgtgctgctgctggggaatgactatattgtccccaggcactgccctgaactggcagagatgtctagagtgtccatccgaatcctggatgaactggtgctgccattccaggagctgcagattgacgataacgaatacgcctacctgaaggctatcatctttttcgaccccgacgcaaaaggactgagcgatcctggcaagattaagcggctgcgcgcccaggtccaggtgtcactggaggactatatcaatgacaggcagtacgatagtagagggcggtttggagaactgctgctgctgctgccaacactgcagtctattacctggcagatgatcgagcagatccagttcattaaactgttcggcatggcaaagatcgacaacctgctgcaggagatgctgctgggaggggctccctccgatgcacctcatgcccaccacccactgcatccccacctgatgcaggaacatatgggcactaatgtgatcgtcgctaacacaatgcctacccacctgagcaatggacagatgtgtgagtggccacgccccaggggccaggcagccgctcctgaagcaccacagcccgcccctccagggggaagcggctccgagccctacaaactgctgcctggagctgtggcaactattgtgagaccactgtcagccatcccccagcctaccattacaaagcaggaagtcatctgaggactagtccctgttcccagagcccacttttttttctttttttgaaataaaatagcctgtctttcagatctcaaaggctcttttcagagccaccaaaaaaaaaaaaaaaaaaaaaaaaaaaaaaaaaaaaaaaaaaaaaaaaaaaaaaaaaaaaaaaaaaaaaaaaaaaaaaaaaaaaaaaaaaaaaaaaaaaaa

SEQ ID NO: 4171 - RNA, 1586 nt, synthetic construct
  misc_feature 1..1586: note = mRNA a-1 (hSL-A100) (opt28) from Homo sapiens__NP_000448.3__HNF4A(39-474)(S142A_S143A_S148A_T166A _S167A_S313A_S378A_T429A_T432A_S436A_K458R)
  source 1..1586: mol_type = other RNA
aggagagtcccgcagtcggcgtccagcggctctgcttgttcgtgtgtgtgtcgttgcaggccttattcaagcttaccatggacacatctccctcagagggcactaacctgaatgcccctaacagtctgggggtgagcgctctgtgcgcaatctgcggagacagggccaccggcaaacactacggggcttcctcttgtgatggatgcaagggctttttcagacgcagcgtccggaaaaatcatatgtactcatgccgatttagtaggcagtgcgtggtggacaaggacaagagaaaccagtgccgctattgtcggctgaaaaagtgcttcagggcaggaatgaaaaaggaagccgtccagaatgagagagatcgaatttccacacggcgcgctgcatacgaagacagcgccctgccatctatcaacgcactgctgcaggctgaggtgctgagcaggcagatcgccgcacccgtgtccgggattaacggcgatatcagagctaagaaaattgcctcaatcgcagacgtctgcgaaagtatgaaggagcagctgctggtgctggtggagtgggctaaatacatccctgccttttgcgaactgccactggacgatcaggtcgcactgctgcgggctcacgccggagagcatctgctgctgggcgcaactaagcgaagcatggtgttcaaggacgtgctgctgctggggaatgactatattgtccccaggcactgccctgaactggccgagatgtctagagtgtccatccgcatcctggatgaactggtgctgccattccaggagctgcagattgacgataacgaatacgcttacctgaaagcaatcatctttttcgaccccgacgccaagggactgagcgatcctggcaaaattaagcggctgagggcacaggtccaggtgtcactggaggactatatcaatgacagacagtacgatagtcgagggcggtttggagaactgctgctgctgctgccaaccctgcagtctattacatggcagatgatcgagcagatccagttcattaaactgttcggcatggctaagatcgacaacctgctgcaggagatgctgctgggaggggcaccctccgatgcccctcatgctcaccacccactgcatccccacctgatgcaggaacatatgggcaccaatgtgatcgtcgcaaacactatgcctacacacctgagcaatggacagatgtgtgagtggccacgccccaggggccaggccgctgcacctgaagccccacagcccgctcctccagggggaagcggctccgagccctacaagctgctgcctggagcagtggccaccattgtgagaccactgtcagcaatcccccagcctactattaccaaacaggaagtcatctgaggactagtccctgttcccagagcccacttttttttctttttttgaaataaaatagcctgtctttcagatctcaaaggctcttttcagagccaccaaaaaaaaaaaaaaaaaaaaaaaaaaaaaaaaaaaaaaaaaaaaaaaaaaaaaaaaaaaaaaaaaaaaaaaaaaaaaaaaaaaaaaaaaaaaaaaaaaaaa

SEQ ID NO: 4172 - RNA, 1586 nt, synthetic construct
  misc_feature 1..1586: note = mRNA a-1 (hSL-A100) (opt28) from Homo sapiens__NP_000448.3__HNF4A(39-474)(S87A_S142A_S143A_S148A_ T166A_S167A_S313A_S378A_T429A_T432A_S436A_K458R)
  source 1..1586: mol_type = other RNA
aggagagtcccgcagtcggcgtccagcggctctgcttgttcgtgtgtgtgtcgttgcaggccttattcaagcttaccatggacacatctccctcagagggcactaacctgaatgcccctaacagtctgggggtgagcgctctgtgcgcaatctgcggagacagggccaccggcaaacactacggggcttcctcttgtgatggatgcaagggctttttcagacgcgcagtccggaaaaatcatatgtacagctgccgattttcaaggcagtgcgtggtggacaaggacaagagaaaccagtgccgctattgtcggctgaaaaagtgcttcagggccggaatgaaaaaggaagctgtccagaatgagagagatcgaattagtacacggcgcgcagcctacgaagactccgcactgccaagcatcaacgctctgctgcaggccgaggtgctgtctaggcagatcgcagctcccgtgagcgggattaacggcgatatcagagccaagaaaattgcatccatcgctgacgtctgcgaatcaatgaaggagcagctgctggtgctggtggagtgggccaaatacatccctgcattttgcgaactgccactggacgatcaggtcgctctgctgcgggcccacgcaggagagcatctgctgctgggcgccactaagcgaagtatggtgttcaaggacgtgctgctgctggggaatgactatattgtccccaggcactgccctgaactggctgagatgagcagagtgtctatccgcatcctggatgaactggtgctgccattccaggagctgcagattgacgataacgaatacgcatacctgaaagccatcatctttttcgaccccgacgcaaagggactgtccgatcctggcaaaattaagcggctgagggctcaggtccaggtgagcctggaggactatatcaatgacagacagtacgattcacgagggcggtttggagaactgctgctgctgctgccaaccctgcagagtattacatggcagatgatcgagcagatccagttcattaaactgttcggcatggcaaagatcgacaacctgctgcaggagatgctgctgggaggggccccctctgatgctcctcatgcacaccacccactgcatccccacctgatgcaggaacatatgggcaccaatgtgatcgtcgccaacactatgcctacacacctgtccaatggacagatgtgtgagtggccacgccccaggggccaggctgcagcccctgaagctccacagcccgcacctccagggggaagcggcagcgagccctacaagctgctgcctggagccgtggcaaccattgtgagaccactgtccgctatcccccagcctactattaccaaacaggaagtcatctgaggactagtccctgttcccagagcccacttttttttctttttttgaaataaaatagcctgtctttcagatctcaaaggctcttttcagagccaccaaaaaaaaaaaaaaaaaaaaaaaaaaaaaaaaaaaaaaaaaaaaaaaaaaaaaaaaaaaaaaaaaaaaaaaaaaaaaaaaaaaaaaaaaaaaaaaaaaaaa

SEQ ID NO: 4173 - RNA, 1586 nt, synthetic construct
  misc_feature 1..1586: note = mRNA a-1 (hSL-A100) (opt28) from Homo sapiens__NP_000448.3__HNF4A(39-474)(S87A_K106R_K108R_K126R_ K127R_S142A_S143A_S148A_T166A_S167A_S313A_S378A_T429A_T432A _S436A_K458R)
  source 1..1586: mol_type = other RNA
aggagagtcccgcagtcggcgtccagcggctctgcttgttcgtgtgtgtgtcgttgcaggccttattcaagcttaccatggacacatctccctcagagggcactaacctgaatgcccctaacagtctgggggtgagcgctctgtgcgcaatctgcggagacagggccaccggcaaacactacggggcttcctcttgtgatggatgcaagggctttttcagacgcgcagtccggaaaaatcatatgtacagctgccgattttcaaggcagtgcgtggtggacagagaccgccggaaccagtgcaggtattgtagactgaagaagtgcttccgagccggaatgcggcgcgaagctgtccagaatgagagggatagaattagtacacggcgagcagcctacgaagactccgcactgccaagcatcaacgctctgctgcaggccgaggtgctgtctaggcagatcgcagctcccgtgagcgggattaacggcgatatcagagccaaaaagattgcatccatcgctgacgtctgcgaatcaatgaaagagcagctgctggtgctggtggagtgggccaagtacatccctgcattttgcgaactgccactggacgatcaggtcgctctgctgcgcgcccacgcaggagagcatctgctgctgggcgccactaagcggagtatggtgttcaaagacgtgctgctgctggggaatgactatattgtccccaggcactgccctgaactggctgagatgagcagagtgtctatccgaatcctggatgaactggtgctgccattccaggagctgcagattgacgataacgaatacgcatacctgaaggccatcatctttttcgaccccgacgcaaaaggactgtccgatcctggcaagattaagcggctgcgcgctcaggtccaggtgagcctggaggactatatcaatgacaggcagtacgattcaagagggcggtttggagaactgctgctgctgctgccaaccctgcagagtattacatggcagatgatcgagcagatccagttcattaaactgttcggcatggcaaagatcgacaacctgctgcaggagatgctgctgggaggggccccctctgatgctcctcatgcacaccacccactgcatccccacctgatgcaggaacatatgggcaccaatgtgatcgtcgccaacactatgcctacacacctgtccaatggacagatgtgtgagtggccacgccccaggggccaggctgcagcccctgaagctccacagcccgcacctccagggggaagcggcagcgagccctacaaactgctgcctggagccgtggcaaccattgtgagaccactgtccgctatcccccagcctactattaccaagcaggaagtcatctgaggactagtccctgttcccagagcccacttttttttctttttttgaaataaaatagcctgtctttcagatctcaaaggctcttttcagagccaccaaaaaaaaaaaaaaaaaaaaaaaaaaaaaaaaaaaaaaaaaaaaaaaaaaaaaaaaaaaaaaaaaaaaaaaaaaaaaaaaaaaaaaaaaaaaaaaaaaaaa

SEQ ID NO: 4174 - RNA, 1586 nt, synthetic construct
  misc_feature 1..1586: note = mRNA a-1 (hSL-A100) (opt28) from Homo sapiens__NP_000448.3__HNF4A(39-474)(S87A_K106R_K108R_K126R_ K127R)
  source 1..1586: mol_type = other RNA
aggagagtcccgcagtcggcgtccagcggctctgcttgttcgtgtgtgtgtcgttgcaggccttattcaagcttaccatggacacatctccctcagagggcactaacctgaatgcccctaacagtctgggggtgagcgctctgtgcgcaatctgcggagacagggccaccggcaaacactacggggcttcctcttgtgatggatgcaagggctttttcagacgcgcagtccggaaaaatcatatgtacagctgccgattttcaaggcagtgcgtggtggacagagaccgccggaaccagtgcaggtattgtagactgaagaagtgcttccgagccggaatgcggcgcgaagctgtccagaatgagagggatagaattagtacacggcgatccagctacgaagactctagcctgccatccatcaacgcactgctgcaggccgaggtgctgtcaaggcagatcaccagtcccgtgagcgggattaacggcgatatcagagctaaaaagattgcatctatcgccgacgtctgcgaatccatgaaagagcagctgctggtgctggtggagtgggcaaagtacatccctgctttttgcgaactgccactggacgatcaggtcgccctgctgcgcgcacacgctggagagcatctgctgctgggcgccactaagcggagcatggtgttcaaagacgtgctgctgctggggaatgactatattgtccccaggcactgccctgaactggcagagatgtcaagagtgagtatccgaatcctggatgaactggtgctgccattccaggagctgcagattgacgataacgaatacgcttacctgaaggccatcatctttttcgaccccgacgcaaaaggactgtctgatcctggcaagattaagcggctgcgctcccaggtccaggtgagcctggaggactatatcaatgacaggcagtacgatagcagagggcggtttggagaactgctgctgctgctgccaacactgcagtccattacctggcagatgatcgagcagatccagttcattaaactgttcggcatggccaagatcgacaacctgctgcaggagatgctgctgggagggtcaccctctgatgctcctcatgcacaccacccactgcatccccacctgatgcaggaacatatgggcactaatgtgatcgtcgccaacacaatgcctacccacctgagtaatggacagatgtgtgagtggccacgccccaggggccaggcagctactcctgaaaccccacagcccagccctccagggggatccggctctgagccctacaaactgctgcctggagcagtggccacaattgtgaagccactgagcgctatcccccagcctaccattactaaacaggaagtcatctgaggactagtccctgttcccagagcccacttttttttctttttttgaaataaaatagcctgtctttcagatctcaaaggctcttttcagagccaccaaaaaaaaaaaaaaaaaaaaaaaaaaaaaaaaaaaaaaaaaaaaaaaaaaaaaaaaaaaaaaaaaaaaaaaaaaaaaaaaaaaaaaaaaaaaaaaaaaaaa

SEQ ID NO: 4175 - RNA, 1586 nt, synthetic construct
  misc_feature 1..1586: note = mRNA a-1 (hSL-A100) (opt28) from Homo sapiens__NP_000448.3__HNF4A(39-474)(S87A_K106R_K108R_K126R_ K127R_S142A_S143A_S148A_T166A_S167A_S313A_S378A_T429A_T432A _S436A_K458R_S461A)
  source 1..1586: mol_type = other RNA
aggagagtcccgcagtcggcgtccagcggctctgcttgttcgtgtgtgtgtcgttgcaggccttattcaagcttaccatggacacatctccctcagagggcactaacctgaatgcccctaacagtctgggggtgagcgctctgtgcgcaatctgcggagacagggccaccggcaaacactacggggcttcctcttgtgatggatgcaagggctttttcagacgcgcagtccggaaaaatcatatgtacagctgccgattttcaaggcagtgcgtggtggacagagaccgccggaaccagtgcaggtattgtagactgaagaagtgcttccgagccggaatgcggcgcgaagctgtccagaatgagagggatagaattagtacacggcgagcagcctacgaagactccgcactgccaagcatcaacgctctgctgcaggccgaggtgctgtctaggcagatcgcagctcccgtgagcgggattaacggcgatatcagagccaaaaagattgcatccatcgctgacgtctgcgaatcaatgaaagagcagctgctggtgctggtggagtgggccaagtacatccctgcattttgcgaactgccactggacgatcaggtcgctctgctgcgcgcccacgcaggagagcatctgctgctgggcgccactaagcggagtatggtgttcaaagacgtgctgctgctggggaatgactatattgtccccaggcactgccctgaactggctgagatgagcagagtgtctatccgaatcctggatgaactggtgctgccattccaggagctgcagattgacgataacgaatacgcatacctgaaggccatcatctttttcgaccccgacgcaaaaggactgtccgatcctggcaagattaagcggctgcgcgctcaggtccaggtgagcctggaggactatatcaatgacaggcagtacgattcaagagggcggtttggagaactgctgctgctgctgccaaccctgcagagtattacatggcagatgatcgagcagatccagttcattaaactgttcggcatggcaaagatcgacaacctgctgcaggagatgctgctgggaggggccccctctgatgctcctcatgcacaccacccactgcatccccacctgatgcaggaacatatgggcaccaatgtgatcgtcgccaacactatgcctacacacctgtccaatggacagatgtgtgagtggccacgccccaggggccaggctgcagcccctgaagctccacagcccgcacctccagggggaagcggcagcgagccctacaaactgctgcctggagccgtggcaaccattgtgagaccactggctgccatcccccagcctactattaccaagcaggaagtcatctgaggactagtccctgttcccagagcccacttttttttctttttttgaaataaaatagcctgtctttcagatctcaaaggctcttttcagagccaccaaaaaaaaaaaaaaaaaaaaaaaaaaaaaaaaaaaaaaaaaaaaaaaaaaaaaaaaaaaaaaaaaaaaaaaaaaaaaaaaaaaaaaaaaaaaaaaaaaaaa

SEQ ID NO: 4176 - RNA, 1586 nt, synthetic construct
  misc_feature 1..1586: note = mRNA a-1 (hSL-A100) (opt28) from Homo sapiens__NP_000448.3__HNF4A(39-474)(S87A_K106R_K108R_K126R_ K127R_S142A_S143A_S148A_T166A_S167A_S313A_S378A_T429A_T432A _S436A_K458R_S461E)
  source 1..1586: mol_type = other RNA
aggagagtcccgcagtcggcgtccagcggctctgcttgttcgtgtgtgtgtcgttgcaggccttattcaagcttaccatggacacatctccctcagagggcactaacctgaatgcccctaacagtctgggggtgagcgctctgtgcgcaatctgcggagacagggccaccggcaaacactacggggcttcctcttgtgatggatgcaagggctttttcagacgcgcagtccggaaaaatcatatgtacagctgccgattttcaaggcagtgcgtggtggacagagaccgccggaaccagtgcaggtattgtagactgaagaagtgcttccgagccggaatgcggcgcgaagctgtccagaatgagagggatagaattagtacacggcgagcagcctacgaagactccgcactgccaagcatcaacgctctgctgcaggccgaggtgctgtctaggcagatcgcagctcccgtgagcgggattaacggcgatatcagagccaaaaagattgcatccatcgctgacgtctgcgaatcaatgaaagagcagctgctggtgctggtggagtgggccaagtacatccctgcattttgcgaactgccactggacgatcaggtcgctctgctgcgcgcccacgcaggagagcatctgctgctgggcgccactaagcggagtatggtgttcaaagacgtgctgctgctggggaatgactatattgtccccaggcactgccctgaactggctgagatgagcagagtgtctatccgaatcctggatgaactggtgctgccattccaggagctgcagattgacgataacgaatacgcatacctgaaggccatcatctttttcgaccccgacgcaaaaggactgtccgatcctggcaagattaagcggctgcgcgctcaggtccaggtgagcctggaggactatatcaatgacaggcagtacgattcaagagggcggtttggagaactgctgctgctgctgccaaccctgcagagtattacatggcagatgatcgagcagatccagttcattaaactgttcggcatggcaaagatcgacaacctgctgcaggagatgctgctgggaggggccccctctgatgctcctcatgcacaccacccactgcatccccacctgatgcaggaacatatgggcaccaatgtgatcgtcgccaacactatgcctacacacctgtccaatggacagatgtgtgagtggccacgccccaggggccaggctgcagcccctgaagctccacagcccgcacctccagggggaagcggcagcgagccctacaaactgctgcctggagccgtggcaaccattgtgagaccactggaagctatcccccagcctactattaccaagcaggaggtcatctgaggactagtccctgttcccagagcccacttttttttctttttttgaaataaaatagcctgtctttcagatctcaaaggctcttttcagagccaccaaaaaaaaaaaaaaaaaaaaaaaaaaaaaaaaaaaaaaaaaaaaaaaaaaaaaaaaaaaaaaaaaaaaaaaaaaaaaaaaaaaaaaaaaaaaaaaaaaaaa

SEQ ID NO: 4177 - RNA, 1586 nt, synthetic construct
  misc_feature 1..1586: note = mRNA a-1 (hSL-A100) (opt28) from Homo sapiens__NP_000448.3__HNF4A(39-474)(S87A_K106R_K108R_K126R_ K127R_S142A_S143A_S148E_T166A_S167E_S313A_S378E_T429E_T432E _S436E_K458R_S461E)
  source 1..1586: mol_type = other RNA
aggagagtcccgcagtcggcgtccagcggctctgcttgttcgtgtgtgtgtcgttgcaggccttattcaagcttaccatggacacatctccctcagagggcactaacctgaatgcccctaacagtctgggggtgagcgctctgtgcgcaatctgcggagacagggccaccggcaaacactacggggcttcctcttgtgatggatgcaagggctttttcagacgcgcagtccggaaaaatcatatgtacagctgccgattttcaaggcagtgcgtggtggacagagaccgccggaaccagtgcaggtattgtagactgaagaagtgcttccgagccggaatgcggcgcgaagctgtccagaatgagagggatagaattagtacacggcgagcagcctacgaagactccgagctgccaagcatcaacgcactgctgcaggctgaagtgctgtctaggcagatcgccgagcccgtgagcgggattaacggcgatatcagagctaaaaagattgcatccatcgccgacgtctgcgagtcaatgaaagaacagctgctggtgctggtggagtgggcaaagtacatccctgctttttgcgaactgccactggacgatcaggtcgccctgctgcgcgcacacgctggagagcatctgctgctgggcgccactaagcggagtatggtgttcaaagacgtgctgctgctggggaatgactatattgtccccaggcactgccctgaactggcagagatgagcagagtgtctatccgaatcctggatgaactggtgctgccattccaggagctgcagattgacgataacgaatacgcctacctgaaggctatcatctttttcgaccccgacgcaaaaggactgtccgatcctggcaagattaagcggctgcgcgcccaggtccaggtgagcctggaggactatatcaatgacaggcagtacgattcaagagggcggtttggagagctgctgctgctgctgccaaccctgcagagtattacatggcagatgatcgaacagatccagttcattaaactgttcggcatggcaaagatcgacaacctgctgcaggagatgctgctgggaggggaaccctctgatgctcctcatgcacaccacccactgcatccccacctgatgcaggagcatatgggcaccaatgtgatcgtcgccaacactatgcctacacacctgtccaatggacagatgtgtgaatggccacgccccaggggccaggctgcagagcctgaggaaccacagcccgagcctccagggggaagcggcagcgaaccctacaaactgctgcctggagccgtggctaccattgtgagaccactggaggcaatcccccagcctactattaccaagcaggaagtcatctgaggactagtccctgttcccagagcccacttttttttctttttttgaaataaaatagcctgtctttcagatctcaaaggctcttttcagagccaccaaaaaaaaaaaaaaaaaaaaaaaaaaaaaaaaaaaaaaaaaaaaaaaaaaaaaaaaaaaaaaaaaaaaaaaaaaaaaaaaaaaaaaaaaaaaaaaaaaaaa

SEQ ID NO: 4178 - RNA, 1586 nt, synthetic construct
  misc_feature 1..1586: note = mRNA a-1 (hSL-A100) (opt28) from Homo sapiens__NP_000448.3__HNF4A(39-474)(S87A_K106R_K108R_K126R_ K127R_S142A_S143A_S148A_T166A_S167A_K179R_K180R_S313A_S378A _T429A_T432A_S436A_K458R_S461E)
  source 1..1586: mol_type = other RNA
aggagagtcccgcagtcggcgtccagcggctctgcttgttcgtgtgtgtgtcgttgcaggccttattcaagcttaccatggacacatctccctcagagggcactaacctgaatgcccctaacagtctgggggtgagcgctctgtgcgcaatctgcggagacagggccaccggcaaacactacggggcttcctcttgtgatggatgcaagggctttttcagacgcgcagtccggaaaaatcatatgtacagctgccgattttcaaggcagtgcgtggtggacagagaccgccggaaccagtgcaggtattgtagactgaagaagtgcttccgagccggaatgcggcgcgaagctgtccagaatgagagggatagaattagtacacggcgagcagcctacgaagactccgcactgccaagcatcaacgctctgctgcaggccgaggtgctgtctaggcagatcgcagctcccgtgagcgggattaacggcgatatcagagcccgccggattgcatccatcgctgacgtctgcgaatcaatgaaagagcagctgctggtgctggtggagtgggccaagtacatccctgcattttgcgaactgccactggacgatcaggtcgctctgctgagggcccacgcaggagagcatctgctgctgggcgccactaaaagaagtatggtgttcaaggacgtgctgctgctggggaatgactatattgtcccccgacactgccctgaactggctgagatgagccgggtgtctatccgcatcctggatgaactggtgctgccattccaggagctgcagattgacgataacgaatacgcatacctgaaggccatcatctttttcgaccccgacgcaaaaggactgtccgatcctggcaagattaaaaggctgagagctcaggtccaggtgagcctggaggactatatcaatgaccggcagtacgattcacgcgggaggtttggagaactgctgctgctgctgccaaccctgcagagtattacatggcagatgatcgagcagatccagttcattaagctgttcggcatggcaaagatcgacaacctgctgcaggagatgctgctgggaggggccccctctgatgctcctcatgcacaccacccactgcatccccacctgatgcaggaacatatgggcaccaatgtgatcgtcgccaacactatgcctacacacctgtccaatggacagatgtgtgagtggccaagaccccgaggccaggctgcagcccctgaagctccacagcccgcacctccagggggaagcggcagcgagccctacaaactgctgcctggagccgtggcaaccattgtgcggccactggaagctatcccccagcctactattaccaagcaggaggtcatctgaggactagtccctgttcccagagcccacttttttttctttttttgaaataaaatagcctgtctttcagatctcaaaggctcttttcagagccaccaaaaaaaaaaaaaaaaaaaaaaaaaaaaaaaaaaaaaaaaaaaaaaaaaaaaaaaaaaaaaaaaaaaaaaaaaaaaaaaaaaaaaaaaaaaaaaaaaaaaa

SEQ ID NO: 4179 - RNA, 1586 nt, synthetic construct
  misc_feature 1..1586: note = mRNA a-1 (hSL-A100) (opt28) from Homo sapiens__NP_000448.3__HNF4A(39-474)(S87A_K106R_K108R_K126R_ K127R_S142A_S143A_S148A_T166A_S167A_K300R_K307R_K309R_S313A _S378A_T429A_T432A_S436A_K458R_S461E)
  source 1..1586: mol_type = other RNA
aggagagtcccgcagtcggcgtccagcggctctgcttgttcgtgtgtgtgtcgttgcaggccttattcaagcttaccatggacacatctccctcagagggcactaacctgaatgcccctaacagtctgggggtgagcgctctgtgcgcaatctgcggagacagggccaccggcaaacactacggggcttcctcttgtgatggatgcaagggctttttcagacgcgcagtccggaaaaatcatatgtacagctgccgattttcaaggcagtgcgtggtggacagagaccgccggaaccagtgcaggtattgtagactgaagaagtgcttccgagccggaatgcggcgcgaagctgtccagaatgagagggatagaattagtacacggcgagcagcctacgaagactccgcactgccaagcatcaacgctctgctgcaggccgaggtgctgtctaggcagatcgcagctcccgtgagcgggattaacggcgatatcagagccaaaaagattgcatccatcgctgacgtctgcgaatcaatgaaagagcagctgctggtgctggtggagtgggccaagtacatccctgcattttgcgaactgccactggacgatcaggtcgctctgctgcgcgcccacgcaggagagcatctgctgctgggcgccactaagcggagtatggtgttcaaagacgtgctgctgctggggaatgactatattgtccccaggcactgccctgaactggctgagatgagcagagtgtctatccgaatcctggatgaactggtgctgccattccaggagctgcagattgacgataacgaatacgcatacctgaaggccatcatctttttcgaccccgacgcacggggactgtccgatcctggccgcattaggagactgcgggctcaggtccaggtgagcctggaggactatatcaatgaccgccagtacgattcaagggggagatttggagaactgctgctgctgctgccaaccctgcagagtattacatggcagatgatcgagcagatccagttcattaaactgttcggcatggcaaagatcgacaacctgctgcaggagatgctgctgggaggggccccctctgatgctcctcatgcacaccacccactgcatccccacctgatgcaggaacatatgggcaccaatgtgatcgtcgccaacactatgcctacacacctgtccaatggacagatgtgtgagtggccacgaccccggggccaggctgcagcccctgaagctccacagcccgcacctccagggggaagcggcagcgagccctacaagctgctgcctggagccgtggcaaccattgtgaggccactggaagctatcccccagcctactattaccaaacaggaggtcatctgaggactagtccctgttcccagagcccacttttttttctttttttgaaataaaatagcctgtctttcagatctcaaaggctcttttcagagccaccaaaaaaaaaaaaaaaaaaaaaaaaaaaaaaaaaaaaaaaaaaaaaaaaaaaaaaaaaaaaaaaaaaaaaaaaaaaaaaaaaaaaaaaaaaaaaaaaaaaaa

SEQ ID NO: 4180 - RNA, 1586 nt, synthetic construct
  misc_feature 1..1586: note = mRNA a-1 (hSL-A100) (opt28) from Homo sapiens__NP_000448.3__HNF4A(39-474)(S87A_K106R_K108R_K126R_ K127R_S142A_S143A_S148A_T166A_S167A_S313A_S378A_T429A_T432A _S436A_K447R_K458R_S461E_K470R)
  source 1..1586: mol_type = other RNA
aggagagtcccgcagtcggcgtccagcggctctgcttgttcgtgtgtgtgtcgttgcaggccttattcaagcttaccatggacacatctccctcagagggcactaacctgaatgcccctaacagtctgggggtgagcgctctgtgcgcaatctgcggagacagggccaccggcaaacactacggggcttcctcttgtgatggatgcaagggctttttcagacgcgcagtccggaaaaatcatatgtacagctgccgattttcaaggcagtgcgtggtggacagagaccgccggaaccagtgcaggtattgtagactgaagaagtgcttccgagccggaatgcggcgcgaagctgtccagaatgagagggatagaattagtacacggcgagcagcctacgaagactccgcactgccaagcatcaacgctctgctgcaggccgaggtgctgtctaggcagatcgcagctcccgtgagcgggattaacggcgatatcagagccaaaaagattgcatccatcgctgacgtctgcgaatcaatgaaagagcagctgctggtgctggtggagtgggccaagtacatccctgcattttgcgaactgccactggacgatcaggtcgctctgctgcgcgcccacgcaggagagcatctgctgctgggcgccactaagcggagtatggtgttcaaagacgtgctgctgctggggaatgactatattgtccccaggcactgccctgaactggctgagatgagcagagtgtctatccgaatcctggatgaactggtgctgccattccaggagctgcagattgacgataacgaatacgcatacctgaaggccatcatctttttcgaccccgacgcaaaaggactgtccgatcctggcaagattaagcggctgcgcgctcaggtccaggtgagcctggaggactatatcaatgacaggcagtacgattcaagagggcggtttggagaactgctgctgctgctgccaaccctgcagagtattacatggcagatgatcgagcagatccagttcattaaactgttcggcatggcaaagatcgacaacctgctgcaggagatgctgctgggaggggccccctctgatgctcctcatgcacaccacccactgcatccccacctgatgcaggaacatatgggcaccaatgtgatcgtcgccaacactatgcctacacacctgtccaatggacagatgtgtgagtggccacgccccaggggccaggctgcagcccctgaagctccacagcccgcacctccagggggaagcggcagcgagccctacagactgctgcctggagccgtggcaaccattgtgcgaccactggaagctatcccccagcctactattacccggcaggaggtcatctgaggactagtccctgttcccagagcccacttttttttctttttttgaaataaaatagcctgtctttcagatctcaaaggctcttttcagagccaccaaaaaaaaaaaaaaaaaaaaaaaaaaaaaaaaaaaaaaaaaaaaaaaaaaaaaaaaaaaaaaaaaaaaaaaaaaaaaaaaaaaaaaaaaaaaaaaaaaaaa

SEQ ID NO: 4181 - RNA, 1586 nt, synthetic construct
  misc_feature 1..1586: note = mRNA a-1 (hSL-A100) (opt28) from Homo sapiens__NP_000448.3__HNF4A(39-474)(S87A_K106R_K108R_K126R_ K127R_S142A_S143A_S148A_T166A_S167A_K179R_K180R_K234R_K300R _K307R_K309R_S313A_S378A_T429A_T432A_S436A_K447R_K458R_S461 E_K470R)
  source 1..1586: mol_type = other RNA
aggagagtcccgcagtcggcgtccagcggctctgcttgttcgtgtgtgtgtcgttgcaggccttattcaagcttaccatggacacatctccctcagagggcactaacctgaatgcccctaacagtctgggggtgagcgctctgtgcgcaatctgcggagacagggccaccggcaaacactacggggcttcctcttgtgatggatgcaagggctttttcagacgcgcagtccggaaaaatcatatgtacagctgccgattttcaaggcagtgcgtggtggacagagaccgccggaaccagtgcaggtattgtagactgaagaagtgcttccgagccggaatgcggcgcgaagctgtccagaatgagagggatagaattagtacacggcgagcagcctacgaagactccgcactgccaagcatcaacgctctgctgcaggccgaggtgctgtctaggcagatcgcagctcccgtgagcgggattaacggcgatatcagagcccgccggattgcatccatcgctgacgtctgcgaatcaatgaaagagcagctgctggtgctggtggagtgggccaagtacatccctgcattttgcgaactgccactggacgatcaggtcgctctgctgagggcccacgcaggagagcatctgctgctgggcgccactagacgaagtatggtgttcaaagacgtgctgctgctggggaatgactatattgtcccccggcactgccctgaactggctgagatgagccgcgtgtctatcaggatcctggatgaactggtgctgccattccaggagctgcagattgacgataacgaatacgcatacctgaaggccatcatctttttcgaccccgacgcaagaggactgtccgatcctggccggattcgcaggctgagagctcaggtccaggtgagcctggaggactatatcaatgaccgacagtacgattcacgggggaggtttggagaactgctgctgctgctgccaaccctgcagagtattacatggcagatgatcgagcagatccagttcattaagctgttcggcatggcaaaaatcgacaacctgctgcaggagatgctgctgggaggggccccctctgatgctcctcatgcacaccacccactgcatccccacctgatgcaggaacatatgggcaccaatgtgatcgtcgccaacactatgcctacacacctgtccaatggacagatgtgtgagtggccaagaccccgcggccaggctgcagcccctgaagctccacagcccgcacctccagggggaagcggcagcgagccctaccggctgctgcctggagccgtggcaaccattgtgcgaccactggaagctatcccccagcctactattaccaggcaggaggtcatctgaggactagtccctgttcccagagcccacttttttttctttttttgaaataaaatagcctgtctttcagatctcaaaggctcttttcagagccaccaaaaaaaaaaaaaaaaaaaaaaaaaaaaaaaaaaaaaaaaaaaaaaaaaaaaaaaaaaaaaaaaaaaaaaaaaaaaaaaaaaaaaaaaaaaaaaaaaaaaa

SEQ ID NO: 4182 - RNA, 1586 nt, synthetic construct
  misc_feature 1..1586: note = mRNA a-1 (hSL-A100) (opt28) from Homo sapiens__NP_000448.3__HNF4A(39-474)(S87A_S95A_S99A_K106R_K1 08R_K126R_K127R_S142A_S143A_S148A_T166A_S167A_S313A_S378A_T 429A_T432A_S436A_K458R_S461E)
  source 1..1586: mol_type = other RNA
aggagagtcccgcagtcggcgtccagcggctctgcttgttcgtgtgtgtgtcgttgcaggccttattcaagcttaccatggacacatctccctcagagggcactaacctgaatgcccctaacagtctgggggtgagcgctctgtgcgcaatctgcggagacagggccaccggcaaacactacggggcttcctcttgtgatggatgcaagggctttttcagacgcgcagtccggaaaaatcatatgtacgcctgccgatttgctaggcagtgcgtggtggacagagaccgccggaaccagtgcaggtattgtagactgaagaagtgcttccgagcaggaatgcggcgcgaagccgtccagaatgagagggatagaattagcacacggcgagcagcttacgaagactcagccctgccaagtatcaacgcactgctgcaggctgaggtgctgtccaggcagatcgccgcacccgtgagcgggattaacggcgatatcagagctaaaaagattgcctctatcgcagacgtctgcgaaagcatgaaagagcagctgctggtgctggtggagtgggctaagtacatccctgccttttgcgaactgccactggacgatcaggtcgcactgctgcgcgcccacgctggagagcatctgctgctgggcgcaactaagcggtccatggtgttcaaagacgtgctgctgctggggaatgactatattgtccccaggcactgccctgaactggccgagatgtcaagagtgagtatccgaatcctggatgaactggtgctgccattccaggagctgcagattgacgataacgaatacgcatacctgaaggctatcatctttttcgaccccgacgcaaaaggactgagcgatcctggcaagattaagcggctgcgcgcccaggtccaggtgtctctggaggactatatcaatgacaggcagtacgattccagagggcggtttggagaactgctgctgctgctgccaaccctgcagagcattacatggcagatgatcgagcagatccagttcattaaactgttcggcatggctaagatcgacaacctgctgcaggagatgctgctgggaggggcaccctcagatgcccctcatgctcaccacccactgcatccccacctgatgcaggaacatatgggcaccaatgtgatcgtcgcaaacactatgcctacacacctgagtaatggacagatgtgtgagtggccacgccccaggggccaggccgctgcacctgaagccccacagcccgcacctccagggggatctggctccgagccctacaaactgctgcctggagctgtggccaccattgtgagaccactggaagcaatcccccagcctactattaccaagcaggaggtcatctgaggactagtccctgttcccagagcccacttttttttctttttttgaaataaaatagcctgtctttcagatctcaaaggctcttttcagagccaccaaaaaaaaaaaaaaaaaaaaaaaaaaaaaaaaaaaaaaaaaaaaaaaaaaaaaaaaaaaaaaaaaaaaaaaaaaaaaaaaaaaaaaaaaaaaaaaaaaaaa

SEQ ID NO: 4183 - RNA, 1586 nt, synthetic construct
  misc_feature 1..1586: note = mRNA a-1 (hSL-A100) (opt28) from Homo sapiens__NP_000448.3__HNF4A(39-474)(S87A_K106R_K108R_K126R_ K127R_S138A_T139A_S142A_S143A_S148A_T166A_S167A_S313A_S378A _T429A_T432A_S436A_K458R_S461E)
  source 1..1586: mol_type = other RNA
aggagagtcccgcagtcggcgtccagcggctctgcttgttcgtgtgtgtgtcgttgcaggccttattcaagcttaccatggacacatctccctcagagggcactaacctgaatgcccctaacagtctgggggtgagcgctctgtgcgcaatctgcggagacagggccaccggcaaacactacggggcttcctcttgtgatggatgcaagggctttttcagacgcgcagtccggaaaaatcatatgtacagctgccgattttcaaggcagtgcgtggtggacagagaccgccggaaccagtgcaggtattgtagactgaagaagtgcttccgagccggaatgcggcgcgaagctgtccagaatgagagggatagaattgcagcccggcgagcagcttacgaagacagtgccctgccatccatcaacgcactgctgcaggctgaggtgctgagcaggcagatcgccgcacccgtgtctgggattaacggcgatatcagagctaaaaagattgccagcatcgcagacgtctgcgaatccatgaaagagcagctgctggtgctggtggagtgggctaagtacatccctgccttttgcgaactgccactggacgatcaggtcgcactgctgcgcgcccacgctggagagcatctgctgctgggcgcaacaaagcggtcaatggtgttcaaagacgtgctgctgctggggaatgactatattgtccccaggcactgccctgaactggccgagatgagtagagtgagcatccgaatcctggatgaactggtgctgccattccaggagctgcagattgacgataacgaatacgcatacctgaaggctatcatctttttcgaccccgacgcaaaaggactgtctgatcctggcaagattaagcggctgcgcgcccaggtccaggtgtccctggaggactatatcaatgacaggcagtacgatagcagagggcggtttggagaactgctgctgctgctgccaactctgcagtcaattacctggcagatgatcgagcagatccagttcattaaactgttcggcatggctaagatcgacaacctgctgcaggagatgctgctgggaggggcacccagtgatgcccctcatgctcaccacccactgcatccccacctgatgcaggaacatatgggcacaaatgtgatcgtcgcaaacaccatgcctactcacctgtctaatggacagatgtgtgagtggccacgccccaggggccaggccgctgcacctgaagccccacagcccgcacctccagggggatccggcagcgagccctacaaactgctgcctggagctgtggccacaattgtgagaccactggaagcaatcccccagcctaccattactaagcaggaggtcatctgaggactagtccctgttcccagagcccacttttttttctttttttgaaataaaatagcctgtctttcagatctcaaaggctcttttcagagccaccaaaaaaaaaaaaaaaaaaaaaaaaaaaaaaaaaaaaaaaaaaaaaaaaaaaaaaaaaaaaaaaaaaaaaaaaaaaaaaaaaaaaaaaaaaaaaaaaaaaaa

SEQ ID NO: 4184 - RNA, 1586 nt, synthetic construct
  misc_feature 1..1586: note = mRNA a-1 (hSL-A100) (opt28) from Homo sapiens__NP_000448.3__HNF4A(39-474)(S87A_S95A_S99A_K106R_K1 08R_K126R_K127R_S138A_T139A_S142A_S143A_S148A_T166A_S167A_S 313A_S378A_T429A_T432A_S436A_K458R_S461E)
  source 1..1586: mol_type = other RNA
aggagagtcccgcagtcggcgtccagcggctctgcttgttcgtgtgtgtgtcgttgcaggccttattcaagcttaccatggacacatctccctcagagggcactaacctgaatgcccctaacagtctgggggtgagcgctctgtgcgcaatctgcggagacagggccaccggcaaacactacggggcttcctcttgtgatggatgcaagggctttttcagacgcgcagtccggaaaaatcatatgtacgcctgccgatttgctaggcagtgcgtggtggacagagaccgccggaaccagtgcaggtattgtagactgaagaagtgcttccgagcaggaatgcggcgcgaagccgtccagaatgagagggatagaattgcagctcggcgagccgcatacgaagacagcgctctgccatcaatcaacgccctgctgcaggcagaggtgctgagtaggcagatcgctgcccccgtgtccgggattaacggcgatatcagagctaaaaagattgcaagcatcgccgacgtctgcgaatctatgaaagagcagctgctggtgctggtggagtgggcaaagtacatccctgccttttgcgaactgccactggacgatcaggtcgctctgctgcgcgcacacgccggagagcatctgctgctgggcgcaacaaagcggagcatggtgttcaaagacgtgctgctgctggggaatgactatattgtccccaggcactgccctgaactggctgagatgtccagagtgtcaatccgaatcctggatgaactggtgctgccattccaggagctgcagattgacgataacgaatacgcatacctgaaggccatcatctttttcgaccccgacgctaaaggactgagtgatcctggcaagattaagcggctgcgcgcacaggtccaggtgagcctggaggactatatcaatgacaggcagtacgattctagagggcggtttggagaactgctgctgctgctgccaactctgcagtccattacctggcagatgatcgagcagatccagttcattaaactgttcggcatggccaagatcgacaacctgctgcaggagatgctgctgggaggggctcccagcgatgcacctcatgcccaccacccactgcatccccacctgatgcaggaacatatgggcacaaatgtgatcgtcgctaacaccatgcctactcacctgtcaaatggacagatgtgtgagtggccacgccccaggggccaggcagccgcacctgaagctccacagcccgcccctccagggggaagtggctctgagccctacaaactgctgcctggagcagtggctacaattgtgagaccactggaagccatcccccagcctaccattactaagcaggaggtcatctgaggactagtccctgttcccagagcccacttttttttctttttttgaaataaaatagcctgtctttcagatctcaaaggctcttttcagagccaccaaaaaaaaaaaaaaaaaaaaaaaaaaaaaaaaaaaaaaaaaaaaaaaaaaaaaaaaaaaaaaaaaaaaaaaaaaaaaaaaaaaaaaaaaaaaaaaaaaaaa

SEQ ID NO: 4185 - RNA, 1586 nt, synthetic construct
  misc_feature 1..1586: note = mRNA a-1 (hSL-A100) (opt29) from Homo sapiens__NP_000448.3__HNF4A(39-474)
  source 1..1586: mol_type = other RNA
aggagagtcccgcagtcggcgtccagcggctctgcttgttcgtgtgtgtgtcgttgcaggccttattcaagcttaccatggacaccagccctagcgagggcaccaacctgaacgcccctaatagcctgggagtgtccgccctgtgtgccatctgtggcgatagagccaccggcaagcactacggcgccagctcttgtgatggctgcaagggcttcttccggcggagcgtgcggaagaaccacatgtacagctgccggttcagccggcagtgcgtggtggacaaggataagcggaaccagtgccggtactgcagactgaagaagtgcttcagagccggcatgaagaaagaagccgtgcagaacgagcgggaccggatcagcaccagaagaagcagctacgaggacagcagcctgcccagcatcaacgccctgctgcaggccgaggtgctgagcagacagatcaccagcccagtgtccggcatcaacggcgacatccgggccaagaagatcgccagcattgccgacgtgtgcgagagcatgaaggaacagctgctggtgctggtggaatgggccaagtacatccccgccttttgcgagctgcccctggacgatcaggtggccctgctgagagcacacgccggcgaacatctgctgctgggagccaccaagcggagcatggtgttcaaggacgtgctgctgctgggcaacgactacatcgtgcccagacactgccctgagctggccgagatgagccgggtgtccatcagaatcctggacgaactggtgctgccgtttcaggaactgcagatcgacgacaacgagtacgcctacctgaaggccatcatctttttcgaccccgacgccaagggcctgagcgaccctggcaagatcaagcggctgagaagccaggtgcaagtgtccctggaagattacatcaacgaccggcagtacgacagccggggcagatttggcgaactgctcctgctgctgcccaccctgcagagcatcacctggcagatgatcgagcagatccagttcatcaagctgttcggcatggccaagatcgacaatctgctgcaggaaatgctgctcgggggcagcccttctgatgcccctcatgcccaccaccctctgcaccctcacctgatgcaagaacacatgggcaccaatgtgatcgtggccaacacaatgcccacccacctgagcaacggccagatgtgcgagtggcccagacctagaggacaggccgccacacctgagacacctcagccttctccacctggcggctctggcagcgagccttacaaactgctgcctggcgctgtggccaccatcgtgaaacctctgagcgccatcccccagcccaccatcaccaagcaggaagtgatctgaggactagtccctgttcccagagcccacttttttttctttttttgaaataaaatagcctgtctttcagatctcaaaggctcttttcagagccaccaaaaaaaaaaaaaaaaaaaaaaaaaaaaaaaaaaaaaaaaaaaaaaaaaaaaaaaaaaaaaaaaaaaaaaaaaaaaaaaaaaaaaaaaaaaaaaaaaaaaa

SEQ ID NO: 4186 - RNA, 1586 nt, synthetic construct
  misc_feature 1..1586: note = mRNA a-1 (hSL-A100) (opt29) from Homo sapiens__NP_000448.3__HNF4A(39-474)(S313A)
  source 1..1586: mol_type = other RNA
aggagagtcccgcagtcggcgtccagcggctctgcttgttcgtgtgtgtgtcgttgcaggccttattcaagcttaccatggacaccagccctagcgagggcaccaacctgaacgcccctaatagcctgggagtgtccgccctgtgtgccatctgtggcgatagagccaccggcaagcactacggcgccagctcttgtgatggctgcaagggcttcttccggcggagcgtgcggaagaaccacatgtacagctgccggttcagccggcagtgcgtggtggacaaggataagcggaaccagtgccggtactgcagactgaagaagtgcttcagagccggcatgaagaaagaagccgtgcagaacgagcgggaccggatcagcaccagaagaagcagctacgaggacagcagcctgcccagcatcaacgccctgctgcaggccgaggtgctgagcagacagatcaccagcccagtgtccggcatcaacggcgacatccgggccaagaagatcgccagcattgccgacgtgtgcgagagcatgaaggaacagctgctggtgctggtggaatgggccaagtacatccccgccttttgcgagctgcccctggacgatcaggtggccctgctgagagcacacgccggcgaacatctgctgctgggagccaccaagcggagcatggtgttcaaggacgtgctgctgctgggcaacgactacatcgtgcccagacactgccctgagctggccgagatgagccgggtgtccatcagaatcctggacgaactggtgctgccgtttcaggaactgcagatcgacgacaacgagtacgcctacctgaaggccatcatctttttcgaccccgacgccaagggcctgagcgaccctggcaagatcaagcggctgagagcccaggtgcaagtgtccctggaagattacatcaacgaccggcagtacgacagccggggcagatttggcgaactgctcctgctgctgcccaccctgcagagcatcacctggcagatgatcgagcagatccagttcatcaagctgttcggcatggccaagatcgacaatctgctgcaggaaatgctgctcgggggcagcccttctgatgcccctcatgcccaccaccctctgcaccctcacctgatgcaagaacacatgggcaccaatgtgatcgtggccaacacaatgcccacccacctgagcaacggccagatgtgcgagtggcccagacctagaggacaggccgccacacctgagacacctcagccttctccacctggcggctctggcagcgagccttacaaactgctgcctggcgctgtggccaccatcgtgaaacctctgagcgccatcccccagcccaccatcaccaagcaggaagtgatctgaggactagtccctgttcccagagcccacttttttttctttttttgaaataaaatagcctgtctttcagatctcaaaggctcttttcagagccaccaaaaaaaaaaaaaaaaaaaaaaaaaaaaaaaaaaaaaaaaaaaaaaaaaaaaaaaaaaaaaaaaaaaaaaaaaaaaaaaaaaaaaaaaaaaaaaaaaaaaa

SEQ ID NO: 4187 - RNA, 1586 nt, synthetic construct
  misc_feature 1..1586: note = mRNA a-1 (hSL-A100) (opt29) from Homo sapiens__NP_000448.3__HNF4A(39-474)(S313E)
  source 1..1586: mol_type = other RNA
aggagagtcccgcagtcggcgtccagcggctctgcttgttcgtgtgtgtgtcgttgcaggccttattcaagcttaccatggacaccagccctagcgagggcaccaacctgaacgcccctaatagcctgggagtgtccgccctgtgtgccatctgtggcgatagagccaccggcaagcactacggcgccagctcttgtgatggctgcaagggcttcttccggcggagcgtgcggaagaaccacatgtacagctgccggttcagccggcagtgcgtggtggacaaggataagcggaaccagtgccggtactgcagactgaagaagtgcttcagagccggcatgaagaaagaagccgtgcagaacgagcgggaccggatcagcaccagaagaagcagctacgaggacagcagcctgcccagcatcaacgccctgctgcaggccgaggtgctgagcagacagatcaccagcccagtgtccggcatcaacggcgacatccgggccaagaagatcgccagcattgccgacgtgtgcgagagcatgaaggaacagctgctggtgctggtggaatgggccaagtacatccccgccttttgcgagctgcccctggacgatcaggtggccctgctgagagcacacgccggcgaacatctgctgctgggagccaccaagcggagcatggtgttcaaggacgtgctgctgctgggcaacgactacatcgtgcccagacactgccctgagctggccgagatgagccgggtgtccatcagaatcctggacgaactggtgctgccgtttcaggaactgcagatcgacgacaacgagtacgcctacctgaaggccatcatctttttcgaccccgacgccaagggcctgagcgaccctggcaagatcaagcggctgagagaacaggtgcaagtgtccctggaagattacatcaacgaccggcagtacgacagccggggcagatttggcgaactgctcctgctgctgcccaccctgcagagcatcacctggcagatgatcgagcagatccagttcatcaagctgttcggcatggccaagatcgacaatctgctgcaggaaatgctgctcgggggcagcccttctgatgcccctcatgcccaccaccctctgcaccctcacctgatgcaagaacacatgggcaccaatgtgatcgtggccaacacaatgcccacccacctgagcaacggccagatgtgcgagtggcccagacctagaggacaggccgccacacctgagacacctcagccttctccacctggcggctctggcagcgagccttacaaactgctgcctggcgctgtggccaccatcgtgaaacctctgagcgccatcccccagcccaccatcaccaagcaggaagtgatctgaggactagtccctgttcccagagcccacttttttttctttttttgaaataaaatagcctgtctttcagatctcaaaggctcttttcagagccaccaaaaaaaaaaaaaaaaaaaaaaaaaaaaaaaaaaaaaaaaaaaaaaaaaaaaaaaaaaaaaaaaaaaaaaaaaaaaaaaaaaaaaaaaaaaaaaaaaaaaa

SEQ ID NO: 4188 - RNA, 1586 nt, synthetic construct
  misc_feature 1..1586: note = mRNA a-1 (hSL-A100) (opt29) from Homo sapiens__NP_000448.3__HNF4A(39-474)(S142A_S143A)
  source 1..1586: mol_type = other RNA
aggagagtcccgcagtcggcgtccagcggctctgcttgttcgtgtgtgtgtcgttgcaggccttattcaagcttaccatggacaccagccctagcgagggcaccaacctgaacgcccctaatagcctgggagtgtccgccctgtgtgccatctgtggcgatagagccaccggcaagcactacggcgccagctcttgtgatggctgcaagggcttcttccggcggagcgtgcggaagaaccacatgtacagctgccggttcagccggcagtgcgtggtggacaaggataagcggaaccagtgccggtactgcagactgaagaagtgcttcagagccggcatgaagaaagaagccgtgcagaacgagcgggaccggatcagcaccagaagagccgcctacgaggacagcagcctgcccagcatcaacgccctgctgcaggccgaggtgctgagcagacagatcaccagcccagtgtccggcatcaacggcgacatccgggccaagaagatcgccagcattgccgacgtgtgcgagagcatgaaggaacagctgctggtgctggtggaatgggccaagtacatccccgccttttgcgagctgcccctggacgatcaggtggccctgctgagagcacacgccggcgaacatctgctgctgggagccaccaagcggagcatggtgttcaaggacgtgctgctgctgggcaacgactacatcgtgcccagacactgccctgagctggccgagatgagccgggtgtccatcagaatcctggacgaactggtgctgccgtttcaggaactgcagatcgacgacaacgagtacgcctacctgaaggccatcatctttttcgaccccgacgccaagggcctgagcgaccctggcaagatcaagcggctgagaagccaggtgcaagtgtccctggaagattacatcaacgaccggcagtacgacagccggggcagatttggcgaactgctcctgctgctgcccaccctgcagagcatcacctggcagatgatcgagcagatccagttcatcaagctgttcggcatggccaagatcgacaatctgctgcaggaaatgctgctcgggggcagcccttctgatgcccctcatgcccaccaccctctgcaccctcacctgatgcaagaacacatgggcaccaatgtgatcgtggccaacacaatgcccacccacctgagcaacggccagatgtgcgagtggcccagacctagaggacaggccgccacacctgagacacctcagccttctccacctggcggctctggcagcgagccttacaaactgctgcctggcgctgtggccaccatcgtgaaacctctgagcgccatcccccagcccaccatcaccaagcaggaagtgatctgaggactagtccctgttcccagagcccacttttttttctttttttgaaataaaatagcctgtctttcagatctcaaaggctcttttcagagccaccaaaaaaaaaaaaaaaaaaaaaaaaaaaaaaaaaaaaaaaaaaaaaaaaaaaaaaaaaaaaaaaaaaaaaaaaaaaaaaaaaaaaaaaaaaaaaaaaaaaaa

SEQ ID NO: 4189 - RNA, 1586 nt, synthetic construct
  misc_feature 1..1586: note = mRNA a-1 (hSL-A100) (opt29) from Homo sapiens__NP_000448.3__HNF4A(39-474)(S142E_S143E)
  source 1..1586: mol_type = other RNA
aggagagtcccgcagtcggcgtccagcggctctgcttgttcgtgtgtgtgtcgttgcaggccttattcaagcttaccatggacaccagccctagcgagggcaccaacctgaacgcccctaatagcctgggagtgtccgccctgtgtgccatctgtggcgatagagccaccggcaagcactacggcgccagctcttgtgatggctgcaagggcttcttccggcggagcgtgcggaagaaccacatgtacagctgccggttcagccggcagtgcgtggtggacaaggataagcggaaccagtgccggtactgcagactgaagaagtgcttcagagccggcatgaagaaagaagccgtgcagaacgagcgggaccggatcagcaccagaagagaagagtacgaggacagcagcctgcccagcatcaacgccctgctgcaggccgaggtgctgagcagacagatcaccagcccagtgtccggcatcaacggcgacatccgggccaagaagatcgccagcattgccgacgtgtgcgagagcatgaaggaacagctgctggtgctggtggaatgggccaagtacatccccgccttttgcgagctgcccctggacgatcaggtggccctgctgagagcacacgccggcgaacatctgctgctgggagccaccaagcggagcatggtgttcaaggacgtgctgctgctgggcaacgactacatcgtgcccagacactgccctgagctggccgagatgagccgggtgtccatcagaatcctggacgaactggtgctgccgtttcaggaactgcagatcgacgacaacgagtacgcctacctgaaggccatcatctttttcgaccccgacgccaagggcctgagcgaccctggcaagatcaagcggctgagaagccaggtgcaagtgtccctggaagattacatcaacgaccggcagtacgacagccggggcagatttggcgaactgctcctgctgctgcccaccctgcagagcatcacctggcagatgatcgagcagatccagttcatcaagctgttcggcatggccaagatcgacaatctgctgcaggaaatgctgctcgggggcagcccttctgatgcccctcatgcccaccaccctctgcaccctcacctgatgcaagaacacatgggcaccaatgtgatcgtggccaacacaatgcccacccacctgagcaacggccagatgtgcgagtggcccagacctagaggacaggccgccacacctgagacacctcagccttctccacctggcggctctggcagcgagccttacaaactgctgcctggcgctgtggccaccatcgtgaaacctctgagcgccatcccccagcccaccatcaccaagcaggaagtgatctgaggactagtccctgttcccagagcccacttttttttctttttttgaaataaaatagcctgtctttcagatctcaaaggctcttttcagagccaccaaaaaaaaaaaaaaaaaaaaaaaaaaaaaaaaaaaaaaaaaaaaaaaaaaaaaaaaaaaaaaaaaaaaaaaaaaaaaaaaaaaaaaaaaaaaaaaaaaaaa

SEQ ID NO: 4190 - RNA, 1586 nt, synthetic construct
  misc_feature 1..1586: note = mRNA a-1 (hSL-A100) (opt29) from Homo sapiens__NP_000448.3__HNF4A(39-474)(S143A)
  source 1..1586: mol_type = other RNA
aggagagtcccgcagtcggcgtccagcggctctgcttgttcgtgtgtgtgtcgttgcaggccttattcaagcttaccatggacaccagccctagcgagggcaccaacctgaacgcccctaatagcctgggagtgtccgccctgtgtgccatctgtggcgatagagccaccggcaagcactacggcgccagctcttgtgatggctgcaagggcttcttccggcggagcgtgcggaagaaccacatgtacagctgccggttcagccggcagtgcgtggtggacaaggataagcggaaccagtgccggtactgcagactgaagaagtgcttcagagccggcatgaagaaagaagccgtgcagaacgagcgggaccggatcagcaccagaagaagcgcctacgaggacagcagcctgcccagcatcaacgccctgctgcaggccgaggtgctgagcagacagatcaccagcccagtgtccggcatcaacggcgacatccgggccaagaagatcgccagcattgccgacgtgtgcgagagcatgaaggaacagctgctggtgctggtggaatgggccaagtacatccccgccttttgcgagctgcccctggacgatcaggtggccctgctgagagcacacgccggcgaacatctgctgctgggagccaccaagcggagcatggtgttcaaggacgtgctgctgctgggcaacgactacatcgtgcccagacactgccctgagctggccgagatgagccgggtgtccatcagaatcctggacgaactggtgctgccgtttcaggaactgcagatcgacgacaacgagtacgcctacctgaaggccatcatctttttcgaccccgacgccaagggcctgagcgaccctggcaagatcaagcggctgagaagccaggtgcaagtgtccctggaagattacatcaacgaccggcagtacgacagccggggcagatttggcgaactgctcctgctgctgcccaccctgcagagcatcacctggcagatgatcgagcagatccagttcatcaagctgttcggcatggccaagatcgacaatctgctgcaggaaatgctgctcgggggcagcccttctgatgcccctcatgcccaccaccctctgcaccctcacctgatgcaagaacacatgggcaccaatgtgatcgtggccaacacaatgcccacccacctgagcaacggccagatgtgcgagtggcccagacctagaggacaggccgccacacctgagacacctcagccttctccacctggcggctctggcagcgagccttacaaactgctgcctggcgctgtggccaccatcgtgaaacctctgagcgccatcccccagcccaccatcaccaagcaggaagtgatctgaggactagtccctgttcccagagcccacttttttttctttttttgaaataaaatagcctgtctttcagatctcaaaggctcttttcagagccaccaaaaaaaaaaaaaaaaaaaaaaaaaaaaaaaaaaaaaaaaaaaaaaaaaaaaaaaaaaaaaaaaaaaaaaaaaaaaaaaaaaaaaaaaaaaaaaaaaaaaa

SEQ ID NO: 4191 - RNA, 1586 nt, synthetic construct
  misc_feature 1..1586: note = mRNA a-1 (hSL-A100) (opt29) from Homo sapiens__NP_000448.3__HNF4A(39-474)(T166A)
  source 1..1586: mol_type = other RNA
aggagagtcccgcagtcggcgtccagcggctctgcttgttcgtgtgtgtgtcgttgcaggccttattcaagcttaccatggacaccagccctagcgagggcaccaacctgaacgcccctaatagcctgggagtgtccgccctgtgtgccatctgtggcgatagagccaccggcaagcactacggcgccagctcttgtgatggctgcaagggcttcttccggcggagcgtgcggaagaaccacatgtacagctgccggttcagccggcagtgcgtggtggacaaggataagcggaaccagtgccggtactgcagactgaagaagtgcttcagagccggcatgaagaaagaagccgtgcagaacgagcgggaccggatcagcaccagaagaagcagctacgaggacagcagcctgcccagcatcaacgccctgctgcaggccgaggtgctgagcagacagatcgccagcccagtgtccggcatcaacggcgacatccgggccaagaagatcgccagcattgccgacgtgtgcgagagcatgaaggaacagctgctggtgctggtggaatgggccaagtacatccccgccttttgcgagctgcccctggacgatcaggtggccctgctgagagcacacgccggcgaacatctgctgctgggagccaccaagcggagcatggtgttcaaggacgtgctgctgctgggcaacgactacatcgtgcccagacactgccctgagctggccgagatgagccgggtgtccatcagaatcctggacgaactggtgctgccgtttcaggaactgcagatcgacgacaacgagtacgcctacctgaaggccatcatctttttcgaccccgacgccaagggcctgagcgaccctggcaagatcaagcggctgagaagccaggtgcaagtgtccctggaagattacatcaacgaccggcagtacgacagccggggcagatttggcgaactgctcctgctgctgcccaccctgcagagcatcacctggcagatgatcgagcagatccagttcatcaagctgttcggcatggccaagatcgacaatctgctgcaggaaatgctgctcgggggcagcccttctgatgcccctcatgcccaccaccctctgcaccctcacctgatgcaagaacacatgggcaccaatgtgatcgtggccaacacaatgcccacccacctgagcaacggccagatgtgcgagtggcccagacctagaggacaggccgccacacctgagacacctcagccttctccacctggcggctctggcagcgagccttacaaactgctgcctggcgctgtggccaccatcgtgaaacctctgagcgccatcccccagcccaccatcaccaagcaggaagtgatctgaggactagtccctgttcccagagcccacttttttttctttttttgaaataaaatagcctgtctttcagatctcaaaggctcttttcagagccaccaaaaaaaaaaaaaaaaaaaaaaaaaaaaaaaaaaaaaaaaaaaaaaaaaaaaaaaaaaaaaaaaaaaaaaaaaaaaaaaaaaaaaaaaaaaaaaaaaaaaa

SEQ ID NO: 4192 - RNA, 1586 nt, synthetic construct
  misc_feature 1..1586: note = mRNA a-1 (hSL-A100) (opt29) from Homo sapiens__NP_000448.3__HNF4A(39-474)(S167E)
  source 1..1586: mol_type = other RNA
aggagagtcccgcagtcggcgtccagcggctctgcttgttcgtgtgtgtgtcgttgcaggccttattcaagcttaccatggacaccagccctagcgagggcaccaacctgaacgcccctaatagcctgggagtgtccgccctgtgtgccatctgtggcgatagagccaccggcaagcactacggcgccagctcttgtgatggctgcaagggcttcttccggcggagcgtgcggaagaaccacatgtacagctgccggttcagccggcagtgcgtggtggacaaggataagcggaaccagtgccggtactgcagactgaagaagtgcttcagagccggcatgaagaaagaagccgtgcagaacgagcgggaccggatcagcaccagaagaagcagctacgaggacagcagcctgcccagcatcaacgccctgctgcaggccgaggtgctgagcagacagatcaccgaaccagtgtccggcatcaacggcgacatccgggccaagaagatcgccagcattgccgacgtgtgcgagagcatgaaggaacagctgctggtgctggtggaatgggccaagtacatccccgccttttgcgagctgcccctggacgatcaggtggccctgctgagagcacacgccggcgaacatctgctgctgggagccaccaagcggagcatggtgttcaaggacgtgctgctgctgggcaacgactacatcgtgcccagacactgccctgagctggccgagatgagccgggtgtccatcagaatcctggacgaactggtgctgccgtttcaggaactgcagatcgacgacaacgagtacgcctacctgaaggccatcatctttttcgaccccgacgccaagggcctgagcgaccctggcaagatcaagcggctgagaagccaggtgcaagtgtccctggaagattacatcaacgaccggcagtacgacagccggggcagatttggcgaactgctcctgctgctgcccaccctgcagagcatcacctggcagatgatcgagcagatccagttcatcaagctgttcggcatggccaagatcgacaatctgctgcaggaaatgctgctcgggggcagcccttctgatgcccctcatgcccaccaccctctgcaccctcacctgatgcaagaacacatgggcaccaatgtgatcgtggccaacacaatgcccacccacctgagcaacggccagatgtgcgagtggcccagacctagaggacaggccgccacacctgagacacctcagccttctccacctggcggctctggcagcgagccttacaaactgctgcctggcgctgtggccaccatcgtgaaacctctgagcgccatcccccagcccaccatcaccaagcaggaagtgatctgaggactagtccctgttcccagagcccacttttttttctttttttgaaataaaatagcctgtctttcagatctcaaaggctcttttcagagccaccaaaaaaaaaaaaaaaaaaaaaaaaaaaaaaaaaaaaaaaaaaaaaaaaaaaaaaaaaaaaaaaaaaaaaaaaaaaaaaaaaaaaaaaaaaaaaaaaaaaaa

SEQ ID NO: 4193 - RNA, 1586 nt, synthetic construct
  misc_feature 1..1586: note = mRNA a-1 (hSL-A100) (opt29) from Homo sapiens__NP_000448.3__HNF4A(39-474)(S167A)
  source 1..1586: mol_type = other RNA
aggagagtcccgcagtcggcgtccagcggctctgcttgttcgtgtgtgtgtcgttgcaggccttattcaagcttaccatggacaccagccctagcgagggcaccaacctgaacgcccctaatagcctgggagtgtccgccctgtgtgccatctgtggcgatagagccaccggcaagcactacggcgccagctcttgtgatggctgcaagggcttcttccggcggagcgtgcggaagaaccacatgtacagctgccggttcagccggcagtgcgtggtggacaaggataagcggaaccagtgccggtactgcagactgaagaagtgcttcagagccggcatgaagaaagaagccgtgcagaacgagcgggaccggatcagcaccagaagaagcagctacgaggacagcagcctgcccagcatcaacgccctgctgcaggccgaggtgctgagcagacagatcaccgccccagtgtccggcatcaacggcgacatccgggccaagaagatcgccagcattgccgacgtgtgcgagagcatgaaggaacagctgctggtgctggtggaatgggccaagtacatccccgccttttgcgagctgcccctggacgatcaggtggccctgctgagagcacacgccggcgaacatctgctgctgggagccaccaagcggagcatggtgttcaaggacgtgctgctgctgggcaacgactacatcgtgcccagacactgccctgagctggccgagatgagccgggtgtccatcagaatcctggacgaactggtgctgccgtttcaggaactgcagatcgacgacaacgagtacgcctacctgaaggccatcatctttttcgaccccgacgccaagggcctgagcgaccctggcaagatcaagcggctgagaagccaggtgcaagtgtccctggaagattacatcaacgaccggcagtacgacagccggggcagatttggcgaactgctcctgctgctgcccaccctgcagagcatcacctggcagatgatcgagcagatccagttcatcaagctgttcggcatggccaagatcgacaatctgctgcaggaaatgctgctcgggggcagcccttctgatgcccctcatgcccaccaccctctgcaccctcacctgatgcaagaacacatgggcaccaatgtgatcgtggccaacacaatgcccacccacctgagcaacggccagatgtgcgagtggcccagacctagaggacaggccgccacacctgagacacctcagccttctccacctggcggctctggcagcgagccttacaaactgctgcctggcgctgtggccaccatcgtgaaacctctgagcgccatcccccagcccaccatcaccaagcaggaagtgatctgaggactagtccctgttcccagagcccacttttttttctttttttgaaataaaatagcctgtctttcagatctcaaaggctcttttcagagccaccaaaaaaaaaaaaaaaaaaaaaaaaaaaaaaaaaaaaaaaaaaaaaaaaaaaaaaaaaaaaaaaaaaaaaaaaaaaaaaaaaaaaaaaaaaaaaaaaaaaaa

SEQ ID NO: 4194 - RNA, 1586 nt, synthetic construct
  misc_feature 1..1586: note = mRNA a-1 (hSL-A100) (opt29) from Homo sapiens__NP_000448.3__HNF4A(39-474)(S167A_S378A_T429A_T432A _S436A)
  source 1..1586: mol_type = other RNA
aggagagtcccgcagtcggcgtccagcggctctgcttgttcgtgtgtgtgtcgttgcaggccttattcaagcttaccatggacaccagccctagcgagggcaccaacctgaacgcccctaatagcctgggagtgtccgccctgtgtgccatctgtggcgatagagccaccggcaagcactacggcgccagctcttgtgatggctgcaagggcttcttccggcggagcgtgcggaagaaccacatgtacagctgccggttcagccggcagtgcgtggtggacaaggataagcggaaccagtgccggtactgcagactgaagaagtgcttcagagccggcatgaagaaagaagccgtgcagaacgagcgggaccggatcagcaccagaagaagcagctacgaggacagcagcctgcccagcatcaacgccctgctgcaggccgaggtgctgagcagacagatcaccgccccagtgtccggcatcaacggcgacatccgggccaagaagatcgccagcattgccgacgtgtgcgagagcatgaaggaacagctgctggtgctggtggaatgggccaagtacatccccgccttttgcgagctgcccctggacgatcaggtggccctgctgagagcacacgccggcgaacatctgctgctgggagccaccaagcggagcatggtgttcaaggacgtgctgctgctgggcaacgactacatcgtgcccagacactgccctgagctggccgagatgagccgggtgtccatcagaatcctggacgaactggtgctgccgtttcaggaactgcagatcgacgacaacgagtacgcctacctgaaggccatcatctttttcgaccccgacgccaagggcctgagcgaccctggcaagatcaagcggctgagaagccaggtgcaagtgtccctggaagattacatcaacgaccggcagtacgacagccggggcagatttggcgaactgctcctgctgctgcccaccctgcagagcatcacctggcagatgatcgagcagatccagttcatcaagctgttcggcatggccaagatcgacaatctgctgcaggaaatgctgctcgggggcgccccttctgatgcccctcatgcccaccaccctctgcaccctcacctgatgcaagaacacatgggcaccaatgtgatcgtggccaacacaatgcccacccacctgagcaacggccagatgtgcgagtggcccagacctagaggacaggccgccgcccctgaggcccctcagcctgccccacctggcggctctggcagcgagccttacaaactgctgcctggcgctgtggccaccatcgtgaaacctctgagcgccatcccccagcccaccatcaccaagcaggaagtgatctgaggactagtccctgttcccagagcccacttttttttctttttttgaaataaaatagcctgtctttcagatctcaaaggctcttttcagagccaccaaaaaaaaaaaaaaaaaaaaaaaaaaaaaaaaaaaaaaaaaaaaaaaaaaaaaaaaaaaaaaaaaaaaaaaaaaaaaaaaaaaaaaaaaaaaaaaaaaaaa

SEQ ID NO: 4195 - RNA, 1586 nt, synthetic construct
  misc_feature 1..1586: note = mRNA a-1 (hSL-A100) (opt29) from Homo sapiens__NP_000448.3__HNF4A(39-474)(S167E_S378E_T429E_T432E _S436E)
  source 1..1586: mol_type = other RNA
aggagagtcccgcagtcggcgtccagcggctctgcttgttcgtgtgtgtgtcgttgcaggccttattcaagcttaccatggacaccagccctagcgagggcaccaacctgaacgcccctaatagcctgggagtgtccgccctgtgtgccatctgtggcgatagagccaccggcaagcactacggcgccagctcttgtgatggctgcaagggcttcttccggcggagcgtgcggaagaaccacatgtacagctgccggttcagccggcagtgcgtggtggacaaggataagcggaaccagtgccggtactgcagactgaagaagtgcttcagagccggcatgaagaaagaagccgtgcagaacgagcgggaccggatcagcaccagaagaagcagctacgaggacagcagcctgcccagcatcaacgccctgctgcaggccgaggtgctgagcagacagatcaccgaaccagtgtccggcatcaacggcgacatccgggccaagaagatcgccagcattgccgacgtgtgcgagagcatgaaggaacagctgctggtgctggtggaatgggccaagtacatccccgccttttgcgagctgcccctggacgatcaggtggccctgctgagagcacacgccggcgaacatctgctgctgggagccaccaagcggagcatggtgttcaaggacgtgctgctgctgggcaacgactacatcgtgcccagacactgccctgagctggccgagatgagccgggtgtccatcagaatcctggacgaactggtgctgccgtttcaggaactgcagatcgacgacaacgagtacgcctacctgaaggccatcatctttttcgaccccgacgccaagggcctgagcgaccctggcaagatcaagcggctgagaagccaggtgcaagtgtccctggaagattacatcaacgaccggcagtacgacagccggggcagatttggcgaactgctcctgctgctgcccaccctgcagagcatcacctggcagatgatcgagcagatccagttcatcaagctgttcggcatggccaagatcgacaatctgctgcaggaaatgctgctcgggggcgagccttctgatgcccctcatgcccaccaccctctgcaccctcacctgatgcaagaacacatgggcaccaatgtgatcgtggccaacacaatgcccacccacctgagcaacggccagatgtgcgagtggcccagacctagaggacaggccgccgaacctgaggagcctcagcctgaaccacctggcggctctggcagcgagccttacaaactgctgcctggcgctgtggccaccatcgtgaaacctctgagcgccatcccccagcccaccatcaccaagcaggaagtgatctgaggactagtccctgttcccagagcccacttttttttctttttttgaaataaaatagcctgtctttcagatctcaaaggctcttttcagagccaccaaaaaaaaaaaaaaaaaaaaaaaaaaaaaaaaaaaaaaaaaaaaaaaaaaaaaaaaaaaaaaaaaaaaaaaaaaaaaaaaaaaaaaaaaaaaaaaaaaaaa

SEQ ID NO: 4196 - RNA, 1586 nt, synthetic construct
  misc_feature 1..1586: note = mRNA a-1 (hSL-A100) (opt29) from Homo sapiens__NP_000448.3__HNF4A(39-474)(S87A)
  source 1..1586: mol_type = other RNA
aggagagtcccgcagtcggcgtccagcggctctgcttgttcgtgtgtgtgtcgttgcaggccttattcaagcttaccatggacaccagccctagcgagggcaccaacctgaacgcccctaatagcctgggagtgtccgccctgtgtgccatctgtggcgatagagccaccggcaagcactacggcgccagctcttgtgatggctgcaagggcttcttccggcgggccgtgcggaagaaccacatgtacagctgccggttcagccggcagtgcgtggtggacaaggataagcggaaccagtgccggtactgcagactgaagaagtgcttcagagccggcatgaagaaagaagccgtgcagaacgagcgggaccggatcagcaccagaagaagcagctacgaggacagcagcctgcccagcatcaacgccctgctgcaggccgaggtgctgagcagacagatcaccagcccagtgtccggcatcaacggcgacatccgggccaagaagatcgccagcattgccgacgtgtgcgagagcatgaaggaacagctgctggtgctggtggaatgggccaagtacatccccgccttttgcgagctgcccctggacgatcaggtggccctgctgagagcacacgccggcgaacatctgctgctgggagccaccaagcggagcatggtgttcaaggacgtgctgctgctgggcaacgactacatcgtgcccagacactgccctgagctggccgagatgagccgggtgtccatcagaatcctggacgaactggtgctgccgtttcaggaactgcagatcgacgacaacgagtacgcctacctgaaggccatcatctttttcgaccccgacgccaagggcctgagcgaccctggcaagatcaagcggctgagaagccaggtgcaagtgtccctggaagattacatcaacgaccggcagtacgacagccggggcagatttggcgaactgctcctgctgctgcccaccctgcagagcatcacctggcagatgatcgagcagatccagttcatcaagctgttcggcatggccaagatcgacaatctgctgcaggaaatgctgctcgggggcagcccttctgatgcccctcatgcccaccaccctctgcaccctcacctgatgcaagaacacatgggcaccaatgtgatcgtggccaacacaatgcccacccacctgagcaacggccagatgtgcgagtggcccagacctagaggacaggccgccacacctgagacacctcagccttctccacctggcggctctggcagcgagccttacaaactgctgcctggcgctgtggccaccatcgtgaaacctctgagcgccatcccccagcccaccatcaccaagcaggaagtgatctgaggactagtccctgttcccagagcccacttttttttctttttttgaaataaaatagcctgtctttcagatctcaaaggctcttttcagagccaccaaaaaaaaaaaaaaaaaaaaaaaaaaaaaaaaaaaaaaaaaaaaaaaaaaaaaaaaaaaaaaaaaaaaaaaaaaaaaaaaaaaaaaaaaaaaaaaaaaaaa

SEQ ID NO: 4197 - RNA, 1586 nt, synthetic construct
  misc_feature 1..1586: note = mRNA a-1 (hSL-A100) (opt29) from Homo sapiens__NP_000448.3__HNF4A(39-474)(S87E)
  source 1..1586: mol_type = other RNA
aggagagtcccgcagtcggcgtccagcggctctgcttgttcgtgtgtgtgtcgttgcaggccttattcaagcttaccatggacaccagccctagcgagggcaccaacctgaacgcccctaatagcctgggagtgtccgccctgtgtgccatctgtggcgatagagccaccggcaagcactacggcgccagctcttgtgatggctgcaagggcttcttccggcgggaggtgcggaagaaccacatgtacagctgccggttcagccggcagtgcgtggtggacaaggataagcggaaccagtgccggtactgcagactgaagaagtgcttcagagccggcatgaagaaagaagccgtgcagaacgagcgggaccggatcagcaccagaagaagcagctacgaggacagcagcctgcccagcatcaacgccctgctgcaggccgaggtgctgagcagacagatcaccagcccagtgtccggcatcaacggcgacatccgggccaagaagatcgccagcattgccgacgtgtgcgagagcatgaaggaacagctgctggtgctggtggaatgggccaagtacatccccgccttttgcgagctgcccctggacgatcaggtggccctgctgagagcacacgccggcgaacatctgctgctgggagccaccaagcggagcatggtgttcaaggacgtgctgctgctgggcaacgactacatcgtgcccagacactgccctgagctggccgagatgagccgggtgtccatcagaatcctggacgaactggtgctgccgtttcaggaactgcagatcgacgacaacgagtacgcctacctgaaggccatcatctttttcgaccccgacgccaagggcctgagcgaccctggcaagatcaagcggctgagaagccaggtgcaagtgtccctggaagattacatcaacgaccggcagtacgacagccggggcagatttggcgaactgctcctgctgctgcccaccctgcagagcatcacctggcagatgatcgagcagatccagttcatcaagctgttcggcatggccaagatcgacaatctgctgcaggaaatgctgctcgggggcagcccttctgatgcccctcatgcccaccaccctctgcaccctcacctgatgcaagaacacatgggcaccaatgtgatcgtggccaacacaatgcccacccacctgagcaacggccagatgtgcgagtggcccagacctagaggacaggccgccacacctgagacacctcagccttctccacctggcggctctggcagcgagccttacaaactgctgcctggcgctgtggccaccatcgtgaaacctctgagcgccatcccccagcccaccatcaccaagcaggaagtgatctgaggactagtccctgttcccagagcccacttttttttctttttttgaaataaaatagcctgtctttcagatctcaaaggctcttttcagagccaccaaaaaaaaaaaaaaaaaaaaaaaaaaaaaaaaaaaaaaaaaaaaaaaaaaaaaaaaaaaaaaaaaaaaaaaaaaaaaaaaaaaaaaaaaaaaaaaaaaaaa

SEQ ID NO: 4198 - RNA, 1586 nt, synthetic construct; identical to SEQ ID NO: 4185
  misc_feature 1..1586: note = mRNA a-1 (hSL-A100) (opt29) from Homo sapiens__NP_000448.3__HNF4A(39-474)(R2V)
  source 1..1586: mol_type = other RNA

SEQ ID NO: 4199 - RNA, 1586 nt, synthetic construct; identical to SEQ ID NO: 4185
  misc_feature 1..1586: note = mRNA a-1 (hSL-A100) (opt29) from Homo sapiens__NP_000448.3__HNF4A(39-474)(R2V_K5V)
  source 1..1586: mol_type = other RNA

SEQ ID NO: 4200 - RNA, 1586 nt, synthetic construct
  misc_feature 1..1586: note = mRNA a-1 (hSL-A100) (opt29) from Homo sapiens__NP_000448.3__HNF4A(39-474)(K179R_K180R)
  source 1..1586: mol_type = other RNA
aggagagtcccgcagtcggcgtccagcggctctgcttgttcgtgtgtgtgtcgttgcaggccttattcaagcttaccatggacaccagccctagcgagggcaccaacctgaacgcccctaatagcctgggagtgtccgccctgtgtgccatctgtggcgatagagccaccggcaagcactacggcgccagctcttgtgatggctgcaagggcttcttccggcggagcgtgcggaagaaccacatgtacagctgccggttcagccggcagtgcgtggtggacaaggataagcggaaccagtgccggtactgcagactgaagaagtgcttcagagccggcatgaagaaagaagccgtgcagaacgagcgggaccggatcagcaccagaagaagcagctacgaggacagcagcctgcccagcatcaacgccctgctgcaggccgaggtgctgagcagacagatcaccagcccagtgtccggcatcaacggcgacatccgggcccggagaatcgccagcattgccgacgtgtgcgagagcatgaaggaacagctgctggtgctggtggaatgggccaagtacatccccgccttttgcgagctgcccctggacgatcaggtggccctgctgagagcacacgccggcgaacatctgctgctgggagccaccaagcggagcatggtgttcaaggacgtgctgctgctgggcaacgactacatcgtgcccagacactgccctgagctggccgagatgagccgggtgtccatcagaatcctggacgaactggtgctgccgtttcaggaactgcagatcgacgacaacgagtacgcctacctgaaggccatcatctttttcgaccccgacgccaagggcctgagcgaccctggcaagatcaagcggctgagaagccaggtgcaagtgtccctggaagattacatcaacgaccggcagtacgacagccggggcagatttggcgaactgctcctgctgctgcccaccctgcagagcatcacctggcagatgatcgagcagatccagttcatcaagctgttcggcatggccaagatcgacaatctgctgcaggaaatgctgctcgggggcagcccttctgatgcccctcatgcccaccaccctctgcaccctcacctgatgcaagaacacatgggcaccaatgtgatcgtggccaacacaatgcccacccacctgagcaacggccagatgtgcgagtggcccagacctagaggacaggccgccacacctgagacacctcagccttctccacctggcggctctggcagcgagccttacaaactgctgcctggcgctgtggccaccatcgtgaaacctctgagcgccatcccccagcccaccatcaccaagcaggaagtgatctgaggactagtccctgttcccagagcccacttttttttctttttttgaaataaaatagcctgtctttcagatctcaaaggctcttttcagagccaccaaaaaaaaaaaaaaaaaaaaaaaaaaaaaaaaaaaaaaaaaaaaaaaaaaaaaaaaaaaaaaaaaaaaaaaaaaaaaaaaaaaaaaaaaaaaaaaaaaaaa

SEQ ID NO: 4201 - RNA, 1586 nt, synthetic construct
  misc_feature 1..1586: note = mRNA a-1 (hSL-A100) (opt29) from Homo sapiens__NP_000448.3__HNF4A(39-474)(K234R)
  source 1..1586: mol_type = other RNA
aggagagtcccgcagtcggcgtccagcggctctgcttgttcgtgtgtgtgtcgttgcaggccttattcaagcttaccatggacaccagccctagcgagggcaccaacctgaacgcccctaatagcctgggagtgtccgccctgtgtgccatctgtggcgatagagccaccggcaagcactacggcgccagctcttgtgatggctgcaagggcttcttccggcggagcgtgcggaagaaccacatgtacagctgccggttcagccggcagtgcgtggtggacaaggataagcggaaccagtgccggtactgcagactgaagaagtgcttcagagccggcatgaagaaagaagccgtgcagaacgagcgggaccggatcagcaccagaagaagcagctacgaggacagcagcctgcccagcatcaacgccctgctgcaggccgaggtgctgagcagacagatcaccagcccagtgtccggcatcaacggcgacatccgggccaagaagatcgccagcattgccgacgtgtgcgagagcatgaaggaacagctgctggtgctggtggaatgggccaagtacatccccgccttttgcgagctgcccctggacgatcaggtggccctgctgagagcacacgccggcgaacatctgctgctgggagccacccggcggagcatggtgttcaaggacgtgctgctgctgggcaacgactacatcgtgcccagacactgccctgagctggccgagatgagccgggtgtccatcagaatcctggacgaactggtgctgccgtttcaggaactgcagatcgacgacaacgagtacgcctacctgaaggccatcatctttttcgaccccgacgccaagggcctgagcgaccctggcaagatcaagcggctgagaagccaggtgcaagtgtccctggaagattacatcaacgaccggcagtacgacagccggggcagatttggcgaactgctcctgctgctgcccaccctgcagagcatcacctggcagatgatcgagcagatccagttcatcaagctgttcggcatggccaagatcgacaatctgctgcaggaaatgctgctcgggggcagcccttctgatgcccctcatgcccaccaccctctgcaccctcacctgatgcaagaacacatgggcaccaatgtgatcgtggccaacacaatgcccacccacctgagcaacggccagatgtgcgagtggcccagacctagaggacaggccgccacacctgagacacctcagccttctccacctggcggctctggcagcgagccttacaaactgctgcctggcgctgtggccaccatcgtgaaacctctgagcgccatcccccagcccaccatcaccaagcaggaagtgatctgaggactagtccctgttcccagagcccacttttttttctttttttgaaataaaatagcctgtctttcagatctcaaaggctcttttcagagccaccaaaaaaaaaaaaaaaaaaaaaaaaaaaaaaaaaaaaaaaaaaaaaaaaaaaaaaaaaaaaaaaaaaaaaaaaaaaaaaaaaaaaaaaaaaaaaaaaaaaaa

SEQ ID NO: 4202 - RNA, 1586 nt, synthetic construct
  misc_feature 1..1586: note = mRNA a-1 (hSL-A100) (opt29) from Homo sapiens__NP_000448.3__HNF4A(39-474)(K300R)
  source 1..1586: mol_type = other RNA
aggagagtcccgcagtcggcgtccagcggctctgcttgttcgtgtgtgtgtcgttgcaggccttattcaagcttaccatggacaccagccctagcgagggcaccaacctgaacgcccctaatagcctgggagtgtccgccctgtgtgccatctgtggcgatagagccaccggcaagcactacggcgccagctcttgtgatggctgcaagggcttcttccggcggagcgtgcggaagaaccacatgtacagctgccggttcagccggcagtgcgtggtggacaaggataagcggaaccagtgccggtactgcagactgaagaagtgcttcagagccggcatgaagaaagaagccgtgcagaacgagcgggaccggatcagcaccagaagaagcagctacgaggacagcagcctgcccagcatcaacgccctgctgcaggccgaggtgctgagcagacagatcaccagcccagtgtccggcatcaacggcgacatccgggccaagaagatcgccagcattgccgacgtgtgcgagagcatgaaggaacagctgctggtgctggtggaatgggccaagtacatccccgccttttgcgagctgcccctggacgatcaggtggccctgctgagagcacacgccggcgaacatctgctgctgggagccaccaagcggagcatggtgttcaaggacgtgctgctgctgggcaacgactacatcgtgcccagacactgccctgagctggccgagatgagccgggtgtccatcagaatcctggacgaactggtgctgccgtttcaggaactgcagatcgacgacaacgagtacgcctacctgaaggccatcatctttttcgaccccgacgccagaggcctgagcgaccctggcaagatcaagcggctgagaagccaggtgcaagtgtccctggaagattacatcaacgaccggcagtacgacagccggggcagatttggcgaactgctcctgctgctgcccaccctgcagagcatcacctggcagatgatcgagcagatccagttcatcaagctgttcggcatggccaagatcgacaatctgctgcaggaaatgctgctcgggggcagcccttctgatgcccctcatgcccaccaccctctgcaccctcacctgatgcaagaacacatgggcaccaatgtgatcgtggccaacacaatgcccacccacctgagcaacggccagatgtgcgagtggcccagacctagaggacaggccgccacacctgagacacctcagccttctccacctggcggctctggcagcgagccttacaaactgctgcctggcgctgtggccaccatcgtgaaacctctgagcgccatcccccagcccaccatcaccaagcaggaagtgatctgaggactagtccctgttcccagagcccacttttttttctttttttgaaataaaatagcctgtctttcagatctcaaaggctcttttcagagccaccaaaaaaaaaaaaaaaaaaaaaaaaaaaaaaaaaaaaaaaaaaaaaaaaaaaaaaaaaaaaaaaaaaaaaaaaaaaaaaaaaaaaaaaaaaaaaaaaaaaaa

SEQ ID NO: 4203 - RNA, 1586 nt, synthetic construct
  misc_feature 1..1586: note = mRNA a-1 (hSL-A100) (opt29) from Homo sapiens__NP_000448.3__HNF4A(39-474)(K300R_K307R_K309R)
  source 1..1586: mol_type = other RNA
aggagagtcccgcagtcggcgtccagcggctctgcttgttcgtgtgtgtgtcgttgcaggccttattcaagcttaccatggacaccagccctagcgagggcaccaacctgaacgcccctaatagcctgggagtgtccgccctgtgtgccatctgtggcgatagagccaccggcaagcactacggcgccagctcttgtgatggctgcaagggcttcttccggcggagcgtgcggaagaaccacatgtacagctgccggttcagccggcagtgcgtggtggacaaggataagcggaaccagtgccggtactgcagactgaagaagtgcttcagagccggcatgaagaaagaagccgtgcagaacgagcgggaccggatcagcaccagaagaagcagctacgaggacagcagcctgcccagcatcaacgccctgctgcaggccgaggtgctgagcagacagatcaccagcccagtgtccggcatcaacggcgacatccgggccaagaagatcgccagcattgccgacgtgtgcgagagcatgaaggaacagctgctggtgctggtggaatgggccaagtacatccccgccttttgcgagctgcccctggacgatcaggtggccctgctgagagcacacgccggcgaacatctgctgctgggagccaccaagcggagcatggtgttcaaggacgtgctgctgctgggcaacgactacatcgtgcccagacactgccctgagctggccgagatgagccgggtgtccatcagaatcctggacgaactggtgctgccgtttcaggaactgcagatcgacgacaacgagtacgcctacctgaaggccatcatctttttcgaccccgacgccagaggcctgagcgaccctggccggatcagacggctgagaagccaggtgcaagtgtccctggaagattacatcaacgaccggcagtacgacagccggggcagatttggcgaactgctcctgctgctgcccaccctgcagagcatcacctggcagatgatcgagcagatccagttcatcaagctgttcggcatggccaagatcgacaatctgctgcaggaaatgctgctcgggggcagcccttctgatgcccctcatgcccaccaccctctgcaccctcacctgatgcaagaacacatgggcaccaatgtgatcgtggccaacacaatgcccacccacctgagcaacggccagatgtgcgagtggcccagacctagaggacaggccgccacacctgagacacctcagccttctccacctggcggctctggcagcgagccttacaaactgctgcctggcgctgtggccaccatcgtgaaacctctgagcgccatcccccagcccaccatcaccaagcaggaagtgatctgaggactagtccctgttcccagagcccacttttttttctttttttgaaataaaatagcctgtctttcagatctcaaaggctcttttcagagccaccaaaaaaaaaaaaaaaaaaaaaaaaaaaaaaaaaaaaaaaaaaaaaaaaaaaaaaaaaaaaaaaaaaaaaaaaaaaaaaaaaaaaaaaaaaaaaaaaaaaaa

SEQ ID NO: 4204 - RNA, 1586 nt, synthetic construct
  misc_feature 1..1586: note = mRNA a-1 (hSL-A100) (opt29) from Homo sapiens__NP_000448.3__HNF4A(39-474)(K447R_K470R)
  source 1..1586: mol_type = other RNA
aggagagtcccgcagtcggcgtccagcggctctgcttgttcgtgtgtgtgtcgttgcaggccttattcaagcttaccatggacaccagccctagcgagggcaccaacctgaacgcccctaatagcctgggagtgtccgccctgtgtgccatctgtggcgatagagccaccggcaagcactacggcgccagctcttgtgatggctgcaagggcttcttccggcggagcgtgcggaagaaccacatgtacagctgccggttcagccggcagtgcgtggtggacaaggataagcggaaccagtgccggtactgcagactgaagaagtgcttcagagccggcatgaagaaagaagccgtgcagaacgagcgggaccggatcagcaccagaagaagcagctacgaggacagcagcctgcccagcatcaacgccctgctgcaggccgaggtgctgagcagacagatcaccagcccagtgtccggcatcaacggcgacatccgggccaagaagatcgccagcattgccgacgtgtgcgagagcatgaaggaacagctgctggtgctggtggaatgggccaagtacatccccgccttttgcgagctgcccctggacgatcaggtggccctgctgagagcacacgccggcgaacatctgctgctgggagccaccaagcggagcatggtgttcaaggacgtgctgctgctgggcaacgactacatcgtgcccagacactgccctgagctggccgagatgagccgggtgtccatcagaatcctggacgaactggtgctgccgtttcaggaactgcagatcgacgacaacgagtacgcctacctgaaggccatcatctttttcgaccccgacgccaagggcctgagcgaccctggcaagatcaagcggctgagaagccaggtgcaagtgtccctggaagattacatcaacgaccggcagtacgacagccggggcagatttggcgaactgctcctgctgctgcccaccctgcagagcatcacctggcagatgatcgagcagatccagttcatcaagctgttcggcatggccaagatcgacaatctgctgcaggaaatgctgctcgggggcagcccttctgatgcccctcatgcccaccaccctctgcaccctcacctgatgcaagaacacatgggcaccaatgtgatcgtggccaacacaatgcccacccacctgagcaacggccagatgtgcgagtggcccagacctagaggacaggccgccacacctgagacacctcagccttctccacctggcggctctggcagcgagccttaccggctgctgcctggcgctgtggccaccatcgtgaaacctctgagcgccatcccccagcccaccatcacccggcaggaagtgatctgaggactagtccctgttcccagagcccacttttttttctttttttgaaataaaatagcctgtctttcagatctcaaaggctcttttcagagccaccaaaaaaaaaaaaaaaaaaaaaaaaaaaaaaaaaaaaaaaaaaaaaaaaaaaaaaaaaaaaaaaaaaaaaaaaaaaaaaaaaaaaaaaaaaaaaaaaaaaaa

SEQ ID NO: 4205 - RNA, 1586 nt, synthetic construct
  misc_feature 1..1586: note = mRNA a-1 (hSL-A100) (opt29) from Homo sapiens__NP_000448.3__HNF4A(39-474)(K458R)
  source 1..1586: mol_type = other RNA
aggagagtcccgcagtcggcgtccagcggctctgcttgttcgtgtgtgtgtcgttgcaggccttattcaagcttaccatggacaccagccctagcgagggcaccaacctgaacgcccctaatagcctgggagtgtccgccctgtgtgccatctgtggcgatagagccaccggcaagcactacggcgccagctcttgtgatggctgcaagggcttcttccggcggagcgtgcggaagaaccacatgtacagctgccggttcagccggcagtgcgtggtggacaaggataagcggaaccagtgccggtactgcagactgaagaagtgcttcagagccggcatgaagaaagaagccgtgcagaacgagcgggaccggatcagcaccagaagaagcagctacgaggacagcagcctgcccagcatcaacgccctgctgcaggccgaggtgctgagcagacagatcaccagcccagtgtccggcatcaacggcgacatccgggccaagaagatcgccagcattgccgacgtgtgcgagagcatgaaggaacagctgctggtgctggtggaatgggccaagtacatccccgccttttgcgagctgcccctggacgatcaggtggccctgctgagagcacacgccggcgaacatctgctgctgggagccaccaagcggagcatggtgttcaaggacgtgctgctgctgggcaacgactacatcgtgcccagacactgccctgagctggccgagatgagccgggtgtccatcagaatcctggacgaactggtgctgccgtttcaggaactgcagatcgacgacaacgagtacgcctacctgaaggccatcatctttttcgaccccgacgccaagggcctgagcgaccctggcaagatcaagcggctgagaagccaggtgcaagtgtccctggaagattacatcaacgaccggcagtacgacagccggggcagatttggcgaactgctcctgctgctgcccaccctgcagagcatcacctggcagatgatcgagcagatccagttcatcaagctgttcggcatggccaagatcgacaatctgctgcaggaaatgctgctcgggggcagcccttctgatgcccctcatgcccaccaccctctgcaccctcacctgatgcaagaacacatgggcaccaatgtgatcgtggccaacacaatgcccacccacctgagcaacggccagatgtgcgagtggcccagacctagaggacaggccgccacacctgagacacctcagccttctccacctggcggctctggcagcgagccttacaaactgctgcctggcgctgtggccaccatcgtgagacctctgagcgccatcccccagcccaccatcaccaagcaggaagtgatctgaggactagtccctgttcccagagcccacttttttttctttttttgaaataaaatagcctgtctttcagatctcaaaggctcttttcagagccaccaaaaaaaaaaaaaaaaaaaaaaaaaaaaaaaaaaaaaaaaaaaaaaaaaaaaaaaaaaaaaaaaaaaaaaaaaaaaaaaaaaaaaaaaaaaaaaaaaaaaa

SEQ ID NO: 4206 - RNA, 1586 nt, synthetic construct
  misc_feature 1..1586: note = mRNA a-1 (hSL-A100) (opt29) from Homo sapiens__NP_000448.3__HNF4A(39-474)(K106R_K108R_K126R_K127R )
  source 1..1586: mol_type = other RNA
aggagagtcccgcagtcggcgtccagcggctctgcttgttcgtgtgtgtgtcgttgcaggccttattcaagcttaccatggacaccagccctagcgagggcaccaacctgaacgcccctaatagcctgggagtgtccgccctgtgtgccatctgtggcgatagagccaccggcaagcactacggcgccagctcttgtgatggctgcaagggcttcttccggcggagcgtgcggaagaaccacatgtacagctgccggttcagccggcagtgcgtggtggaccgggatagacggaaccagtgccggtactgcagactgaagaagtgcttcagagccggcatgcggagagaagccgtgcagaacgagcgggaccggatcagcaccagaagaagcagctacgaggacagcagcctgcccagcatcaacgccctgctgcaggccgaggtgctgagcagacagatcaccagcccagtgtccggcatcaacggcgacatccgggccaagaagatcgccagcattgccgacgtgtgcgagagcatgaaggaacagctgctggtgctggtggaatgggccaagtacatccccgccttttgcgagctgcccctggacgatcaggtggccctgctgagagcacacgccggcgaacatctgctgctgggagccaccaagcggagcatggtgttcaaggacgtgctgctgctgggcaacgactacatcgtgcccagacactgccctgagctggccgagatgagccgggtgtccatcagaatcctggacgaactggtgctgccgtttcaggaactgcagatcgacgacaacgagtacgcctacctgaaggccatcatctttttcgaccccgacgccaagggcctgagcgaccctggcaagatcaagcggctgagaagccaggtgcaagtgtccctggaagattacatcaacgaccggcagtacgacagccggggcagatttggcgaactgctcctgctgctgcccaccctgcagagcatcacctggcagatgatcgagcagatccagttcatcaagctgttcggcatggccaagatcgacaatctgctgcaggaaatgctgctcgggggcagcccttctgatgcccctcatgcccaccaccctctgcaccctcacctgatgcaagaacacatgggcaccaatgtgatcgtggccaacacaatgcccacccacctgagcaacggccagatgtgcgagtggcccagacctagaggacaggccgccacacctgagacacctcagccttctccacctggcggctctggcagcgagccttacaaactgctgcctggcgctgtggccaccatcgtgaaacctctgagcgccatcccccagcccaccatcaccaagcaggaagtgatctgaggactagtccctgttcccagagcccacttttttttctttttttgaaataaaatagcctgtctttcagatctcaaaggctcttttcagagccaccaaaaaaaaaaaaaaaaaaaaaaaaaaaaaaaaaaaaaaaaaaaaaaaaaaaaaaaaaaaaaaaaaaaaaaaaaaaaaaaaaaaaaaaaaaaaaaaaaaaaa

SEQ ID NO: 4207 - RNA, 1586 nt, synthetic construct
  misc_feature 1..1586: note = mRNA a-1 (hSL-A100) (opt29) from Homo sapiens__NP_000448.3__HNF4A(39-474)(E285Q)
  source 1..1586: mol_type = other RNA
aggagagtcccgcagtcggcgtccagcggctctgcttgttcgtgtgtgtgtcgttgcaggccttattcaagcttaccatggacaccagccctagcgagggcaccaacctgaacgcccctaatagcctgggagtgtccgccctgtgtgccatctgtggcgatagagccaccggcaagcactacggcgccagctcttgtgatggctgcaagggcttcttccggcggagcgtgcggaagaaccacatgtacagctgccggttcagccggcagtgcgtggtggacaaggataagcggaaccagtgccggtactgcagactgaagaagtgcttcagagccggcatgaagaaagaagccgtgcagaacgagcgggaccggatcagcaccagaagaagcagctacgaggacagcagcctgcccagcatcaacgccctgctgcaggccgaggtgctgagcagacagatcaccagcccagtgtccggcatcaacggcgacatccgggccaagaagatcgccagcattgccgacgtgtgcgagagcatgaaggaacagctgctggtgctggtggaatgggccaagtacatccccgccttttgcgagctgcccctggacgatcaggtggccctgctgagagcacacgccggcgaacatctgctgctgggagccaccaagcggagcatggtgttcaaggacgtgctgctgctgggcaacgactacatcgtgcccagacactgccctgagctggccgagatgagccgggtgtccatcagaatcctggacgaactggtgctgccgtttcaggaactgcagatcgacgacaaccagtacgcctacctgaaggccatcatctttttcgaccccgacgccaagggcctgagcgaccctggcaagatcaagcggctgagaagccaggtgcaagtgtccctggaagattacatcaacgaccggcagtacgacagccggggcagatttggcgaactgctcctgctgctgcccaccctgcagagcatcacctggcagatgatcgagcagatccagttcatcaagctgttcggcatggccaagatcgacaatctgctgcaggaaatgctgctcgggggcagcccttctgatgcccctcatgcccaccaccctctgcaccctcacctgatgcaagaacacatgggcaccaatgtgatcgtggccaacacaatgcccacccacctgagcaacggccagatgtgcgagtggcccagacctagaggacaggccgccacacctgagacacctcagccttctccacctggcggctctggcagcgagccttacaaactgctgcctggcgctgtggccaccatcgtgaaacctctgagcgccatcccccagcccaccatcaccaagcaggaagtgatctgaggactagtccctgttcccagagcccacttttttttctttttttgaaataaaatagcctgtctttcagatctcaaaggctcttttcagagccaccaaaaaaaaaaaaaaaaaaaaaaaaaaaaaaaaaaaaaaaaaaaaaaaaaaaaaaaaaaaaaaaaaaaaaaaaaaaaaaaaaaaaaaaaaaaaaaaaaaaaa

SEQ ID NO: 4208 - RNA, 1586 nt, synthetic construct
  misc_feature 1..1586: note = mRNA a-1 (hSL-A100) (opt29) from Homo sapiens__NP_000448.3__HNF4A(39-474)(T166E)
  source 1..1586: mol_type = other RNA
aggagagtcccgcagtcggcgtccagcggctctgcttgttcgtgtgtgtgtcgttgcaggccttattcaagcttaccatggacaccagccctagcgagggcaccaacctgaacgcccctaatagcctgggagtgtccgccctgtgtgccatctgtggcgatagagccaccggcaagcactacggcgccagctcttgtgatggctgcaagggcttcttccggcggagcgtgcggaagaaccacatgtacagctgccggttcagccggcagtgcgtggtggacaaggataagcggaaccagtgccggtactgcagactgaagaagtgcttcagagccggcatgaagaaagaagccgtgcagaacgagcgggaccggatcagcaccagaagaagcagctacgaggacagcagcctgcccagcatcaacgccctgctgcaggccgaggtgctgagcagacagatcgagagcccagtgtccggcatcaacggcgacatccgggccaagaagatcgccagcattgccgacgtgtgcgagagcatgaaggaacagctgctggtgctggtggaatgggccaagtacatccccgccttttgcgagctgcccctggacgatcaggtggccctgctgagagcacacgccggcgaacatctgctgctgggagccaccaagcggagcatggtgttcaaggacgtgctgctgctgggcaacgactacatcgtgcccagacactgccctgagctggccgagatgagccgggtgtccatcagaatcctggacgaactggtgctgccgtttcaggaactgcagatcgacgacaacgagtacgcctacctgaaggccatcatctttttcgaccccgacgccaagggcctgagcgaccctggcaagatcaagcggctgagaagccaggtgcaagtgtccctggaagattacatcaacgaccggcagtacgacagccggggcagatttggcgaactgctcctgctgctgcccaccctgcagagcatcacctggcagatgatcgagcagatccagttcatcaagctgttcggcatggccaagatcgacaatctgctgcaggaaatgctgctcgggggcagcccttctgatgcccctcatgcccaccaccctctgcaccctcacctgatgcaagaacacatgggcaccaatgtgatcgtggccaacacaatgcccacccacctgagcaacggccagatgtgcgagtggcccagacctagaggacaggccgccacacctgagacacctcagccttctccacctggcggctctggcagcgagccttacaaactgctgcctggcgctgtggccaccatcgtgaaacctctgagcgccatcccccagcccaccatcaccaagcaggaagtgatctgaggactagtccctgttcccagagcccacttttttttctttttttgaaataaaatagcctgtctttcagatctcaaaggctcttttcagagccaccaaaaaaaaaaaaaaaaaaaaaaaaaaaaaaaaaaaaaaaaaaaaaaaaaaaaaaaaaaaaaaaaaaaaaaaaaaaaaaaaaaaaaaaaaaaaaaaaaaaaa

SEQ ID NO: 4209 - RNA, 1586 nt, synthetic construct
  misc_feature 1..1586: note = mRNA a-1 (hSL-A100) (opt29) from Homo sapiens__NP_000448.3__HNF4A(39-474)(S148A)
  source 1..1586: mol_type = other RNA
aggagagtcccgcagtcggcgtccagcggctctgcttgttcgtgtgtgtgtcgttgcaggccttattcaagcttaccatggacaccagccctagcgagggcaccaacctgaacgcccctaatagcctgggagtgtccgccctgtgtgccatctgtggcgatagagccaccggcaagcactacggcgccagctcttgtgatggctgcaagggcttcttccggcggagcgtgcggaagaaccacatgtacagctgccggttcagccggcagtgcgtggtggacaaggataagcggaaccagtgccggtactgcagactgaagaagtgcttcagagccggcatgaagaaagaagccgtgcagaacgagcgggaccggatcagcaccagaagaagcagctacgaggacagcgccctgcccagcatcaacgccctgctgcaggccgaggtgctgagcagacagatcaccagcccagtgtccggcatcaacggcgacatccgggccaagaagatcgccagcattgccgacgtgtgcgagagcatgaaggaacagctgctggtgctggtggaatgggccaagtacatccccgccttttgcgagctgcccctggacgatcaggtggccctgctgagagcacacgccggcgaacatctgctgctgggagccaccaagcggagcatggtgttcaaggacgtgctgctgctgggcaacgactacatcgtgcccagacactgccctgagctggccgagatgagccgggtgtccatcagaatcctggacgaactggtgctgccgtttcaggaactgcagatcgacgacaacgagtacgcctacctgaaggccatcatctttttcgaccccgacgccaagggcctgagcgaccctggcaagatcaagcggctgagaagccaggtgcaagtgtccctggaagattacatcaacgaccggcagtacgacagccggggcagatttggcgaactgctcctgctgctgcccaccctgcagagcatcacctggcagatgatcgagcagatccagttcatcaagctgttcggcatggccaagatcgacaatctgctgcaggaaatgctgctcgggggcagcccttctgatgcccctcatgcccaccaccctctgcaccctcacctgatgcaagaacacatgggcaccaatgtgatcgtggccaacacaatgcccacccacctgagcaacggccagatgtgcgagtggcccagacctagaggacaggccgccacacctgagacacctcagccttctccacctggcggctctggcagcgagccttacaaactgctgcctggcgctgtggccaccatcgtgaaacctctgagcgccatcccccagcccaccatcaccaagcaggaagtgatctgaggactagtccctgttcccagagcccacttttttttctttttttgaaataaaatagcctgtctttcagatctcaaaggctcttttcagagccaccaaaaaaaaaaaaaaaaaaaaaaaaaaaaaaaaaaaaaaaaaaaaaaaaaaaaaaaaaaaaaaaaaaaaaaaaaaaaaaaaaaaaaaaaaaaaaaaaaaaaa

SEQ ID NO: 4210 - RNA, 1586 nt, synthetic construct
  misc_feature 1..1586: note = mRNA a-1 (hSL-A100) (opt29) from Homo sapiens__NP_000448.3__HNF4A(39-474)(S148E)
  source 1..1586: mol_type = other RNA
aggagagtcccgcagtcggcgtccagcggctctgcttgttcgtgtgtgtgtcgttgcaggccttattcaagcttaccatggacaccagccctagcgagggcaccaacctgaacgcccctaatagcctgggagtgtccgccctgtgtgccatctgtggcgatagagccaccggcaagcactacggcgccagctcttgtgatggctgcaagggcttcttccggcggagcgtgcggaagaaccacatgtacagctgccggttcagccggcagtgcgtggtggacaaggataagcggaaccagtgccggtactgcagactgaagaagtgcttcagagccggcatgaagaaagaagccgtgcagaacgagcgggaccggatcagcaccagaagaagcagctacgaggacagcgaactgcccagcatcaacgccctgctgcaggccgaggtgctgagcagacagatcaccagcccagtgtccggcatcaacggcgacatccgggccaagaagatcgccagcattgccgacgtgtgcgagagcatgaaggaacagctgctggtgctggtggaatgggccaagtacatccccgccttttgcgagctgcccctggacgatcaggtggccctgctgagagcacacgccggcgaacatctgctgctgggagccaccaagcggagcatggtgttcaaggacgtgctgctgctgggcaacgactacatcgtgcccagacactgccctgagctggccgagatgagccgggtgtccatcagaatcctggacgaactggtgctgccgtttcaggaactgcagatcgacgacaacgagtacgcctacctgaaggccatcatctttttcgaccccgacgccaagggcctgagcgaccctggcaagatcaagcggctgagaagccaggtgcaagtgtccctggaagattacatcaacgaccggcagtacgacagccggggcagatttggcgaactgctcctgctgctgcccaccctgcagagcatcacctggcagatgatcgagcagatccagttcatcaagctgttcggcatggccaagatcgacaatctgctgcaggaaatgctgctcgggggcagcccttctgatgcccctcatgcccaccaccctctgcaccctcacctgatgcaagaacacatgggcaccaatgtgatcgtggccaacacaatgcccacccacctgagcaacggccagatgtgcgagtggcccagacctagaggacaggccgccacacctgagacacctcagccttctccacctggcggctctggcagcgagccttacaaactgctgcctggcgctgtggccaccatcgtgaaacctctgagcgccatcccccagcccaccatcaccaagcaggaagtgatctgaggactagtccctgttcccagagcccacttttttttctttttttgaaataaaatagcctgtctttcagatctcaaaggctcttttcagagccaccaaaaaaaaaaaaaaaaaaaaaaaaaaaaaaaaaaaaaaaaaaaaaaaaaaaaaaaaaaaaaaaaaaaaaaaaaaaaaaaaaaaaaaaaaaaaaaaaaaaaa

SEQ ID NO: 4211 - RNA, 1586 nt, synthetic construct
  misc_feature 1..1586: note = mRNA a-1 (hSL-A100) (opt29) from Homo sapiens__NP_000448.3__HNF4A(39-474)(S183A)
  source 1..1586: mol_type = other RNA
aggagagtcccgcagtcggcgtccagcggctctgcttgttcgtgtgtgtgtcgttgcaggccttattcaagcttaccatggacaccagccctagcgagggcaccaacctgaacgcccctaatagcctgggagtgtccgccctgtgtgccatctgtggcgatagagccaccggcaagcactacggcgccagctcttgtgatggctgcaagggcttcttccggcggagcgtgcggaagaaccacatgtacagctgccggttcagccggcagtgcgtggtggacaaggataagcggaaccagtgccggtactgcagactgaagaagtgcttcagagccggcatgaagaaagaagccgtgcagaacgagcgggaccggatcagcaccagaagaagcagctacgaggacagcagcctgcccagcatcaacgccctgctgcaggccgaggtgctgagcagacagatcaccagcccagtgtccggcatcaacggcgacatccgggccaagaagatcgccgccattgccgacgtgtgcgagagcatgaaggaacagctgctggtgctggtggaatgggccaagtacatccccgccttttgcgagctgcccctggacgatcaggtggccctgctgagagcacacgccggcgaacatctgctgctgggagccaccaagcggagcatggtgttcaaggacgtgctgctgctgggcaacgactacatcgtgcccagacactgccctgagctggccgagatgagccgggtgtccatcagaatcctggacgaactggtgctgccgtttcaggaactgcagatcgacgacaacgagtacgcctacctgaaggccatcatctttttcgaccccgacgccaagggcctgagcgaccctggcaagatcaagcggctgagaagccaggtgcaagtgtccctggaagattacatcaacgaccggcagtacgacagccggggcagatttggcgaactgctcctgctgctgcccaccctgcagagcatcacctggcagatgatcgagcagatccagttcatcaagctgttcggcatggccaagatcgacaatctgctgcaggaaatgctgctcgggggcagcccttctgatgcccctcatgcccaccaccctctgcaccctcacctgatgcaagaacacatgggcaccaatgtgatcgtggccaacacaatgcccacccacctgagcaacggccagatgtgcgagtggcccagacctagaggacaggccgccacacctgagacacctcagccttctccacctggcggctctggcagcgagccttacaaactgctgcctggcgctgtggccaccatcgtgaaacctctgagcgccatcccccagcccaccatcaccaagcaggaagtgatctgaggactagtccctgttcccagagcccacttttttttctttttttgaaataaaatagcctgtctttcagatctcaaaggctcttttcagagccaccaaaaaaaaaaaaaaaaaaaaaaaaaaaaaaaaaaaaaaaaaaaaaaaaaaaaaaaaaaaaaaaaaaaaaaaaaaaaaaaaaaaaaaaaaaaaaaaaaaaaa

SEQ ID NO: 4212 - RNA, 1586 nt, synthetic construct
  misc_feature 1..1586: note = mRNA a-1 (hSL-A100) (opt29) from Homo sapiens__NP_000448.3__HNF4A(39-474)(S183E)
  source 1..1586: mol_type = other RNA
aggagagtcccgcagtcggcgtccagcggctctgcttgttcgtgtgtgtgtcgttgcaggccttattcaagcttaccatggacaccagccctagcgagggcaccaacctgaacgcccctaatagcctgggagtgtccgccctgtgtgccatctgtggcgatagagccaccggcaagcactacggcgccagctcttgtgatggctgcaagggcttcttccggcggagcgtgcggaagaaccacatgtacagctgccggttcagccggcagtgcgtggtggacaaggataagcggaaccagtgccggtactgcagactgaagaagtgcttcagagccggcatgaagaaagaagccgtgcagaacgagcgggaccggatcagcaccagaagaagcagctacgaggacagcagcctgcccagcatcaacgccctgctgcaggccgaggtgctgagcagacagatcaccagcccagtgtccggcatcaacggcgacatccgggccaagaagatcgccgagattgccgacgtgtgcgagagcatgaaggaacagctgctggtgctggtggaatgggccaagtacatccccgccttttgcgagctgcccctggacgatcaggtggccctgctgagagcacacgccggcgaacatctgctgctgggagccaccaagcggagcatggtgttcaaggacgtgctgctgctgggcaacgactacatcgtgcccagacactgccctgagctggccgagatgagccgggtgtccatcagaatcctggacgaactggtgctgccgtttcaggaactgcagatcgacgacaacgagtacgcctacctgaaggccatcatctttttcgaccccgacgccaagggcctgagcgaccctggcaagatcaagcggctgagaagccaggtgcaagtgtccctggaagattacatcaacgaccggcagtacgacagccggggcagatttggcgaactgctcctgctgctgcccaccctgcagagcatcacctggcagatgatcgagcagatccagttcatcaagctgttcggcatggccaagatcgacaatctgctgcaggaaatgctgctcgggggcagcccttctgatgcccctcatgcccaccaccctctgcaccctcacctgatgcaagaacacatgggcaccaatgtgatcgtggccaacacaatgcccacccacctgagcaacggccagatgtgcgagtggcccagacctagaggacaggccgccacacctgagacacctcagccttctccacctggcggctctggcagcgagccttacaaactgctgcctggcgctgtggccaccatcgtgaaacctctgagcgccatcccccagcccaccatcaccaagcaggaagtgatctgaggactagtccctgttcccagagcccacttttttttctttttttgaaataaaatagcctgtctttcagatctcaaaggctcttttcagagccaccaaaaaaaaaaaaaaaaaaaaaaaaaaaaaaaaaaaaaaaaaaaaaaaaaaaaaaaaaaaaaaaaaaaaaaaaaaaaaaaaaaaaaaaaaaaaaaaaaaaaa

SEQ ID NO: 4213 - RNA, 1586 nt, synthetic construct
  misc_feature 1..1586: note = mRNA a-1 (hSL-A100) (opt29) from Homo sapiens__NP_000448.3__HNF4A(39-474)(S461A)
  source 1..1586: mol_type = other RNA
aggagagtcccgcagtcggcgtccagcggctctgcttgttcgtgtgtgtgtcgttgcaggccttattcaagcttaccatggacaccagccctagcgagggcaccaacctgaacgcccctaatagcctgggagtgtccgccctgtgtgccatctgtggcgatagagccaccggcaagcactacggcgccagctcttgtgatggctgcaagggcttcttccggcggagcgtgcggaagaaccacatgtacagctgccggttcagccggcagtgcgtggtggacaaggataagcggaaccagtgccggtactgcagactgaagaagtgcttcagagccggcatgaagaaagaagccgtgcagaacgagcgggaccggatcagcaccagaagaagcagctacgaggacagcagcctgcccagcatcaacgccctgctgcaggccgaggtgctgagcagacagatcaccagcccagtgtccggcatcaacggcgacatccgggccaagaagatcgccagcattgccgacgtgtgcgagagcatgaaggaacagctgctggtgctggtggaatgggccaagtacatccccgccttttgcgagctgcccctggacgatcaggtggccctgctgagagcacacgccggcgaacatctgctgctgggagccaccaagcggagcatggtgttcaaggacgtgctgctgctgggcaacgactacatcgtgcccagacactgccctgagctggccgagatgagccgggtgtccatcagaatcctggacgaactggtgctgccgtttcaggaactgcagatcgacgacaacgagtacgcctacctgaaggccatcatctttttcgaccccgacgccaagggcctgagcgaccctggcaagatcaagcggctgagaagccaggtgcaagtgtccctggaagattacatcaacgaccggcagtacgacagccggggcagatttggcgaactgctcctgctgctgcccaccctgcagagcatcacctggcagatgatcgagcagatccagttcatcaagctgttcggcatggccaagatcgacaatctgctgcaggaaatgctgctcgggggcagcccttctgatgcccctcatgcccaccaccctctgcaccctcacctgatgcaagaacacatgggcaccaatgtgatcgtggccaacacaatgcccacccacctgagcaacggccagatgtgcgagtggcccagacctagaggacaggccgccacacctgagacacctcagccttctccacctggcggctctggcagcgagccttacaaactgctgcctggcgctgtggccaccatcgtgaaacctctggccgccatcccccagcccaccatcaccaagcaggaagtgatctgaggactagtccctgttcccagagcccacttttttttctttttttgaaataaaatagcctgtctttcagatctcaaaggctcttttcagagccaccaaaaaaaaaaaaaaaaaaaaaaaaaaaaaaaaaaaaaaaaaaaaaaaaaaaaaaaaaaaaaaaaaaaaaaaaaaaaaaaaaaaaaaaaaaaaaaaaaaaaa

SEQ ID NO: 4214 - RNA, 1586 nt, synthetic construct
  misc_feature 1..1586: note = mRNA a-1 (hSL-A100) (opt29) from Homo sapiens__NP_000448.3__HNF4A(39-474)(S461E)
  source 1..1586: mol_type = other RNA
aggagagtcccgcagtcggcgtccagcggctctgcttgttcgtgtgtgtgtcgttgcaggccttattcaagcttaccatggacaccagccctagcgagggcaccaacctgaacgcccctaatagcctgggagtgtccgccctgtgtgccatctgtggcgatagagccaccggcaagcactacggcgccagctcttgtgatggctgcaagggcttcttccggcggagcgtgcggaagaaccacatgtacagctgccggttcagccggcagtgcgtggtggacaaggataagcggaaccagtgccggtactgcagactgaagaagtgcttcagagccggcatgaagaaagaagccgtgcagaacgagcgggaccggatcagcaccagaagaagcagctacgaggacagcagcctgcccagcatcaacgccctgctgcaggccgaggtgctgagcagacagatcaccagcccagtgtccggcatcaacggcgacatccgggccaagaagatcgccagcattgccgacgtgtgcgagagcatgaaggaacagctgctggtgctggtggaatgggccaagtacatccccgccttttgcgagctgcccctggacgatcaggtggccctgctgagagcacacgccggcgaacatctgctgctgggagccaccaagcggagcatggtgttcaaggacgtgctgctgctgggcaacgactacatcgtgcccagacactgccctgagctggccgagatgagccgggtgtccatcagaatcctggacgaactggtgctgccgtttcaggaactgcagatcgacgacaacgagtacgcctacctgaaggccatcatctttttcgaccccgacgccaagggcctgagcgaccctggcaagatcaagcggctgagaagccaggtgcaagtgtccctggaagattacatcaacgaccggcagtacgacagccggggcagatttggcgaactgctcctgctgctgcccaccctgcagagcatcacctggcagatgatcgagcagatccagttcatcaagctgttcggcatggccaagatcgacaatctgctgcaggaaatgctgctcgggggcagcccttctgatgcccctcatgcccaccaccctctgcaccctcacctgatgcaagaacacatgggcaccaatgtgatcgtggccaacacaatgcccacccacctgagcaacggccagatgtgcgagtggcccagacctagaggacaggccgccacacctgagacacctcagccttctccacctggcggctctggcagcgagccttacaaactgctgcctggcgctgtggccaccatcgtgaaacctctggaggccatcccccagcccaccatcaccaagcaggaagtgatctgaggactagtccctgttcccagagcccacttttttttctttttttgaaataaaatagcctgtctttcagatctcaaaggctcttttcagagccaccaaaaaaaaaaaaaaaaaaaaaaaaaaaaaaaaaaaaaaaaaaaaaaaaaaaaaaaaaaaaaaaaaaaaaaaaaaaaaaaaaaaaaaaaaaaaaaaaaaaaa

SEQ ID NO: 4215 - RNA, 1586 nt, synthetic construct
  misc_feature 1..1586: note = mRNA a-1 (hSL-A100) (opt29) from Homo sapiens__NP_000448.3__HNF4A(39-474)(S142A_S143A_S313A)
  source 1..1586: mol_type = other RNA
aggagagtcccgcagtcggcgtccagcggctctgcttgttcgtgtgtgtgtcgttgcaggccttattcaagcttaccatggacaccagccctagcgagggcaccaacctgaacgcccctaatagcctgggagtgtccgccctgtgtgccatctgtggcgatagagccaccggcaagcactacggcgccagctcttgtgatggctgcaagggcttcttccggcggagcgtgcggaagaaccacatgtacagctgccggttcagccggcagtgcgtggtggacaaggataagcggaaccagtgccggtactgcagactgaagaagtgcttcagagccggcatgaagaaagaagccgtgcagaacgagcgggaccggatcagcaccagaagagccgcctacgaggacagcagcctgcccagcatcaacgccctgctgcaggccgaggtgctgagcagacagatcaccagcccagtgtccggcatcaacggcgacatccgggccaagaagatcgccagcattgccgacgtgtgcgagagcatgaaggaacagctgctggtgctggtggaatgggccaagtacatccccgccttttgcgagctgcccctggacgatcaggtggccctgctgagagcacacgccggcgaacatctgctgctgggagccaccaagcggagcatggtgttcaaggacgtgctgctgctgggcaacgactacatcgtgcccagacactgccctgagctggccgagatgagccgggtgtccatcagaatcctggacgaactggtgctgccgtttcaggaactgcagatcgacgacaacgagtacgcctacctgaaggccatcatctttttcgaccccgacgccaagggcctgagcgaccctggcaagatcaagcggctgagagcccaggtgcaagtgtccctggaagattacatcaacgaccggcagtacgacagccggggcagatttggcgaactgctcctgctgctgcccaccctgcagagcatcacctggcagatgatcgagcagatccagttcatcaagctgttcggcatggccaagatcgacaatctgctgcaggaaatgctgctcgggggcagcccttctgatgcccctcatgcccaccaccctctgcaccctcacctgatgcaagaacacatgggcaccaatgtgatcgtggccaacacaatgcccacccacctgagcaacggccagatgtgcgagtggcccagacctagaggacaggccgccacacctgagacacctcagccttctccacctggcggctctggcagcgagccttacaaactgctgcctggcgctgtggccaccatcgtgaaacctctgagcgccatcccccagcccaccatcaccaagcaggaagtgatctgaggactagtccctgttcccagagcccacttttttttctttttttgaaataaaatagcctgtctttcagatctcaaaggctcttttcagagccaccaaaaaaaaaaaaaaaaaaaaaaaaaaaaaaaaaaaaaaaaaaaaaaaaaaaaaaaaaaaaaaaaaaaaaaaaaaaaaaaaaaaaaaaaaaaaaaaaaaaaa

SEQ ID NO: 4216 - RNA, 1586 nt, synthetic construct
  misc_feature 1..1586: note = mRNA a-1 (hSL-A100) (opt29) from Homo sapiens__NP_000448.3__HNF4A(39-474)(S142A_S143A_S313A_K458R )
  source 1..1586: mol_type = other RNA
aggagagtcccgcagtcggcgtccagcggctctgcttgttcgtgtgtgtgtcgttgcaggccttattcaagcttaccatggacaccagccctagcgagggcaccaacctgaacgcccctaatagcctgggagtgtccgccctgtgtgccatctgtggcgatagagccaccggcaagcactacggcgccagctcttgtgatggctgcaagggcttcttccggcggagcgtgcggaagaaccacatgtacagctgccggttcagccggcagtgcgtggtggacaaggataagcggaaccagtgccggtactgcagactgaagaagtgcttcagagccggcatgaagaaagaagccgtgcagaacgagcgggaccggatcagcaccagaagagccgcctacgaggacagcagcctgcccagcatcaacgccctgctgcaggccgaggtgctgagcagacagatcaccagcccagtgtccggcatcaacggcgacatccgggccaagaagatcgccagcattgccgacgtgtgcgagagcatgaaggaacagctgctggtgctggtggaatgggccaagtacatccccgccttttgcgagctgcccctggacgatcaggtggccctgctgagagcacacgccggcgaacatctgctgctgggagccaccaagcggagcatggtgttcaaggacgtgctgctgctgggcaacgactacatcgtgcccagacactgccctgagctggccgagatgagccgggtgtccatcagaatcctggacgaactggtgctgccgtttcaggaactgcagatcgacgacaacgagtacgcctacctgaaggccatcatctttttcgaccccgacgccaagggcctgagcgaccctggcaagatcaagcggctgagagcccaggtgcaagtgtccctggaagattacatcaacgaccggcagtacgacagccggggcagatttggcgaactgctcctgctgctgcccaccctgcagagcatcacctggcagatgatcgagcagatccagttcatcaagctgttcggcatggccaagatcgacaatctgctgcaggaaatgctgctcgggggcagcccttctgatgcccctcatgcccaccaccctctgcaccctcacctgatgcaagaacacatgggcaccaatgtgatcgtggccaacacaatgcccacccacctgagcaacggccagatgtgcgagtggcccagacctagaggacaggccgccacacctgagacacctcagccttctccacctggcggctctggcagcgagccttacaaactgctgcctggcgctgtggccaccatcgtgagacctctgagcgccatcccccagcccaccatcaccaagcaggaagtgatctgaggactagtccctgttcccagagcccacttttttttctttttttgaaataaaatagcctgtctttcagatctcaaaggctcttttcagagccaccaaaaaaaaaaaaaaaaaaaaaaaaaaaaaaaaaaaaaaaaaaaaaaaaaaaaaaaaaaaaaaaaaaaaaaaaaaaaaaaaaaaaaaaaaaaaaaaaaaaaa

SEQ ID NO: 4217 - RNA, 1586 nt, synthetic construct
  misc_feature 1..1586: note = mRNA a-1 (hSL-A100) (opt29) from Homo sapiens__NP_000448.3__HNF4A(39-474)(S142A_S143A_S167A_S313A _S378A_T429A_T432A_S436A_K458R)
  source 1..1586: mol_type = other RNA
aggagagtcccgcagtcggcgtccagcggctctgcttgttcgtgtgtgtgtcgttgcaggccttattcaagcttaccatggacaccagccctagcgagggcaccaacctgaacgcccctaatagcctgggagtgtccgccctgtgtgccatctgtggcgatagagccaccggcaagcactacggcgccagctcttgtgatggctgcaagggcttcttccggcggagcgtgcggaagaaccacatgtacagctgccggttcagccggcagtgcgtggtggacaaggataagcggaaccagtgccggtactgcagactgaagaagtgcttcagagccggcatgaagaaagaagccgtgcagaacgagcgggaccggatcagcaccagaagagccgcctacgaggacagcagcctgcccagcatcaacgccctgctgcaggccgaggtgctgagcagacagatcaccgccccagtgtccggcatcaacggcgacatccgggccaagaagatcgccagcattgccgacgtgtgcgagagcatgaaggaacagctgctggtgctggtggaatgggccaagtacatccccgccttttgcgagctgcccctggacgatcaggtggccctgctgagagcacacgccggcgaacatctgctgctgggagccaccaagcggagcatggtgttcaaggacgtgctgctgctgggcaacgactacatcgtgcccagacactgccctgagctggccgagatgagccgggtgtccatcagaatcctggacgaactggtgctgccgtttcaggaactgcagatcgacgacaacgagtacgcctacctgaaggccatcatctttttcgaccccgacgccaagggcctgagcgaccctggcaagatcaagcggctgagagcccaggtgcaagtgtccctggaagattacatcaacgaccggcagtacgacagccggggcagatttggcgaactgctcctgctgctgcccaccctgcagagcatcacctggcagatgatcgagcagatccagttcatcaagctgttcggcatggccaagatcgacaatctgctgcaggaaatgctgctcgggggcgccccttctgatgcccctcatgcccaccaccctctgcaccctcacctgatgcaagaacacatgggcaccaatgtgatcgtggccaacacaatgcccacccacctgagcaacggccagatgtgcgagtggcccagacctagaggacaggccgccgcccctgaggcccctcagcctgccccacctggcggctctggcagcgagccttacaaactgctgcctggcgctgtggccaccatcgtgagacctctgagcgccatcccccagcccaccatcaccaagcaggaagtgatctgaggactagtccctgttcccagagcccacttttttttctttttttgaaataaaatagcctgtctttcagatctcaaaggctcttttcagagccaccaaaaaaaaaaaaaaaaaaaaaaaaaaaaaaaaaaaaaaaaaaaaaaaaaaaaaaaaaaaaaaaaaaaaaaaaaaaaaaaaaaaaaaaaaaaaaaaaaaaaa

SEQ ID NO: 4218 - RNA, 1586 nt, synthetic construct
  misc_feature 1..1586: note = mRNA a-1 (hSL-A100) (opt29) from Homo sapiens__NP_000448.3__HNF4A(39-474)(S142A_S143A_S148A_S167A _S313A_S378A_T429A_T432A_S436A_K458R)
  source 1..1586: mol_type = other RNA
aggagagtcccgcagtcggcgtccagcggctctgcttgttcgtgtgtgtgtcgttgcaggccttattcaagcttaccatggacaccagccctagcgagggcaccaacctgaacgcccctaatagcctgggagtgtccgccctgtgtgccatctgtggcgatagagccaccggcaagcactacggcgccagctcttgtgatggctgcaagggcttcttccggcggagcgtgcggaagaaccacatgtacagctgccggttcagccggcagtgcgtggtggacaaggataagcggaaccagtgccggtactgcagactgaagaagtgcttcagagccggcatgaagaaagaagccgtgcagaacgagcgggaccggatcagcaccagaagagccgcctacgaggacagcgccctgcccagcatcaacgccctgctgcaggccgaggtgctgagcagacagatcaccgccccagtgtccggcatcaacggcgacatccgggccaagaagatcgccagcattgccgacgtgtgcgagagcatgaaggaacagctgctggtgctggtggaatgggccaagtacatccccgccttttgcgagctgcccctggacgatcaggtggccctgctgagagcacacgccggcgaacatctgctgctgggagccaccaagcggagcatggtgttcaaggacgtgctgctgctgggcaacgactacatcgtgcccagacactgccctgagctggccgagatgagccgggtgtccatcagaatcctggacgaactggtgctgccgtttcaggaactgcagatcgacgacaacgagtacgcctacctgaaggccatcatctttttcgaccccgacgccaagggcctgagcgaccctggcaagatcaagcggctgagagcccaggtgcaagtgtccctggaagattacatcaacgaccggcagtacgacagccggggcagatttggcgaactgctcctgctgctgcccaccctgcagagcatcacctggcagatgatcgagcagatccagttcatcaagctgttcggcatggccaagatcgacaatctgctgcaggaaatgctgctcgggggcgccccttctgatgcccctcatgcccaccaccctctgcaccctcacctgatgcaagaacacatgggcaccaatgtgatcgtggccaacacaatgcccacccacctgagcaacggccagatgtgcgagtggcccagacctagaggacaggccgccgcccctgaggcccctcagcctgccccacctggcggctctggcagcgagccttacaaactgctgcctggcgctgtggccaccatcgtgagacctctgagcgccatcccccagcccaccatcaccaagcaggaagtgatctgaggactagtccctgttcccagagcccacttttttttctttttttgaaataaaatagcctgtctttcagatctcaaaggctcttttcagagccaccaaaaaaaaaaaaaaaaaaaaaaaaaaaaaaaaaaaaaaaaaaaaaaaaaaaaaaaaaaaaaaaaaaaaaaaaaaaaaaaaaaaaaaaaaaaaaaaaaaaaa

SEQ ID NO: 4219 - RNA, 1586 nt, synthetic construct
  misc_feature 1..1586: note = mRNA a-1 (hSL-A100) (opt29) from Homo sapiens__NP_000448.3__HNF4A(39-474)(K106R_K108R_K126R_K127R _S142A_S143A_S148A_S167A_S313A_S378A_T429A_T432A_S436A_K458 R)
  source 1..1586: mol_type = other RNA
aggagagtcccgcagtcggcgtccagcggctctgcttgttcgtgtgtgtgtcgttgcaggccttattcaagcttaccatggacaccagccctagcgagggcaccaacctgaacgcccctaatagcctgggagtgtccgccctgtgtgccatctgtggcgatagagccaccggcaagcactacggcgccagctcttgtgatggctgcaagggcttcttccggcggagcgtgcggaagaaccacatgtacagctgccggttcagccggcagtgcgtggtggaccgggatagacggaaccagtgccggtactgcagactgaagaagtgcttcagagccggcatgcggagagaagccgtgcagaacgagcgggaccggatcagcaccagaagagccgcctacgaggacagcgccctgcccagcatcaacgccctgctgcaggccgaggtgctgagcagacagatcaccgccccagtgtccggcatcaacggcgacatccgggccaagaagatcgccagcattgccgacgtgtgcgagagcatgaaggaacagctgctggtgctggtggaatgggccaagtacatccccgccttttgcgagctgcccctggacgatcaggtggccctgctgagagcacacgccggcgaacatctgctgctgggagccaccaagcggagcatggtgttcaaggacgtgctgctgctgggcaacgactacatcgtgcccagacactgccctgagctggccgagatgagccgggtgtccatcagaatcctggacgaactggtgctgccgtttcaggaactgcagatcgacgacaacgagtacgcctacctgaaggccatcatctttttcgaccccgacgccaagggcctgagcgaccctggcaagatcaagcggctgagagcccaggtgcaagtgtccctggaagattacatcaacgaccggcagtacgacagccggggcagatttggcgaactgctcctgctgctgcccaccctgcagagcatcacctggcagatgatcgagcagatccagttcatcaagctgttcggcatggccaagatcgacaatctgctgcaggaaatgctgctcgggggcgccccttctgatgcccctcatgcccaccaccctctgcaccctcacctgatgcaagaacacatgggcaccaatgtgatcgtggccaacacaatgcccacccacctgagcaacggccagatgtgcgagtggcccagacctagaggacaggccgccgcccctgaggcccctcagcctgccccacctggcggctctggcagcgagccttacaaactgctgcctggcgctgtggccaccatcgtgagacctctgagcgccatcccccagcccaccatcaccaagcaggaagtgatctgaggactagtccctgttcccagagcccacttttttttctttttttgaaataaaatagcctgtctttcagatctcaaaggctcttttcagagccaccaaaaaaaaaaaaaaaaaaaaaaaaaaaaaaaaaaaaaaaaaaaaaaaaaaaaaaaaaaaaaaaaaaaaaaaaaaaaaaaaaaaaaaaaaaaaaaaaaaaaa

SEQ ID NO: 4220 - RNA, 1586 nt, synthetic construct
  misc_feature 1..1586: note = mRNA a-1 (hSL-A100) (opt29) from Homo sapiens__NP_000448.3__HNF4A(39-474)(S142A_S143A_S148A_T166A _S167A_S313A_S378A_T429A_T432A_S436A_K458R)
  source 1..1586: mol_type = other RNA
aggagagtcccgcagtcggcgtccagcggctctgcttgttcgtgtgtgtgtcgttgcaggccttattcaagcttaccatggacaccagccctagcgagggcaccaacctgaacgcccctaatagcctgggagtgtccgccctgtgtgccatctgtggcgatagagccaccggcaagcactacggcgccagctcttgtgatggctgcaagggcttcttccggcggagcgtgcggaagaaccacatgtacagctgccggttcagccggcagtgcgtggtggacaaggataagcggaaccagtgccggtactgcagactgaagaagtgcttcagagccggcatgaagaaagaagccgtgcagaacgagcgggaccggatcagcaccagaagagccgcctacgaggacagcgccctgcccagcatcaacgccctgctgcaggccgaggtgctgagcagacagatcgccgccccagtgtccggcatcaacggcgacatccgggccaagaagatcgccagcattgccgacgtgtgcgagagcatgaaggaacagctgctggtgctggtggaatgggccaagtacatccccgccttttgcgagctgcccctggacgatcaggtggccctgctgagagcacacgccggcgaacatctgctgctgggagccaccaagcggagcatggtgttcaaggacgtgctgctgctgggcaacgactacatcgtgcccagacactgccctgagctggccgagatgagccgggtgtccatcagaatcctggacgaactggtgctgccgtttcaggaactgcagatcgacgacaacgagtacgcctacctgaaggccatcatctttttcgaccccgacgccaagggcctgagcgaccctggcaagatcaagcggctgagagcccaggtgcaagtgtccctggaagattacatcaacgaccggcagtacgacagccggggcagatttggcgaactgctcctgctgctgcccaccctgcagagcatcacctggcagatgatcgagcagatccagttcatcaagctgttcggcatggccaagatcgacaatctgctgcaggaaatgctgctcgggggcgccccttctgatgcccctcatgcccaccaccctctgcaccctcacctgatgcaagaacacatgggcaccaatgtgatcgtggccaacacaatgcccacccacctgagcaacggccagatgtgcgagtggcccagacctagaggacaggccgccgcccctgaggcccctcagcctgccccacctggcggctctggcagcgagccttacaaactgctgcctggcgctgtggccaccatcgtgagacctctgagcgccatcccccagcccaccatcaccaagcaggaagtgatctgaggactagtccctgttcccagagcccacttttttttctttttttgaaataaaatagcctgtctttcagatctcaaaggctcttttcagagccaccaaaaaaaaaaaaaaaaaaaaaaaaaaaaaaaaaaaaaaaaaaaaaaaaaaaaaaaaaaaaaaaaaaaaaaaaaaaaaaaaaaaaaaaaaaaaaaaaaaaaa

SEQ ID NO: 4221 - RNA, 1586 nt, synthetic construct
  misc_feature 1..1586: note = mRNA a-1 (hSL-A100) (opt29) from Homo sapiens__NP_000448.3__HNF4A(39-474)(S87A_S142A_S143A_S148A_ T166A_S167A_S313A_S378A_T429A_T432A_S436A_K458R)
  source 1..1586: mol_type = other RNA
aggagagtcccgcagtcggcgtccagcggctctgcttgttcgtgtgtgtgtcgttgcaggccttattcaagcttaccatggacaccagccctagcgagggcaccaacctgaacgcccctaatagcctgggagtgtccgccctgtgtgccatctgtggcgatagagccaccggcaagcactacggcgccagctcttgtgatggctgcaagggcttcttccggcgggccgtgcggaagaaccacatgtacagctgccggttcagccggcagtgcgtggtggacaaggataagcggaaccagtgccggtactgcagactgaagaagtgcttcagagccggcatgaagaaagaagccgtgcagaacgagcgggaccggatcagcaccagaagagccgcctacgaggacagcgccctgcccagcatcaacgccctgctgcaggccgaggtgctgagcagacagatcgccgccccagtgtccggcatcaacggcgacatccgggccaagaagatcgccagcattgccgacgtgtgcgagagcatgaaggaacagctgctggtgctggtggaatgggccaagtacatccccgccttttgcgagctgcccctggacgatcaggtggccctgctgagagcacacgccggcgaacatctgctgctgggagccaccaagcggagcatggtgttcaaggacgtgctgctgctgggcaacgactacatcgtgcccagacactgccctgagctggccgagatgagccgggtgtccatcagaatcctggacgaactggtgctgccgtttcaggaactgcagatcgacgacaacgagtacgcctacctgaaggccatcatctttttcgaccccgacgccaagggcctgagcgaccctggcaagatcaagcggctgagagcccaggtgcaagtgtccctggaagattacatcaacgaccggcagtacgacagccggggcagatttggcgaactgctcctgctgctgcccaccctgcagagcatcacctggcagatgatcgagcagatccagttcatcaagctgttcggcatggccaagatcgacaatctgctgcaggaaatgctgctcgggggcgccccttctgatgcccctcatgcccaccaccctctgcaccctcacctgatgcaagaacacatgggcaccaatgtgatcgtggccaacacaatgcccacccacctgagcaacggccagatgtgcgagtggcccagacctagaggacaggccgccgcccctgaggcccctcagcctgccccacctggcggctctggcagcgagccttacaaactgctgcctggcgctgtggccaccatcgtgagacctctgagcgccatcccccagcccaccatcaccaagcaggaagtgatctgaggactagtccctgttcccagagcccacttttttttctttttttgaaataaaatagcctgtctttcagatctcaaaggctcttttcagagccaccaaaaaaaaaaaaaaaaaaaaaaaaaaaaaaaaaaaaaaaaaaaaaaaaaaaaaaaaaaaaaaaaaaaaaaaaaaaaaaaaaaaaaaaaaaaaaaaaaaaaa

SEQ ID NO: 4222 - RNA, 1586 nt, synthetic construct
  misc_feature 1..1586: note = mRNA a-1 (hSL-A100) (opt29) from Homo sapiens__NP_000448.3__HNF4A(39-474)(S87A_K106R_K108R_K126R_ K127R_S142A_S143A_S148A_T166A_S167A_S313A_S378A_T429A_T432A _S436A_K458R)
  source 1..1586: mol_type = other RNA
aggagagtcccgcagtcggcgtccagcggctctgcttgttcgtgtgtgtgtcgttgcaggccttattcaagcttaccatggacaccagccctagcgagggcaccaacctgaacgcccctaatagcctgggagtgtccgccctgtgtgccatctgtggcgatagagccaccggcaagcactacggcgccagctcttgtgatggctgcaagggcttcttccggcgggccgtgcggaagaaccacatgtacagctgccggttcagccggcagtgcgtggtggaccgggatagacggaaccagtgccggtactgcagactgaagaagtgcttcagagccggcatgcggagagaagccgtgcagaacgagcgggaccggatcagcaccagaagagccgcctacgaggacagcgccctgcccagcatcaacgccctgctgcaggccgaggtgctgagcagacagatcgccgccccagtgtccggcatcaacggcgacatccgggccaagaagatcgccagcattgccgacgtgtgcgagagcatgaaggaacagctgctggtgctggtggaatgggccaagtacatccccgccttttgcgagctgcccctggacgatcaggtggccctgctgagagcacacgccggcgaacatctgctgctgggagccaccaagcggagcatggtgttcaaggacgtgctgctgctgggcaacgactacatcgtgcccagacactgccctgagctggccgagatgagccgggtgtccatcagaatcctggacgaactggtgctgccgtttcaggaactgcagatcgacgacaacgagtacgcctacctgaaggccatcatctttttcgaccccgacgccaagggcctgagcgaccctggcaagatcaagcggctgagagcccaggtgcaagtgtccctggaagattacatcaacgaccggcagtacgacagccggggcagatttggcgaactgctcctgctgctgcccaccctgcagagcatcacctggcagatgatcgagcagatccagttcatcaagctgttcggcatggccaagatcgacaatctgctgcaggaaatgctgctcgggggcgccccttctgatgcccctcatgcccaccaccctctgcaccctcacctgatgcaagaacacatgggcaccaatgtgatcgtggccaacacaatgcccacccacctgagcaacggccagatgtgcgagtggcccagacctagaggacaggccgccgcccctgaggcccctcagcctgccccacctggcggctctggcagcgagccttacaaactgctgcctggcgctgtggccaccatcgtgagacctctgagcgccatcccccagcccaccatcaccaagcaggaagtgatctgaggactagtccctgttcccagagcccacttttttttctttttttgaaataaaatagcctgtctttcagatctcaaaggctcttttcagagccaccaaaaaaaaaaaaaaaaaaaaaaaaaaaaaaaaaaaaaaaaaaaaaaaaaaaaaaaaaaaaaaaaaaaaaaaaaaaaaaaaaaaaaaaaaaaaaaaaaaaaa

SEQ ID NO: 4223 - RNA, 1586 nt, synthetic construct
  misc_feature 1..1586: note = mRNA a-1 (hSL-A100) (opt29) from Homo sapiens__NP_000448.3__HNF4A(39-474)(S87A_K106R_K108R_K126R_ K127R)
  source 1..1586: mol_type = other RNA
aggagagtcccgcagtcggcgtccagcggctctgcttgttcgtgtgtgtgtcgttgcaggccttattcaagcttaccatggacaccagccctagcgagggcaccaacctgaacgcccctaatagcctgggagtgtccgccctgtgtgccatctgtggcgatagagccaccggcaagcactacggcgccagctcttgtgatggctgcaagggcttcttccggcgggccgtgcggaagaaccacatgtacagctgccggttcagccggcagtgcgtggtggaccgggatagacggaaccagtgccggtactgcagactgaagaagtgcttcagagccggcatgcggagagaagccgtgcagaacgagcgggaccggatcagcaccagaagaagcagctacgaggacagcagcctgcccagcatcaacgccctgctgcaggccgaggtgctgagcagacagatcaccagcccagtgtccggcatcaacggcgacatccgggccaagaagatcgccagcattgccgacgtgtgcgagagcatgaaggaacagctgctggtgctggtggaatgggccaagtacatccccgccttttgcgagctgcccctggacgatcaggtggccctgctgagagcacacgccggcgaacatctgctgctgggagccaccaagcggagcatggtgttcaaggacgtgctgctgctgggcaacgactacatcgtgcccagacactgccctgagctggccgagatgagccgggtgtccatcagaatcctggacgaactggtgctgccgtttcaggaactgcagatcgacgacaacgagtacgcctacctgaaggccatcatctttttcgaccccgacgccaagggcctgagcgaccctggcaagatcaagcggctgagaagccaggtgcaagtgtccctggaagattacatcaacgaccggcagtacgacagccggggcagatttggcgaactgctcctgctgctgcccaccctgcagagcatcacctggcagatgatcgagcagatccagttcatcaagctgttcggcatggccaagatcgacaatctgctgcaggaaatgctgctcgggggcagcccttctgatgcccctcatgcccaccaccctctgcaccctcacctgatgcaagaacacatgggcaccaatgtgatcgtggccaacacaatgcccacccacctgagcaacggccagatgtgcgagtggcccagacctagaggacaggccgccacacctgagacacctcagccttctccacctggcggctctggcagcgagccttacaaactgctgcctggcgctgtggccaccatcgtgaaacctctgagcgccatcccccagcccaccatcaccaagcaggaagtgatctgaggactagtccctgttcccagagcccacttttttttctttttttgaaataaaatagcctgtctttcagatctcaaaggctcttttcagagccaccaaaaaaaaaaaaaaaaaaaaaaaaaaaaaaaaaaaaaaaaaaaaaaaaaaaaaaaaaaaaaaaaaaaaaaaaaaaaaaaaaaaaaaaaaaaaaaaaaaaaa

SEQ ID NO: 4224 - RNA, 1586 nt, synthetic construct
  misc_feature 1..1586: note = mRNA a-1 (hSL-A100) (opt29) from Homo sapiens__NP_000448.3__HNF4A(39-474)(S87A_K106R_K108R_K126R_ K127R_S142A_S143A_S148A_T166A_S167A_S313A_S378A_T429A_T432A _S436A_K458R_S461A)
  source 1..1586: mol_type = other RNA
aggagagtcccgcagtcggcgtccagcggctctgcttgttcgtgtgtgtgtcgttgcaggccttattcaagcttaccatggacaccagccctagcgagggcaccaacctgaacgcccctaatagcctgggagtgtccgccctgtgtgccatctgtggcgatagagccaccggcaagcactacggcgccagctcttgtgatggctgcaagggcttcttccggcgggccgtgcggaagaaccacatgtacagctgccggttcagccggcagtgcgtggtggaccgggatagacggaaccagtgccggtactgcagactgaagaagtgcttcagagccggcatgcggagagaagccgtgcagaacgagcgggaccggatcagcaccagaagagccgcctacgaggacagcgccctgcccagcatcaacgccctgctgcaggccgaggtgctgagcagacagatcgccgccccagtgtccggcatcaacggcgacatccgggccaagaagatcgccagcattgccgacgtgtgcgagagcatgaaggaacagctgctggtgctggtggaatgggccaagtacatccccgccttttgcgagctgcccctggacgatcaggtggccctgctgagagcacacgccggcgaacatctgctgctgggagccaccaagcggagcatggtgttcaaggacgtgctgctgctgggcaacgactacatcgtgcccagacactgccctgagctggccgagatgagccgggtgtccatcagaatcctggacgaactggtgctgccgtttcaggaactgcagatcgacgacaacgagtacgcctacctgaaggccatcatctttttcgaccccgacgccaagggcctgagcgaccctggcaagatcaagcggctgagagcccaggtgcaagtgtccctggaagattacatcaacgaccggcagtacgacagccggggcagatttggcgaactgctcctgctgctgcccaccctgcagagcatcacctggcagatgatcgagcagatccagttcatcaagctgttcggcatggccaagatcgacaatctgctgcaggaaatgctgctcgggggcgccccttctgatgcccctcatgcccaccaccctctgcaccctcacctgatgcaagaacacatgggcaccaatgtgatcgtggccaacacaatgcccacccacctgagcaacggccagatgtgcgagtggcccagacctagaggacaggccgccgcccctgaggcccctcagcctgccccacctggcggctctggcagcgagccttacaaactgctgcctggcgctgtggccaccatcgtgagacctctggccgccatcccccagcccaccatcaccaagcaggaagtgatctgaggactagtccctgttcccagagcccacttttttttctttttttgaaataaaatagcctgtctttcagatctcaaaggctcttttcagagccaccaaaaaaaaaaaaaaaaaaaaaaaaaaaaaaaaaaaaaaaaaaaaaaaaaaaaaaaaaaaaaaaaaaaaaaaaaaaaaaaaaaaaaaaaaaaaaaaaaaaaa

SEQ ID NO: 4225 - RNA, 1586 nt, synthetic construct
  misc_feature 1..1586: note = mRNA a-1 (hSL-A100) (opt29) from Homo sapiens__NP_000448.3__HNF4A(39-474)(S87A_K106R_K108R_K126R_ K127R_S142A_S143A_S148A_T166A_S167A_S313A_S378A_T429A_T432A _S436A_K458R_S461E)
  source 1..1586: mol_type = other RNA
aggagagtcccgcagtcggcgtccagcggctctgcttgttcgtgtgtgtgtcgttgcaggccttattcaagcttaccatggacaccagccctagcgagggcaccaacctgaacgcccctaatagcctgggagtgtccgccctgtgtgccatctgtggcgatagagccaccggcaagcactacggcgccagctcttgtgatggctgcaagggcttcttccggcgggccgtgcggaagaaccacatgtacagctgccggttcagccggcagtgcgtggtggaccgggatagacggaaccagtgccggtactgcagactgaagaagtgcttcagagccggcatgcggagagaagccgtgcagaacgagcgggaccggatcagcaccagaagagccgcctacgaggacagcgccctgcccagcatcaacgccctgctgcaggccgaggtgctgagcagacagatcgccgccccagtgtccggcatcaacggcgacatccgggccaagaagatcgccagcattgccgacgtgtgcgagagcatgaaggaacagctgctggtgctggtggaatgggccaagtacatccccgccttttgcgagctgcccctggacgatcaggtggccctgctgagagcacacgccggcgaacatctgctgctgggagccaccaagcggagcatggtgttcaaggacgtgctgctgctgggcaacgactacatcgtgcccagacactgccctgagctggccgagatgagccgggtgtccatcagaatcctggacgaactggtgctgccgtttcaggaactgcagatcgacgacaacgagtacgcctacctgaaggccatcatctttttcgaccccgacgccaagggcctgagcgaccctggcaagatcaagcggctgagagcccaggtgcaagtgtccctggaagattacatcaacgaccggcagtacgacagccggggcagatttggcgaactgctcctgctgctgcccaccctgcagagcatcacctggcagatgatcgagcagatccagttcatcaagctgttcggcatggccaagatcgacaatctgctgcaggaaatgctgctcgggggcgccccttctgatgcccctcatgcccaccaccctctgcaccctcacctgatgcaagaacacatgggcaccaatgtgatcgtggccaacacaatgcccacccacctgagcaacggccagatgtgcgagtggcccagacctagaggacaggccgccgcccctgaggcccctcagcctgccccacctggcggctctggcagcgagccttacaaactgctgcctggcgctgtggccaccatcgtgagacctctggaggccatcccccagcccaccatcaccaagcaggaagtgatctgaggactagtccctgttcccagagcccacttttttttctttttttgaaataaaatagcctgtctttcagatctcaaaggctcttttcagagccaccaaaaaaaaaaaaaaaaaaaaaaaaaaaaaaaaaaaaaaaaaaaaaaaaaaaaaaaaaaaaaaaaaaaaaaaaaaaaaaaaaaaaaaaaaaaaaaaaaaaaa

SEQ ID NO: 4226 - RNA, 1586 nt, synthetic construct
  misc_feature 1..1586: note = mRNA a-1 (hSL-A100) (opt29) from Homo sapiens__NP_000448.3__HNF4A(39-474)(S87A_K106R_K108R_K126R_ K127R_S142A_S143A_S148E_T166A_S167E_S313A_S378E_T429E_T432E _S436E_K458R_S461E)
  source 1..1586: mol_type = other RNA
aggagagtcccgcagtcggcgtccagcggctctgcttgttcgtgtgtgtgtcgttgcaggccttattcaagcttaccatggacaccagccctagcgagggcaccaacctgaacgcccctaatagcctgggagtgtccgccctgtgtgccatctgtggcgatagagccaccggcaagcactacggcgccagctcttgtgatggctgcaagggcttcttccggcgggccgtgcggaagaaccacatgtacagctgccggttcagccggcagtgcgtggtggaccgggatagacggaaccagtgccggtactgcagactgaagaagtgcttcagagccggcatgcggagagaagccgtgcagaacgagcgggaccggatcagcaccagaagagccgcctacgaggacagcgaactgcccagcatcaacgccctgctgcaggccgaggtgctgagcagacagatcgccgaaccagtgtccggcatcaacggcgacatccgggccaagaagatcgccagcattgccgacgtgtgcgagagcatgaaggaacagctgctggtgctggtggaatgggccaagtacatccccgccttttgcgagctgcccctggacgatcaggtggccctgctgagagcacacgccggcgaacatctgctgctgggagccaccaagcggagcatggtgttcaaggacgtgctgctgctgggcaacgactacatcgtgcccagacactgccctgagctggccgagatgagccgggtgtccatcagaatcctggacgaactggtgctgccgtttcaggaactgcagatcgacgacaacgagtacgcctacctgaaggccatcatctttttcgaccccgacgccaagggcctgagcgaccctggcaagatcaagcggctgagagcccaggtgcaagtgtccctggaagattacatcaacgaccggcagtacgacagccggggcagatttggcgaactgctcctgctgctgcccaccctgcagagcatcacctggcagatgatcgagcagatccagttcatcaagctgttcggcatggccaagatcgacaatctgctgcaggaaatgctgctcgggggcgagccttctgatgcccctcatgcccaccaccctctgcaccctcacctgatgcaagaacacatgggcaccaatgtgatcgtggccaacacaatgcccacccacctgagcaacggccagatgtgcgagtggcccagacctagaggacaggccgccgaacctgaggagcctcagcctgaaccacctggcggctctggcagcgagccttacaaactgctgcctggcgctgtggccaccatcgtgagacctctggaggccatcccccagcccaccatcaccaagcaggaagtgatctgaggactagtccctgttcccagagcccacttttttttctttttttgaaataaaatagcctgtctttcagatctcaaaggctcttttcagagccaccaaaaaaaaaaaaaaaaaaaaaaaaaaaaaaaaaaaaaaaaaaaaaaaaaaaaaaaaaaaaaaaaaaaaaaaaaaaaaaaaaaaaaaaaaaaaaaaaaaaaa

SEQ ID NO: 4227 - RNA, 1586 nt, synthetic construct
  misc_feature 1..1586: note = mRNA a-1 (hSL-A100) (opt29) from Homo sapiens__NP_000448.3__HNF4A(39-474)(S87A_K106R_K108R_K126R_ K127R_S142A_S143A_S148A_T166A_S167A_K179R_K180R_S313A_S378A _T429A_T432A_S436A_K458R_S461E)
  source 1..1586: mol_type = other RNA
aggagagtcccgcagtcggcgtccagcggctctgcttgttcgtgtgtgtgtcgttgcaggccttattcaagcttaccatggacaccagccctagcgagggcaccaacctgaacgcccctaatagcctgggagtgtccgccctgtgtgccatctgtggcgatagagccaccggcaagcactacggcgccagctcttgtgatggctgcaagggcttcttccggcgggccgtgcggaagaaccacatgtacagctgccggttcagccggcagtgcgtggtggaccgggatagacggaaccagtgccggtactgcagactgaagaagtgcttcagagccggcatgcggagagaagccgtgcagaacgagcgggaccggatcagcaccagaagagccgcctacgaggacagcgccctgcccagcatcaacgccctgctgcaggccgaggtgctgagcagacagatcgccgccccagtgtccggcatcaacggcgacatccgggcccggagaatcgccagcattgccgacgtgtgcgagagcatgaaggaacagctgctggtgctggtggaatgggccaagtacatccccgccttttgcgagctgcccctggacgatcaggtggccctgctgagagcacacgccggcgaacatctgctgctgggagccaccaagcggagcatggtgttcaaggacgtgctgctgctgggcaacgactacatcgtgcccagacactgccctgagctggccgagatgagccgggtgtccatcagaatcctggacgaactggtgctgccgtttcaggaactgcagatcgacgacaacgagtacgcctacctgaaggccatcatctttttcgaccccgacgccaagggcctgagcgaccctggcaagatcaagcggctgagagcccaggtgcaagtgtccctggaagattacatcaacgaccggcagtacgacagccggggcagatttggcgaactgctcctgctgctgcccaccctgcagagcatcacctggcagatgatcgagcagatccagttcatcaagctgttcggcatggccaagatcgacaatctgctgcaggaaatgctgctcgggggcgccccttctgatgcccctcatgcccaccaccctctgcaccctcacctgatgcaagaacacatgggcaccaatgtgatcgtggccaacacaatgcccacccacctgagcaacggccagatgtgcgagtggcccagacctagaggacaggccgccgcccctgaggcccctcagcctgccccacctggcggctctggcagcgagccttacaaactgctgcctggcgctgtggccaccatcgtgagacctctggaggccatcccccagcccaccatcaccaagcaggaagtgatctgaggactagtccctgttcccagagcccacttttttttctttttttgaaataaaatagcctgtctttcagatctcaaaggctcttttcagagccaccaaaaaaaaaaaaaaaaaaaaaaaaaaaaaaaaaaaaaaaaaaaaaaaaaaaaaaaaaaaaaaaaaaaaaaaaaaaaaaaaaaaaaaaaaaaaaaaaaaaaa

SEQ ID NO: 4228 - RNA, 1586 nt, synthetic construct
  misc_feature 1..1586: note = mRNA a-1 (hSL-A100) (opt29) from Homo sapiens__NP_000448.3__HNF4A(39-474)(S87A_K106R_K108R_K126R_ K127R_S142A_S143A_S148A_T166A_S167A_K300R_K307R_K309R_S313A _S378A_T429A_T432A_S436A_K458R_S461E)
  source 1..1586: mol_type = other RNA
aggagagtcccgcagtcggcgtccagcggctctgcttgttcgtgtgtgtgtcgttgcaggccttattcaagcttaccatggacaccagccctagcgagggcaccaacctgaacgcccctaatagcctgggagtgtccgccctgtgtgccatctgtggcgatagagccaccggcaagcactacggcgccagctcttgtgatggctgcaagggcttcttccggcgggccgtgcggaagaaccacatgtacagctgccggttcagccggcagtgcgtggtggaccgggatagacggaaccagtgccggtactgcagactgaagaagtgcttcagagccggcatgcggagagaagccgtgcagaacgagcgggaccggatcagcaccagaagagccgcctacgaggacagcgccctgcccagcatcaacgccctgctgcaggccgaggtgctgagcagacagatcgccgccccagtgtccggcatcaacggcgacatccgggccaagaagatcgccagcattgccgacgtgtgcgagagcatgaaggaacagctgctggtgctggtggaatgggccaagtacatccccgccttttgcgagctgcccctggacgatcaggtggccctgctgagagcacacgccggcgaacatctgctgctgggagccaccaagcggagcatggtgttcaaggacgtgctgctgctgggcaacgactacatcgtgcccagacactgccctgagctggccgagatgagccgggtgtccatcagaatcctggacgaactggtgctgccgtttcaggaactgcagatcgacgacaacgagtacgcctacctgaaggccatcatctttttcgaccccgacgccagaggcctgagcgaccctggccggatcagacggctgagagcccaggtgcaagtgtccctggaagattacatcaacgaccggcagtacgacagccggggcagatttggcgaactgctcctgctgctgcccaccctgcagagcatcacctggcagatgatcgagcagatccagttcatcaagctgttcggcatggccaagatcgacaatctgctgcaggaaatgctgctcgggggcgccccttctgatgcccctcatgcccaccaccctctgcaccctcacctgatgcaagaacacatgggcaccaatgtgatcgtggccaacacaatgcccacccacctgagcaacggccagatgtgcgagtggcccagacctagaggacaggccgccgcccctgaggcccctcagcctgccccacctggcggctctggcagcgagccttacaaactgctgcctggcgctgtggccaccatcgtgagacctctggaggccatcccccagcccaccatcaccaagcaggaagtgatctgaggactagtccctgttcccagagcccacttttttttctttttttgaaataaaatagcctgtctttcagatctcaaaggctcttttcagagccaccaaaaaaaaaaaaaaaaaaaaaaaaaaaaaaaaaaaaaaaaaaaaaaaaaaaaaaaaaaaaaaaaaaaaaaaaaaaaaaaaaaaaaaaaaaaaaaaaaaaaa

SEQ ID NO: 4229 - RNA, 1586 nt, synthetic construct
  misc_feature 1..1586: note = mRNA a-1 (hSL-A100) (opt29) from Homo sapiens__NP_000448.3__HNF4A(39-474)(S87A_K106R_K108R_K126R_ K127R_S142A_S143A_S148A_T166A_S167A_S313A_S378A_T429A_T432A _S436A_K447R_K458R_S461E_K470R)
  source 1..1586: mol_type = other RNA
aggagagtcccgcagtcggcgtccagcggctctgcttgttcgtgtgtgtgtcgttgcaggccttattcaagcttaccatggacaccagccctagcgagggcaccaacctgaacgcccctaatagcctgggagtgtccgccctgtgtgccatctgtggcgatagagccaccggcaagcactacggcgccagctcttgtgatggctgcaagggcttcttccggcgggccgtgcggaagaaccacatgtacagctgccggttcagccggcagtgcgtggtggaccgggatagacggaaccagtgccggtactgcagactgaagaagtgcttcagagccggcatgcggagagaagccgtgcagaacgagcgggaccggatcagcaccagaagagccgcctacgaggacagcgccctgcccagcatcaacgccctgctgcaggccgaggtgctgagcagacagatcgccgccccagtgtccggcatcaacggcgacatccgggccaagaagatcgccagcattgccgacgtgtgcgagagcatgaaggaacagctgctggtgctggtggaatgggccaagtacatccccgccttttgcgagctgcccctggacgatcaggtggccctgctgagagcacacgccggcgaacatctgctgctgggagccaccaagcggagcatggtgttcaaggacgtgctgctgctgggcaacgactacatcgtgcccagacactgccctgagctggccgagatgagccgggtgtccatcagaatcctggacgaactggtgctgccgtttcaggaactgcagatcgacgacaacgagtacgcctacctgaaggccatcatctttttcgaccccgacgccaagggcctgagcgaccctggcaagatcaagcggctgagagcccaggtgcaagtgtccctggaagattacatcaacgaccggcagtacgacagccggggcagatttggcgaactgctcctgctgctgcccaccctgcagagcatcacctggcagatgatcgagcagatccagttcatcaagctgttcggcatggccaagatcgacaatctgctgcaggaaatgctgctcgggggcgccccttctgatgcccctcatgcccaccaccctctgcaccctcacctgatgcaagaacacatgggcaccaatgtgatcgtggccaacacaatgcccacccacctgagcaacggccagatgtgcgagtggcccagacctagaggacaggccgccgcccctgaggcccctcagcctgccccacctggcggctctggcagcgagccttaccggctgctgcctggcgctgtggccaccatcgtgagacctctggaggccatcccccagcccaccatcacccggcaggaagtgatctgaggactagtccctgttcccagagcccacttttttttctttttttgaaataaaatagcctgtctttcagatctcaaaggctcttttcagagccaccaaaaaaaaaaaaaaaaaaaaaaaaaaaaaaaaaaaaaaaaaaaaaaaaaaaaaaaaaaaaaaaaaaaaaaaaaaaaaaaaaaaaaaaaaaaaaaaaaaaaa

SEQ ID NO: 4230 - RNA, 1586 nt, synthetic construct
  misc_feature 1..1586: note = mRNA a-1 (hSL-A100) (opt29) from Homo sapiens__NP_000448.3__HNF4A(39-474)(S87A_K106R_K108R_K126R_ K127R_S142A_S143A_S148A_T166A_S167A_K179R_K180R_K234R_K300R _K307R_K309R_S313A_S378A_T429A_T432A_S436A_K447R_K458R_S461 E_K470R)
  source 1..1586: mol_type = other RNA
aggagagtcccgcagtcggcgtccagcggctctgcttgttcgtgtgtgtgtcgttgcaggccttattcaagcttaccatggacaccagccctagcgagggcaccaacctgaacgcccctaatagcctgggagtgtccgccctgtgtgccatctgtggcgatagagccaccggcaagcactacggcgccagctcttgtgatggctgcaagggcttcttccggcgggccgtgcggaagaaccacatgtacagctgccggttcagccggcagtgcgtggtggaccgggatagacggaaccagtgccggtactgcagactgaagaagtgcttcagagccggcatgcggagagaagccgtgcagaacgagcgggaccggatcagcaccagaagagccgcctacgaggacagcgccctgcccagcatcaacgccctgctgcaggccgaggtgctgagcagacagatcgccgccccagtgtccggcatcaacggcgacatccgggcccggagaatcgccagcattgccgacgtgtgcgagagcatgaaggaacagctgctggtgctggtggaatgggccaagtacatccccgccttttgcgagctgcccctggacgatcaggtggccctgctgagagcacacgccggcgaacatctgctgctgggagccacccggcggagcatggtgttcaaggacgtgctgctgctgggcaacgactacatcgtgcccagacactgccctgagctggccgagatgagccgggtgtccatcagaatcctggacgaactggtgctgccgtttcaggaactgcagatcgacgacaacgagtacgcctacctgaaggccatcatctttttcgaccccgacgccagaggcctgagcgaccctggccggatcagacggctgagagcccaggtgcaagtgtccctggaagattacatcaacgaccggcagtacgacagccggggcagatttggcgaactgctcctgctgctgcccaccctgcagagcatcacctggcagatgatcgagcagatccagttcatcaagctgttcggcatggccaagatcgacaatctgctgcaggaaatgctgctcgggggcgccccttctgatgcccctcatgcccaccaccctctgcaccctcacctgatgcaagaacacatgggcaccaatgtgatcgtggccaacacaatgcccacccacctgagcaacggccagatgtgcgagtggcccagacctagaggacaggccgccgcccctgaggcccctcagcctgccccacctggcggctctggcagcgagccttaccggctgctgcctggcgctgtggccaccatcgtgagacctctggaggccatcccccagcccaccatcacccggcaggaagtgatctgaggactagtccctgttcccagagcccacttttttttctttttttgaaataaaatagcctgtctttcagatctcaaaggctcttttcagagccaccaaaaaaaaaaaaaaaaaaaaaaaaaaaaaaaaaaaaaaaaaaaaaaaaaaaaaaaaaaaaaaaaaaaaaaaaaaaaaaaaaaaaaaaaaaaaaaaaaaaaa

SEQ ID NO: 4231 - RNA, 1586 nt, synthetic construct
  misc_feature 1..1586: note = mRNA a-1 (hSL-A100) (opt29) from Homo sapiens__NP_000448.3__HNF4A(39-474)(S87A_S95A_S99A_K106R_K1 08R_K126R_K127R_S142A_S143A_S148A_T166A_S167A_S313A_S378A_T 429A_T432A_S436A_K458R_S461E)
  source 1..1586: mol_type = other RNA
aggagagtcccgcagtcggcgtccagcggctctgcttgttcgtgtgtgtgtcgttgcaggccttattcaagcttaccatggacaccagccctagcgagggcaccaacctgaacgcccctaatagcctgggagtgtccgccctgtgtgccatctgtggcgatagagccaccggcaagcactacggcgccagctcttgtgatggctgcaagggcttcttccggcgggccgtgcggaagaaccacatgtacgcctgccggttcgcccggcagtgcgtggtggaccgggatagacggaaccagtgccggtactgcagactgaagaagtgcttcagagccggcatgcggagagaagccgtgcagaacgagcgggaccggatcagcaccagaagagccgcctacgaggacagcgccctgcccagcatcaacgccctgctgcaggccgaggtgctgagcagacagatcgccgccccagtgtccggcatcaacggcgacatccgggccaagaagatcgccagcattgccgacgtgtgcgagagcatgaaggaacagctgctggtgctggtggaatgggccaagtacatccccgccttttgcgagctgcccctggacgatcaggtggccctgctgagagcacacgccggcgaacatctgctgctgggagccaccaagcggagcatggtgttcaaggacgtgctgctgctgggcaacgactacatcgtgcccagacactgccctgagctggccgagatgagccgggtgtccatcagaatcctggacgaactggtgctgccgtttcaggaactgcagatcgacgacaacgagtacgcctacctgaaggccatcatctttttcgaccccgacgccaagggcctgagcgaccctggcaagatcaagcggctgagagcccaggtgcaagtgtccctggaagattacatcaacgaccggcagtacgacagccggggcagatttggcgaactgctcctgctgctgcccaccctgcagagcatcacctggcagatgatcgagcagatccagttcatcaagctgttcggcatggccaagatcgacaatctgctgcaggaaatgctgctcgggggcgccccttctgatgcccctcatgcccaccaccctctgcaccctcacctgatgcaagaacacatgggcaccaatgtgatcgtggccaacacaatgcccacccacctgagcaacggccagatgtgcgagtggcccagacctagaggacaggccgccgcccctgaggcccctcagcctgccccacctggcggctctggcagcgagccttacaaactgctgcctggcgctgtggccaccatcgtgagacctctggaggccatcccccagcccaccatcaccaagcaggaagtgatctgaggactagtccctgttcccagagcccacttttttttctttttttgaaataaaatagcctgtctttcagatctcaaaggctcttttcagagccaccaaaaaaaaaaaaaaaaaaaaaaaaaaaaaaaaaaaaaaaaaaaaaaaaaaaaaaaaaaaaaaaaaaaaaaaaaaaaaaaaaaaaaaaaaaaaaaaaaaaaa

SEQ ID NO: 4232 - RNA, 1586 nt, synthetic construct
  misc_feature 1..1586: note = mRNA a-1 (hSL-A100) (opt29) from Homo sapiens__NP_000448.3__HNF4A(39-474)(S87A_K106R_K108R_K126R_ K127R_S138A_T139A_S142A_S143A_S148A_T166A_S167A_S313A_S378A _T429A_T432A_S436A_K458R_S461E)
  source 1..1586: mol_type = other RNA
aggagagtcccgcagtcggcgtccagcggctctgcttgttcgtgtgtgtgtcgttgcaggccttattcaagcttaccatggacaccagccctagcgagggcaccaacctgaacgcccctaatagcctgggagtgtccgccctgtgtgccatctgtggcgatagagccaccggcaagcactacggcgccagctcttgtgatggctgcaagggcttcttccggcgggccgtgcggaagaaccacatgtacagctgccggttcagccggcagtgcgtggtggaccgggatagacggaaccagtgccggtactgcagactgaagaagtgcttcagagccggcatgcggagagaagccgtgcagaacgagcgggaccggatcgccgccagaagagccgcctacgaggacagcgccctgcccagcatcaacgccctgctgcaggccgaggtgctgagcagacagatcgccgccccagtgtccggcatcaacggcgacatccgggccaagaagatcgccagcattgccgacgtgtgcgagagcatgaaggaacagctgctggtgctggtggaatgggccaagtacatccccgccttttgcgagctgcccctggacgatcaggtggccctgctgagagcacacgccggcgaacatctgctgctgggagccaccaagcggagcatggtgttcaaggacgtgctgctgctgggcaacgactacatcgtgcccagacactgccctgagctggccgagatgagccgggtgtccatcagaatcctggacgaactggtgctgccgtttcaggaactgcagatcgacgacaacgagtacgcctacctgaaggccatcatctttttcgaccccgacgccaagggcctgagcgaccctggcaagatcaagcggctgagagcccaggtgcaagtgtccctggaagattacatcaacgaccggcagtacgacagccggggcagatttggcgaactgctcctgctgctgcccaccctgcagagcatcacctggcagatgatcgagcagatccagttcatcaagctgttcggcatggccaagatcgacaatctgctgcaggaaatgctgctcgggggcgccccttctgatgcccctcatgcccaccaccctctgcaccctcacctgatgcaagaacacatgggcaccaatgtgatcgtggccaacacaatgcccacccacctgagcaacggccagatgtgcgagtggcccagacctagaggacaggccgccgcccctgaggcccctcagcctgccccacctggcggctctggcagcgagccttacaaactgctgcctggcgctgtggccaccatcgtgagacctctggaggccatcccccagcccaccatcaccaagcaggaagtgatctgaggactagtccctgttcccagagcccacttttttttctttttttgaaataaaatagcctgtctttcagatctcaaaggctcttttcagagccaccaaaaaaaaaaaaaaaaaaaaaaaaaaaaaaaaaaaaaaaaaaaaaaaaaaaaaaaaaaaaaaaaaaaaaaaaaaaaaaaaaaaaaaaaaaaaaaaaaaaaa

SEQ ID NO: 4233 - RNA, 1586 nt, synthetic construct
  misc_feature 1..1586: note = mRNA a-1 (hSL-A100) (opt29) from Homo sapiens__NP_000448.3__HNF4A(39-474)(S87A_S95A_S99A_K106R_K1 08R_K126R_K127R_S138A_T139A_S142A_S143A_S148A_T166A_S167A_S 313A_S378A_T429A_T432A_S436A_K458R_S461E)
  source 1..1586: mol_type = other RNA
aggagagtcccgcagtcggcgtccagcggctctgcttgttcgtgtgtgtgtcgttgcaggccttattcaagcttaccatggacaccagccctagcgagggcaccaacctgaacgcccctaatagcctgggagtgtccgccctgtgtgccatctgtggcgatagagccaccggcaagcactacggcgccagctcttgtgatggctgcaagggcttcttccggcgggccgtgcggaagaaccacatgtacgcctgccggttcgcccggcagtgcgtggtggaccgggatagacggaaccagtgccggtactgcagactgaagaagtgcttcagagccggcatgcggagagaagccgtgcagaacgagcgggaccggatcgccgccagaagagccgcctacgaggacagcgccctgcccagcatcaacgccctgctgcaggccgaggtgctgagcagacagatcgccgccccagtgtccggcatcaacggcgacatccgggccaagaagatcgccagcattgccgacgtgtgcgagagcatgaaggaacagctgctggtgctggtggaatgggccaagtacatccccgccttttgcgagctgcccctggacgatcaggtggccctgctgagagcacacgccggcgaacatctgctgctgggagccaccaagcggagcatggtgttcaaggacgtgctgctgctgggcaacgactacatcgtgcccagacactgccctgagctggccgagatgagccgggtgtccatcagaatcctggacgaactggtgctgccgtttcaggaactgcagatcgacgacaacgagtacgcctacctgaaggccatcatctttttcgaccccgacgccaagggcctgagcgaccctggcaagatcaagcggctgagagcccaggtgcaagtgtccctggaagattacatcaacgaccggcagtacgacagccggggcagatttggcgaactgctcctgctgctgcccaccctgcagagcatcacctggcagatgatcgagcagatccagttcatcaagctgttcggcatggccaagatcgacaatctgctgcaggaaatgctgctcgggggcgccccttctgatgcccctcatgcccaccaccctctgcaccctcacctgatgcaagaacacatgggcaccaatgtgatcgtggccaacacaatgcccacccacctgagcaacggccagatgtgcgagtggcccagacctagaggacaggccgccgcccctgaggcccctcagcctgccccacctggcggctctggcagcgagccttacaaactgctgcctggcgctgtggccaccatcgtgagacctctggaggccatcccccagcccaccatcaccaagcaggaagtgatctgaggactagtccctgttcccagagcccacttttttttctttttttgaaataaaatagcctgtctttcagatctcaaaggctcttttcagagccaccaaaaaaaaaaaaaaaaaaaaaaaaaaaaaaaaaaaaaaaaaaaaaaaaaaaaaaaaaaaaaaaaaaaaaaaaaaaaaaaaaaaaaaaaaaaaaaaaaaaaa

SEQ ID NO: 4234 - RNA, 1673 nt, synthetic construct
  misc_feature 1..1673: note = mRNA a-1 (A100) (wt) from Homo sapiens__NP_000448.3__HNF4A(1-474)
  source 1..1673: mol_type = other RNA
aggagagtcccgcagtcggcgtccagcggctctgcttgttcgtgtgtgtgtcgttgcaggccttattcaagcttaccatgcgactctccaaaaccctcgtcgacatggacatggccgactacagtgctgcactggacccagcctacaccaccctggaatttgagaatgtgcaggtgttgacgatgggcaatgacacgtccccatcagaaggcaccaacctcaacgcgcccaacagcctgggtgtcagcgccctgtgtgccatctgcggggaccgggccacgggcaaacactacggtgcctcgagctgtgacggctgcaagggcttcttccggaggagcgtgcggaagaaccacatgtactcctgcagatttagccggcagtgcgtggtggacaaagacaagaggaaccagtgccgctactgcaggctcaagaaatgcttccgggctggcatgaagaaggaagccgtccagaatgagcgggaccggatcagcactcgaaggtcaagctatgaggacagcagcctgccctccatcaatgcgctcctgcaggcggaggtcctgtcccgacagatcacctcccccgtctccgggatcaacggcgacattcgggcgaagaagattgccagcatcgcagatgtgtgtgagtccatgaaggagcagctgctggttctcgttgagtgggccaagtacatcccagctttctgcgagctccccctggacgaccaggtggccctgctcagagcccatgctggcgagcacctgctgctcggagccaccaagagatccatggtgttcaaggacgtgctgctcctaggcaatgactacattgtccctcggcactgcccggagctggcggagatgagccgggtgtccatacgcatccttgacgagctggtgctgcccttccaggagctgcagatcgatgacaatgagtatgcctacctcaaagccatcatcttctttgacccagatgccaaggggctgagcgatccagggaagatcaagcggctgcgttcccaggtgcaggtgagcttggaggactacatcaacgaccgccagtatgactcgcgtggccgctttggagagctgctgctgctgctgcccaccttgcagagcatcacctggcagatgatcgagcagatccagttcatcaagctcttcggcatggccaagattgacaacctgttgcaggagatgctgctgggagggtcccccagcgatgcaccccatgcccaccaccccctgcaccctcacctgatgcaggaacatatgggaaccaacgtcatcgttgccaacacaatgcccactcacctcagcaacggacagatgtgtgagtggccccgacccaggggacaggcagccacccctgagaccccacagccctcaccgccaggtggctcagggtctgagccctataagctcctgccgggagccgtcgccacaatcgtcaagcccctctctgccatcccccagccgaccatcaccaagcaggaagttatctagggactagtccctgttcccagagcccacttttttttctttttttgaaataaaatagcctgtctttcagatctaaaaaaaaaaaaaaaaaaaaaaaaaaaaaaaaaaaaaaaaaaaaaaaaaaaaaaaaaaaaaaaaaaaaaaaaaaaaaaaaaaaaaaaaaaaaaaaaaaaa

SEQ ID NO: 4235 - RNA, 1673 nt, synthetic construct
  misc_feature 1..1673: note = mRNA a-1 (A100) (wt mod) from Homo sapiens__NP_000448.3__HNF4A(1-474)
  source 1..1673: mol_type = other RNA
aggagagtcccgcagtcggcgtccagcggctctgcttgttcgtgtgtgtgtcgttgcaggccttattcaagcttaccatgcgactctccaaaaccctcgtcgacatggacatggccgactacagtgctgcactggacccagcctacaccaccctggaatttgagaatgtccaggtgttgacgatgggcaatgacacgtccccatcagaaggcaccaacctcaacgcgcccaacagcctgggtgtgagcgccctgtgtgccatctgcggggaccgggccacgggcaaacactacggtgcctcgagctgtgacggctgcaagggcttcttccggaggagcgtgcggaagaaccacatgtactcctgcagatttagccggcagtgcgtggtggacaaagacaagaggaaccagtgccgctactgcaggctcaagaaatgcttccgggctggcatgaagaaggaagccgtccagaatgagcgggaccggatcagcactcgaaggtcaagctatgaggacagcagcctgccctccatcaatgcgctcctgcaggcggaggtcctgtcccgacagatcacctcccccgtctccgggatcaacggcgacattcgggcgaagaagattgccagcatcgcagatgtgtgtgagtccatgaaggagcagctgctggttctcgttgagtgggccaagtacatcccagctttctgcgagctccccctggacgaccaggtggccctgctcagagcccatgctggcgagcacctcctgctcggagccaccaagagatccatggtgttcaaggacgtgctgctcctaggcaatgactacattgtccctcggcactgcccggagctggcggagatgagccgggtgtccatacgcatccttgacgagctggtgctgcccttccaggagctgcagatcgatgacaatgagtatgcctacctcaaagccatcatcttctttgacccagatgccaaggggctgagcgatccagggaagatcaagcggctgcgttcccaggtccaggtgagcttggaggactacatcaacgaccgccagtatgactcgcgtggccgctttggagagctgctgctgctgctgcccaccttgcagagcatcacctggcagatgatcgagcagatccagttcatcaagctgttcggcatggccaagattgacaacctgttgcaggagatgctgctgggagggtcccccagcgatgcaccccatgcccaccaccccctgcaccctcacctgatgcaggaacatatgggaaccaacgtgatcgttgccaacacaatgcccactcacctcagcaacggacagatgtgtgagtggccccgacccaggggacaggcagccacccctgagaccccacagccctcaccgccaggtggctcagggtctgagccctataagctcctgccgggagccgtcgccacaatcgtcaagcccctctctgccatcccccagccgaccatcaccaagcaggaagttatctgaggactagtccctgttcccagagcccacttttttttctttttttgaaataaaatagcctgtctttcagatctaaaaaaaaaaaaaaaaaaaaaaaaaaaaaaaaaaaaaaaaaaaaaaaaaaaaaaaaaaaaaaaaaaaaaaaaaaaaaaaaaaaaaaaaaaaaaaaaaaaa

SEQ ID NO: 4236 - RNA, 1673 nt, synthetic construct
  misc_feature 1..1673: note = mRNA a-1 (A100) (opt1) from Homo sapiens__NP_000448.3__HNF4A(1-474)
  source 1..1673: mol_type = other RNA
aggagagtcccgcagtcggcgtccagcggctctgcttgttcgtgtgtgtgtcgttgcaggccttattcaagcttaccatgcgcctgagcaagaccctcgtggacatggacatggccgactactccgccgcgctggaccccgcctacaccacgctggagttcgagaacgtccaggtgctcaccatgggcaacgacaccagcccgtccgaggggaccaacctgaacgcccccaacagcctgggcgtgtccgccctctgcgccatctgcggggaccgggcgacgggcaagcactacggggccagctcctgcgacggctgcaagggcttcttccgccggagcgtccgcaagaaccacatgtactcctgccggttcagccgccagtgcgtggtggacaaggacaagcggaaccagtgccgctactgccggctgaagaagtgcttccgcgccgggatgaagaaggaggccgtccagaacgagcgggaccgcatctccacccggcgcagctcctacgaggacagctccctgcccagcatcaacgcgctcctgcaggccgaggtgctgtcccggcagatcaccagccccgtgtccggcatcaacggggacatccgcgccaagaagatcgccagcatcgccgacgtctgcgagagcatgaaggagcagctcctggtgctggtggagtgggcgaagtacatcccggccttctgcgagctccccctggacgaccaggtcgccctgctccgggcccacgccggcgagcacctcctgctgggggcgaccaagcgctccatggtgttcaaggacgtgctgctgctcggcaacgactacatcgtcccccggcactgccccgagctggccgagatgagccgcgtgtccatccggatcctggacgagctcgtgctgccgttccaggagctgcagatcgacgacaacgagtacgcctacctcaaggccatcatcttcttcgaccccgacgccaagggcctgagcgaccccgggaagatcaagcgcctgcgctcccaggtccaggtgagcctcgaggactacatcaacgaccggcagtacgactcccgcggccggttcggggagctgctgctcctgctgcccacgctccagagcatcacctggcagatgatcgagcagatccagttcatcaagctgttcggcatggcgaagatcgacaacctgctccaggagatgctgctgggcgggtccccgagcgacgcgccccacgcccaccaccccctccacccccacctgatgcaggagcacatgggcaccaacgtgatcgtcgccaacaccatgccgacgcacctgtccaacgggcagatgtgcgagtggccccgcccccggggccaggccgccacccccgagaccccgcagcccagcccgcccgggggctccggcagcgagccctacaagctgctccccggggccgtggccaccatcgtgaagcccctgtccgccatcccccagccgacgatcaccaagcaggaggtcatctgaggactagtccctgttcccagagcccacttttttttctttttttgaaataaaatagcctgtctttcagatctaaaaaaaaaaaaaaaaaaaaaaaaaaaaaaaaaaaaaaaaaaaaaaaaaaaaaaaaaaaaaaaaaaaaaaaaaaaaaaaaaaaaaaaaaaaaaaaaaaaa

SEQ ID NO: 4237 - RNA, 1673 nt, synthetic construct
  misc_feature 1..1673: note = mRNA a-1 (A100) (opt1) from Homo sapiens__NP_000448.3__HNF4A(1-474)(S313A)
  source 1..1673: mol_type = other RNA
aggagagtcccgcagtcggcgtccagcggctctgcttgttcgtgtgtgtgtcgttgcaggccttattcaagcttaccatgcgcctgagcaagaccctcgtggacatggacatggccgactactccgccgcgctggaccccgcctacaccacgctggagttcgagaacgtccaggtgctcaccatgggcaacgacaccagcccgtccgaggggaccaacctgaacgcccccaacagcctgggcgtgtccgccctctgcgccatctgcggggaccgggcgacgggcaagcactacggggccagctcctgcgacggctgcaagggcttcttccgccggagcgtccgcaagaaccacatgtactcctgccggttcagccgccagtgcgtggtggacaaggacaagcggaaccagtgccgctactgccggctgaagaagtgcttccgcgccgggatgaagaaggaggccgtccagaacgagcgggaccgcatctccacccggcgcagctcctacgaggacagctccctgcccagcatcaacgcgctcctgcaggccgaggtgctgtcccggcagatcaccagccccgtgtccggcatcaacggggacatccgcgccaagaagatcgccagcatcgccgacgtctgcgagagcatgaaggagcagctcctggtgctggtggagtgggcgaagtacatcccggccttctgcgagctccccctggacgaccaggtcgccctgctccgggcccacgccggcgagcacctcctgctgggggcgaccaagcgctccatggtgttcaaggacgtgctgctgctcggcaacgactacatcgtcccccggcactgccccgagctggccgagatgagccgcgtgtccatccggatcctggacgagctcgtgctgccgttccaggagctgcagatcgacgacaacgagtacgcctacctcaaggccatcatcttcttcgaccccgacgccaagggcctgagcgaccccgggaagatcaagcgcctgcgcgcgcaggtccaggtgagcctcgaggactacatcaacgaccggcagtacgactcccgcggccggttcggggagctgctgctcctgctgcccacgctccagagcatcacctggcagatgatcgagcagatccagttcatcaagctgttcggcatggcgaagatcgacaacctgctccaggagatgctgctgggcgggtccccgagcgacgcgccccacgcccaccaccccctccacccccacctgatgcaggagcacatgggcaccaacgtgatcgtcgccaacaccatgccgacgcacctgtccaacgggcagatgtgcgagtggccccgcccccggggccaggccgccacccccgagaccccgcagcccagcccgcccgggggctccggcagcgagccctacaagctgctccccggggccgtggccaccatcgtgaagcccctgtccgccatcccccagccgacgatcaccaagcaggaggtcatctgaggactagtccctgttcccagagcccacttttttttctttttttgaaataaaatagcctgtctttcagatctaaaaaaaaaaaaaaaaaaaaaaaaaaaaaaaaaaaaaaaaaaaaaaaaaaaaaaaaaaaaaaaaaaaaaaaaaaaaaaaaaaaaaaaaaaaaaaaaaaaa

SEQ ID NO: 4238 - RNA, 1673 nt, synthetic construct
  misc_feature 1..1673: note = mRNA a-1 (A100) (opt1) from Homo sapiens__NP_000448.3__HNF4A(1-474)(S313E)
  source 1..1673: mol_type = other RNA
aggagagtcccgcagtcggcgtccagcggctctgcttgttcgtgtgtgtgtcgttgcaggccttattcaagcttaccatgcgcctgagcaagaccctcgtggacatggacatggccgactactccgccgcgctggaccccgcctacaccacgctggagttcgagaacgtccaggtgctcaccatgggcaacgacaccagcccgtccgaggggaccaacctgaacgcccccaacagcctgggcgtgtccgccctctgcgccatctgcggggaccgggcgacgggcaagcactacggggccagctcctgcgacggctgcaagggcttcttccgccggagcgtccgcaagaaccacatgtactcctgccggttcagccgccagtgcgtggtggacaaggacaagcggaaccagtgccgctactgccggctgaagaagtgcttccgcgccgggatgaagaaggaggccgtccagaacgagcgggaccgcatctccacccggcgcagctcctacgaggacagctccctgcccagcatcaacgcgctcctgcaggccgaggtgctgtcccggcagatcaccagccccgtgtccggcatcaacggggacatccgcgccaagaagatcgccagcatcgccgacgtctgcgagagcatgaaggagcagctcctggtgctggtggagtgggcgaagtacatcccggccttctgcgagctccccctggacgaccaggtcgccctgctccgggcccacgccggcgagcacctcctgctgggggcgaccaagcgctccatggtgttcaaggacgtgctgctgctcggcaacgactacatcgtcccccggcactgccccgagctggccgagatgagccgcgtgtccatccggatcctggacgagctcgtgctgccgttccaggagctgcagatcgacgacaacgagtacgcctacctcaaggccatcatcttcttcgaccccgacgccaagggcctgagcgaccccgggaagatcaagcgcctgcgcgagcaggtccaggtgagcctcgaggactacatcaacgaccggcagtacgactcccgcggccggttcggggagctgctgctcctgctgcccacgctccagagcatcacctggcagatgatcgagcagatccagttcatcaagctgttcggcatggcgaagatcgacaacctgctccaggagatgctgctgggcgggtccccgagcgacgcgccccacgcccaccaccccctccacccccacctgatgcaggagcacatgggcaccaacgtgatcgtcgccaacaccatgccgacgcacctgtccaacgggcagatgtgcgagtggccccgcccccggggccaggccgccacccccgagaccccgcagcccagcccgcccgggggctccggcagcgagccctacaagctgctccccggggccgtggccaccatcgtgaagcccctgtccgccatcccccagccgacgatcaccaagcaggaggtcatctgaggactagtccctgttcccagagcccacttttttttctttttttgaaataaaatagcctgtctttcagatctaaaaaaaaaaaaaaaaaaaaaaaaaaaaaaaaaaaaaaaaaaaaaaaaaaaaaaaaaaaaaaaaaaaaaaaaaaaaaaaaaaaaaaaaaaaaaaaaaaaa

SEQ ID NO: 4239 - RNA, 1673 nt, synthetic construct
  misc_feature 1..1673: note = mRNA a-1 (A100) (opt1) from Homo sapiens__NP_000448.3__HNF4A(1-474)(S142A_S143A)
  source 1..1673: mol_type = other RNA
aggagagtcccgcagtcggcgtccagcggctctgcttgttcgtgtgtgtgtcgttgcaggccttattcaagcttaccatgcgcctgagcaagaccctcgtggacatggacatggccgactactccgccgcgctggaccccgcctacaccacgctggagttcgagaacgtccaggtgctcaccatgggcaacgacaccagcccgtccgaggggaccaacctgaacgcccccaacagcctgggcgtgtccgccctctgcgccatctgcggggaccgggcgacgggcaagcactacggggccagctcctgcgacggctgcaagggcttcttccgccggagcgtccgcaagaaccacatgtactcctgccggttcagccgccagtgcgtggtggacaaggacaagcggaaccagtgccgctactgccggctgaagaagtgcttccgcgccgggatgaagaaggaggccgtccagaacgagcgggaccgcatctccacccggcgcgcggcctacgaggacagctccctgcccagcatcaacgcgctcctgcaggccgaggtgctgtcccggcagatcaccagccccgtgtccggcatcaacggggacatccgcgccaagaagatcgccagcatcgccgacgtctgcgagagcatgaaggagcagctcctggtgctggtggagtgggcgaagtacatcccggccttctgcgagctccccctggacgaccaggtcgccctgctccgggcccacgccggcgagcacctcctgctgggggcgaccaagcgctccatggtgttcaaggacgtgctgctgctcggcaacgactacatcgtcccccggcactgccccgagctggccgagatgagccgcgtgtccatccggatcctggacgagctcgtgctgccgttccaggagctgcagatcgacgacaacgagtacgcctacctcaaggccatcatcttcttcgaccccgacgccaagggcctgagcgaccccgggaagatcaagcgcctgcgctcccaggtccaggtgagcctcgaggactacatcaacgaccggcagtacgactcccgcggccggttcggggagctgctgctcctgctgcccacgctccagagcatcacctggcagatgatcgagcagatccagttcatcaagctgttcggcatggcgaagatcgacaacctgctccaggagatgctgctgggcgggtccccgagcgacgcgccccacgcccaccaccccctccacccccacctgatgcaggagcacatgggcaccaacgtgatcgtcgccaacaccatgccgacgcacctgtccaacgggcagatgtgcgagtggccccgcccccggggccaggccgccacccccgagaccccgcagcccagcccgcccgggggctccggcagcgagccctacaagctgctccccggggccgtggccaccatcgtgaagcccctgtccgccatcccccagccgacgatcaccaagcaggaggtcatctgaggactagtccctgttcccagagcccacttttttttctttttttgaaataaaatagcctgtctttcagatctaaaaaaaaaaaaaaaaaaaaaaaaaaaaaaaaaaaaaaaaaaaaaaaaaaaaaaaaaaaaaaaaaaaaaaaaaaaaaaaaaaaaaaaaaaaaaaaaaaaa

SEQ ID NO: 4240 - RNA, 1673 nt, synthetic construct
  misc_feature 1..1673: note = mRNA a-1 (A100) (opt1) from Homo sapiens__NP_000448.3__HNF4A(1-474)(S142E_S143E)
  source 1..1673: mol_type = other RNA
aggagagtcccgcagtcggcgtccagcggctctgcttgttcgtgtgtgtgtcgttgcaggccttattcaagcttaccatgcgcctgagcaagaccctcgtggacatggacatggccgactactccgccgcgctggaccccgcctacaccacgctggagttcgagaacgtccaggtgctcaccatgggcaacgacaccagcccgtccgaggggaccaacctgaacgcccccaacagcctgggcgtgtccgccctctgcgccatctgcggggaccgggcgacgggcaagcactacggggccagctcctgcgacggctgcaagggcttcttccgccggagcgtccgcaagaaccacatgtactcctgccggttcagccgccagtgcgtggtggacaaggacaagcggaaccagtgccgctactgccggctgaagaagtgcttccgcgccgggatgaagaaggaggccgtccagaacgagcgggaccgcatctccacccggcgcgaggagtacgaggacagctccctgcccagcatcaacgcgctcctgcaggccgaggtgctgtcccggcagatcaccagccccgtgtccggcatcaacggggacatccgcgccaagaagatcgccagcatcgccgacgtctgcgagagcatgaaggagcagctcctggtgctggtggagtgggcgaagtacatcccggccttctgcgagctccccctggacgaccaggtcgccctgctccgggcccacgccggcgagcacctcctgctgggggcgaccaagcgctccatggtgttcaaggacgtgctgctgctcggcaacgactacatcgtcccccggcactgccccgagctggccgagatgagccgcgtgtccatccggatcctggacgagctcgtgctgccgttccaggagctgcagatcgacgacaacgagtacgcctacctcaaggccatcatcttcttcgaccccgacgccaagggcctgagcgaccccgggaagatcaagcgcctgcgctcccaggtccaggtgagcctcgaggactacatcaacgaccggcagtacgactcccgcggccggttcggggagctgctgctcctgctgcccacgctccagagcatcacctggcagatgatcgagcagatccagttcatcaagctgttcggcatggcgaagatcgacaacctgctccaggagatgctgctgggcgggtccccgagcgacgcgccccacgcccaccaccccctccacccccacctgatgcaggagcacatgggcaccaacgtgatcgtcgccaacaccatgccgacgcacctgtccaacgggcagatgtgcgagtggccccgcccccggggccaggccgccacccccgagaccccgcagcccagcccgcccgggggctccggcagcgagccctacaagctgctccccggggccgtggccaccatcgtgaagcccctgtccgccatcccccagccgacgatcaccaagcaggaggtcatctgaggactagtccctgttcccagagcccacttttttttctttttttgaaataaaatagcctgtctttcagatctaaaaaaaaaaaaaaaaaaaaaaaaaaaaaaaaaaaaaaaaaaaaaaaaaaaaaaaaaaaaaaaaaaaaaaaaaaaaaaaaaaaaaaaaaaaaaaaaaaaa

SEQ ID NO: 4241 - RNA, 1673 nt, synthetic construct
  misc_feature 1..1673: note = mRNA a-1 (A100) (opt1) from Homo sapiens__NP_000448.3__HNF4A(1-474)(S143A)
  source 1..1673: mol_type = other RNA
aggagagtcccgcagtcggcgtccagcggctctgcttgttcgtgtgtgtgtcgttgcaggccttattcaagcttaccatgcgcctgagcaagaccctcgtggacatggacatggccgactactccgccgcgctggaccccgcctacaccacgctggagttcgagaacgtccaggtgctcaccatgggcaacgacaccagcccgtccgaggggaccaacctgaacgcccccaacagcctgggcgtgtccgccctctgcgccatctgcggggaccgggcgacgggcaagcactacggggccagctcctgcgacggctgcaagggcttcttccgccggagcgtccgcaagaaccacatgtactcctgccggttcagccgccagtgcgtggtggacaaggacaagcggaaccagtgccgctactgccggctgaagaagtgcttccgcgccgggatgaagaaggaggccgtccagaacgagcgggaccgcatctccacccggcgcagcgcgtacgaggacagctccctgcccagcatcaacgcgctcctgcaggccgaggtgctgtcccggcagatcaccagccccgtgtccggcatcaacggggacatccgcgccaagaagatcgccagcatcgccgacgtctgcgagagcatgaaggagcagctcctggtgctggtggagtgggcgaagtacatcccggccttctgcgagctccccctggacgaccaggtcgccctgctccgggcccacgccggcgagcacctcctgctgggggcgaccaagcgctccatggtgttcaaggacgtgctgctgctcggcaacgactacatcgtcccccggcactgccccgagctggccgagatgagccgcgtgtccatccggatcctggacgagctcgtgctgccgttccaggagctgcagatcgacgacaacgagtacgcctacctcaaggccatcatcttcttcgaccccgacgccaagggcctgagcgaccccgggaagatcaagcgcctgcgctcccaggtccaggtgagcctcgaggactacatcaacgaccggcagtacgactcccgcggccggttcggggagctgctgctcctgctgcccacgctccagagcatcacctggcagatgatcgagcagatccagttcatcaagctgttcggcatggcgaagatcgacaacctgctccaggagatgctgctgggcgggtccccgagcgacgcgccccacgcccaccaccccctccacccccacctgatgcaggagcacatgggcaccaacgtgatcgtcgccaacaccatgccgacgcacctgtccaacgggcagatgtgcgagtggccccgcccccggggccaggccgccacccccgagaccccgcagcccagcccgcccgggggctccggcagcgagccctacaagctgctccccggggccgtggccaccatcgtgaagcccctgtccgccatcccccagccgacgatcaccaagcaggaggtcatctgaggactagtccctgttcccagagcccacttttttttctttttttgaaataaaatagcctgtctttcagatctaaaaaaaaaaaaaaaaaaaaaaaaaaaaaaaaaaaaaaaaaaaaaaaaaaaaaaaaaaaaaaaaaaaaaaaaaaaaaaaaaaaaaaaaaaaaaaaaaaaa

SEQ ID NO: 4242 - RNA, 1673 nt, synthetic construct
  misc_feature 1..1673: note = mRNA a-1 (A100) (opt1) from Homo sapiens__NP_000448.3__HNF4A(1-474)(T166A)
  source 1..1673: mol_type = other RNA
aggagagtcccgcagtcggcgtccagcggctctgcttgttcgtgtgtgtgtcgttgcaggccttattcaagcttaccatgcgcctgagcaagaccctcgtggacatggacatggccgactactccgccgcgctggaccccgcctacaccacgctggagttcgagaacgtccaggtgctcaccatgggcaacgacaccagcccgtccgaggggaccaacctgaacgcccccaacagcctgggcgtgtccgccctctgcgccatctgcggggaccgggcgacgggcaagcactacggggccagctcctgcgacggctgcaagggcttcttccgccggagcgtccgcaagaaccacatgtactcctgccggttcagccgccagtgcgtggtggacaaggacaagcggaaccagtgccgctactgccggctgaagaagtgcttccgcgccgggatgaagaaggaggccgtccagaacgagcgggaccgcatctccacccggcgcagctcctacgaggacagctccctgcccagcatcaacgcgctcctgcaggccgaggtgctgtcccggcagatcgcgagccccgtgtccggcatcaacggggacatccgcgccaagaagatcgccagcatcgccgacgtctgcgagagcatgaaggagcagctcctggtgctggtggagtgggcgaagtacatcccggccttctgcgagctccccctggacgaccaggtcgccctgctccgggcccacgccggcgagcacctcctgctgggggcgaccaagcgctccatggtgttcaaggacgtgctgctgctcggcaacgactacatcgtcccccggcactgccccgagctggccgagatgagccgcgtgtccatccggatcctggacgagctcgtgctgccgttccaggagctgcagatcgacgacaacgagtacgcctacctcaaggccatcatcttcttcgaccccgacgccaagggcctgagcgaccccgggaagatcaagcgcctgcgctcccaggtccaggtgagcctcgaggactacatcaacgaccggcagtacgactcccgcggccggttcggggagctgctgctcctgctgcccacgctccagagcatcacctggcagatgatcgagcagatccagttcatcaagctgttcggcatggcgaagatcgacaacctgctccaggagatgctgctgggcgggtccccgagcgacgcgccccacgcccaccaccccctccacccccacctgatgcaggagcacatgggcaccaacgtgatcgtcgccaacaccatgccgacgcacctgtccaacgggcagatgtgcgagtggccccgcccccggggccaggccgccacccccgagaccccgcagcccagcccgcccgggggctccggcagcgagccctacaagctgctccccggggccgtggccaccatcgtgaagcccctgtccgccatcccccagccgacgatcaccaagcaggaggtcatctgaggactagtccctgttcccagagcccacttttttttctttttttgaaataaaatagcctgtctttcagatctaaaaaaaaaaaaaaaaaaaaaaaaaaaaaaaaaaaaaaaaaaaaaaaaaaaaaaaaaaaaaaaaaaaaaaaaaaaaaaaaaaaaaaaaaaaaaaaaaaaa

SEQ ID NO: 4243 - RNA, 1673 nt, synthetic construct
  misc_feature 1..1673: note = mRNA a-1 (A100) (opt1) from Homo sapiens__NP_000448.3__HNF4A(1-474)(S167E)
  source 1..1673: mol_type = other RNA
aggagagtcccgcagtcggcgtccagcggctctgcttgttcgtgtgtgtgtcgttgcaggccttattcaagcttaccatgcgcctgagcaagaccctcgtggacatggacatggccgactactccgccgcgctggaccccgcctacaccacgctggagttcgagaacgtccaggtgctcaccatgggcaacgacaccagcccgtccgaggggaccaacctgaacgcccccaacagcctgggcgtgtccgccctctgcgccatctgcggggaccgggcgacgggcaagcactacggggccagctcctgcgacggctgcaagggcttcttccgccggagcgtccgcaagaaccacatgtactcctgccggttcagccgccagtgcgtggtggacaaggacaagcggaaccagtgccgctactgccggctgaagaagtgcttccgcgccgggatgaagaaggaggccgtccagaacgagcgggaccgcatctccacccggcgcagctcctacgaggacagctccctgcccagcatcaacgcgctcctgcaggccgaggtgctgtcccggcagatcaccgagcccgtgtccggcatcaacggggacatccgcgccaagaagatcgccagcatcgccgacgtctgcgagagcatgaaggagcagctcctggtgctggtggagtgggcgaagtacatcccggccttctgcgagctccccctggacgaccaggtcgccctgctccgggcccacgccggcgagcacctcctgctgggggcgaccaagcgctccatggtgttcaaggacgtgctgctgctcggcaacgactacatcgtcccccggcactgccccgagctggccgagatgagccgcgtgtccatccggatcctggacgagctcgtgctgccgttccaggagctgcagatcgacgacaacgagtacgcctacctcaaggccatcatcttcttcgaccccgacgccaagggcctgagcgaccccgggaagatcaagcgcctgcgctcccaggtccaggtgagcctcgaggactacatcaacgaccggcagtacgactcccgcggccggttcggggagctgctgctcctgctgcccacgctccagagcatcacctggcagatgatcgagcagatccagttcatcaagctgttcggcatggcgaagatcgacaacctgctccaggagatgctgctgggcgggtccccgagcgacgcgccccacgcccaccaccccctccacccccacctgatgcaggagcacatgggcaccaacgtgatcgtcgccaacaccatgccgacgcacctgtccaacgggcagatgtgcgagtggccccgcccccggggccaggccgccacccccgagaccccgcagcccagcccgcccgggggctccggcagcgagccctacaagctgctccccggggccgtggccaccatcgtgaagcccctgtccgccatcccccagccgacgatcaccaagcaggaggtcatctgaggactagtccctgttcccagagcccacttttttttctttttttgaaataaaatagcctgtctttcagatctaaaaaaaaaaaaaaaaaaaaaaaaaaaaaaaaaaaaaaaaaaaaaaaaaaaaaaaaaaaaaaaaaaaaaaaaaaaaaaaaaaaaaaaaaaaaaaaaaaaa

SEQ ID NO: 4244 - RNA, 1673 nt, synthetic construct
  misc_feature 1..1673: note = mRNA a-1 (A100) (opt1) from Homo sapiens__NP_000448.3__HNF4A(1-474)(S167A)
  source 1..1673: mol_type = other RNA
aggagagtcccgcagtcggcgtccagcggctctgcttgttcgtgtgtgtgtcgttgcaggccttattcaagcttaccatgcgcctgagcaagaccctcgtggacatggacatggccgactactccgccgcgctggaccccgcctacaccacgctggagttcgagaacgtccaggtgctcaccatgggcaacgacaccagcccgtccgaggggaccaacctgaacgcccccaacagcctgggcgtgtccgccctctgcgccatctgcggggaccgggcgacgggcaagcactacggggccagctcctgcgacggctgcaagggcttcttccgccggagcgtccgcaagaaccacatgtactcctgccggttcagccgccagtgcgtggtggacaaggacaagcggaaccagtgccgctactgccggctgaagaagtgcttccgcgccgggatgaagaaggaggccgtccagaacgagcgggaccgcatctccacccggcgcagctcctacgaggacagctccctgcccagcatcaacgcgctcctgcaggccgaggtgctgtcccggcagatcaccgcgcccgtgtccggcatcaacggggacatccgcgccaagaagatcgccagcatcgccgacgtctgcgagagcatgaaggagcagctcctggtgctggtggagtgggcgaagtacatcccggccttctgcgagctccccctggacgaccaggtcgccctgctccgggcccacgccggcgagcacctcctgctgggggcgaccaagcgctccatggtgttcaaggacgtgctgctgctcggcaacgactacatcgtcccccggcactgccccgagctggccgagatgagccgcgtgtccatccggatcctggacgagctcgtgctgccgttccaggagctgcagatcgacgacaacgagtacgcctacctcaaggccatcatcttcttcgaccccgacgccaagggcctgagcgaccccgggaagatcaagcgcctgcgctcccaggtccaggtgagcctcgaggactacatcaacgaccggcagtacgactcccgcggccggttcggggagctgctgctcctgctgcccacgctccagagcatcacctggcagatgatcgagcagatccagttcatcaagctgttcggcatggcgaagatcgacaacctgctccaggagatgctgctgggcgggtccccgagcgacgcgccccacgcccaccaccccctccacccccacctgatgcaggagcacatgggcaccaacgtgatcgtcgccaacaccatgccgacgcacctgtccaacgggcagatgtgcgagtggccccgcccccggggccaggccgccacccccgagaccccgcagcccagcccgcccgggggctccggcagcgagccctacaagctgctccccggggccgtggccaccatcgtgaagcccctgtccgccatcccccagccgacgatcaccaagcaggaggtcatctgaggactagtccctgttcccagagcccacttttttttctttttttgaaataaaatagcctgtctttcagatctaaaaaaaaaaaaaaaaaaaaaaaaaaaaaaaaaaaaaaaaaaaaaaaaaaaaaaaaaaaaaaaaaaaaaaaaaaaaaaaaaaaaaaaaaaaaaaaaaaaa

SEQ ID NO: 4245 - RNA, 1673 nt, synthetic construct
  misc_feature 1..1673: note = mRNA a-1 (A100) (opt1) from Homo sapiens__NP_000448.3__HNF4A(1-474)(S167A_S378A_T429A_T432A_ S436A)
  source 1..1673: mol_type = other RNA
aggagagtcccgcagtcggcgtccagcggctctgcttgttcgtgtgtgtgtcgttgcaggccttattcaagcttaccatgcgcctgagcaagaccctcgtggacatggacatggccgactactccgccgcgctggaccccgcctacaccacgctggagttcgagaacgtccaggtgctcaccatgggcaacgacaccagcccgtccgaggggaccaacctgaacgcccccaacagcctgggcgtgtccgccctctgcgccatctgcggggaccgggcgacgggcaagcactacggggccagctcctgcgacggctgcaagggcttcttccgccggagcgtccgcaagaaccacatgtactcctgccggttcagccgccagtgcgtggtggacaaggacaagcggaaccagtgccgctactgccggctgaagaagtgcttccgcgccgggatgaagaaggaggccgtccagaacgagcgggaccgcatctccacccggcgcagctcctacgaggacagctccctgcccagcatcaacgcgctcctgcaggccgaggtgctgtcccggcagatcaccgcgcccgtgtccggcatcaacggggacatccgcgccaagaagatcgccagcatcgccgacgtctgcgagagcatgaaggagcagctcctggtgctggtggagtgggcgaagtacatcccggccttctgcgagctccccctggacgaccaggtcgccctgctccgggcccacgccggcgagcacctcctgctgggggcgaccaagcgctccatggtgttcaaggacgtgctgctgctcggcaacgactacatcgtcccccggcactgccccgagctggccgagatgagccgcgtgtccatccggatcctggacgagctcgtgctgccgttccaggagctgcagatcgacgacaacgagtacgcctacctcaaggccatcatcttcttcgaccccgacgccaagggcctgagcgaccccgggaagatcaagcgcctgcgctcccaggtccaggtgagcctcgaggactacatcaacgaccggcagtacgactcccgcggccggttcggggagctgctgctcctgctgcccacgctccagagcatcacctggcagatgatcgagcagatccagttcatcaagctgttcggcatggcgaagatcgacaacctgctccaggagatgctgctgggcggggcgccgagcgacgcgccccacgcccaccaccccctccacccccacctgatgcaggagcacatgggcaccaacgtgatcgtcgccaacaccatgccgacgcacctgtccaacgggcagatgtgcgagtggccccgcccccggggccaggccgccgcgcccgaggcgccgcagcccgcgccgcccgggggctccggcagcgagccctacaagctgctccccggggccgtggccaccatcgtgaagcccctgtccgccatcccccagccgacgatcaccaagcaggaggtcatctgaggactagtccctgttcccagagcccacttttttttctttttttgaaataaaatagcctgtctttcagatctaaaaaaaaaaaaaaaaaaaaaaaaaaaaaaaaaaaaaaaaaaaaaaaaaaaaaaaaaaaaaaaaaaaaaaaaaaaaaaaaaaaaaaaaaaaaaaaaaaaa

SEQ ID NO: 4246 - RNA, 1673 nt, synthetic construct
  misc_feature 1..1673: note = mRNA a-1 (A100) (opt1) from Homo sapiens__NP_000448.3__HNF4A(1-474)(S167E_S378E_T429E_T432E_ S436E)
  source 1..1673: mol_type = other RNA
aggagagtcccgcagtcggcgtccagcggctctgcttgttcgtgtgtgtgtcgttgcaggccttattcaagcttaccatgcgcctgagcaagaccctcgtggacatggacatggccgactactccgccgcgctggaccccgcctacaccacgctggagttcgagaacgtccaggtgctcaccatgggcaacgacaccagcccgtccgaggggaccaacctgaacgcccccaacagcctgggcgtgtccgccctctgcgccatctgcggggaccgggcgacgggcaagcactacggggccagctcctgcgacggctgcaagggcttcttccgccggagcgtccgcaagaaccacatgtactcctgccggttcagccgccagtgcgtggtggacaaggacaagcggaaccagtgccgctactgccggctgaagaagtgcttccgcgccgggatgaagaaggaggccgtccagaacgagcgggaccgcatctccacccggcgcagctcctacgaggacagctccctgcccagcatcaacgcgctcctgcaggccgaggtgctgtcccggcagatcaccgagcccgtgtccggcatcaacggggacatccgcgccaagaagatcgccagcatcgccgacgtctgcgagagcatgaaggagcagctcctggtgctggtggagtgggcgaagtacatcccggccttctgcgagctccccctggacgaccaggtcgccctgctccgggcccacgccggcgagcacctcctgctgggggcgaccaagcgctccatggtgttcaaggacgtgctgctgctcggcaacgactacatcgtcccccggcactgccccgagctggccgagatgagccgcgtgtccatccggatcctggacgagctcgtgctgccgttccaggagctgcagatcgacgacaacgagtacgcctacctcaaggccatcatcttcttcgaccccgacgccaagggcctgagcgaccccgggaagatcaagcgcctgcgctcccaggtccaggtgagcctcgaggactacatcaacgaccggcagtacgactcccgcggccggttcggggagctgctgctcctgctgcccacgctccagagcatcacctggcagatgatcgagcagatccagttcatcaagctgttcggcatggcgaagatcgacaacctgctccaggagatgctgctgggcggggagccgagcgacgcgccccacgcccaccaccccctccacccccacctgatgcaggagcacatgggcaccaacgtgatcgtcgccaacaccatgccgacgcacctgtccaacgggcagatgtgcgagtggccccgcccccggggccaggccgccgagcccgaggagccgcagcccgagccgcccgggggctccggcagcgagccctacaagctgctccccggggccgtggccaccatcgtgaagcccctgtccgccatcccccagccgacgatcaccaagcaggaggtcatctgaggactagtccctgttcccagagcccacttttttttctttttttgaaataaaatagcctgtctttcagatctaaaaaaaaaaaaaaaaaaaaaaaaaaaaaaaaaaaaaaaaaaaaaaaaaaaaaaaaaaaaaaaaaaaaaaaaaaaaaaaaaaaaaaaaaaaaaaaaaaaa

SEQ ID NO: 4247 - RNA, 1673 nt, synthetic construct
  misc_feature 1..1673: note = mRNA a-1 (A100) (opt1) from Homo sapiens__NP_000448.3__HNF4A(1-474)(S87A)
  source 1..1673: mol_type = other RNA
aggagagtcccgcagtcggcgtccagcggctctgcttgttcgtgtgtgtgtcgttgcaggccttattcaagcttaccatgcgcctgagcaagaccctcgtggacatggacatggccgactactccgccgcgctggaccccgcctacaccacgctggagttcgagaacgtccaggtgctcaccatgggcaacgacaccagcccgtccgaggggaccaacctgaacgcccccaacagcctgggcgtgtccgccctctgcgccatctgcggggaccgggcgacgggcaagcactacggggccagctcctgcgacggctgcaagggcttcttccgccgggcggtccgcaagaaccacatgtactcctgccggttcagccgccagtgcgtggtggacaaggacaagcggaaccagtgccgctactgccggctgaagaagtgcttccgcgccgggatgaagaaggaggccgtccagaacgagcgggaccgcatctccacccggcgcagctcctacgaggacagctccctgcccagcatcaacgcgctcctgcaggccgaggtgctgtcccggcagatcaccagccccgtgtccggcatcaacggggacatccgcgccaagaagatcgccagcatcgccgacgtctgcgagagcatgaaggagcagctcctggtgctggtggagtgggcgaagtacatcccggccttctgcgagctccccctggacgaccaggtcgccctgctccgggcccacgccggcgagcacctcctgctgggggcgaccaagcgctccatggtgttcaaggacgtgctgctgctcggcaacgactacatcgtcccccggcactgccccgagctggccgagatgagccgcgtgtccatccggatcctggacgagctcgtgctgccgttccaggagctgcagatcgacgacaacgagtacgcctacctcaaggccatcatcttcttcgaccccgacgccaagggcctgagcgaccccgggaagatcaagcgcctgcgctcccaggtccaggtgagcctcgaggactacatcaacgaccggcagtacgactcccgcggccggttcggggagctgctgctcctgctgcccacgctccagagcatcacctggcagatgatcgagcagatccagttcatcaagctgttcggcatggcgaagatcgacaacctgctccaggagatgctgctgggcgggtccccgagcgacgcgccccacgcccaccaccccctccacccccacctgatgcaggagcacatgggcaccaacgtgatcgtcgccaacaccatgccgacgcacctgtccaacgggcagatgtgcgagtggccccgcccccggggccaggccgccacccccgagaccccgcagcccagcccgcccgggggctccggcagcgagccctacaagctgctccccggggccgtggccaccatcgtgaagcccctgtccgccatcccccagccgacgatcaccaagcaggaggtcatctgaggactagtccctgttcccagagcccacttttttttctttttttgaaataaaatagcctgtctttcagatctaaaaaaaaaaaaaaaaaaaaaaaaaaaaaaaaaaaaaaaaaaaaaaaaaaaaaaaaaaaaaaaaaaaaaaaaaaaaaaaaaaaaaaaaaaaaaaaaaaaa

SEQ ID NO: 4248 - RNA, 1673 nt, synthetic construct
  misc_feature 1..1673: note = mRNA a-1 (A100) (opt1) from Homo sapiens__NP_000448.3__HNF4A(1-474)(S87E)
  source 1..1673: mol_type = other RNA
aggagagtcccgcagtcggcgtccagcggctctgcttgttcgtgtgtgtgtcgttgcaggccttattcaagcttaccatgcgcctgagcaagaccctcgtggacatggacatggccgactactccgccgcgctggaccccgcctacaccacgctggagttcgagaacgtccaggtgctcaccatgggcaacgacaccagcccgtccgaggggaccaacctgaacgcccccaacagcctgggcgtgtccgccctctgcgccatctgcggggaccgggcgacgggcaagcactacggggccagctcctgcgacggctgcaagggcttcttccgccgggaggtccgcaagaaccacatgtactcctgccggttcagccgccagtgcgtggtggacaaggacaagcggaaccagtgccgctactgccggctgaagaagtgcttccgcgccgggatgaagaaggaggccgtccagaacgagcgggaccgcatctccacccggcgcagctcctacgaggacagctccctgcccagcatcaacgcgctcctgcaggccgaggtgctgtcccggcagatcaccagccccgtgtccggcatcaacggggacatccgcgccaagaagatcgccagcatcgccgacgtctgcgagagcatgaaggagcagctcctggtgctggtggagtgggcgaagtacatcccggccttctgcgagctccccctggacgaccaggtcgccctgctccgggcccacgccggcgagcacctcctgctgggggcgaccaagcgctccatggtgttcaaggacgtgctgctgctcggcaacgactacatcgtcccccggcactgccccgagctggccgagatgagccgcgtgtccatccggatcctggacgagctcgtgctgccgttccaggagctgcagatcgacgacaacgagtacgcctacctcaaggccatcatcttcttcgaccccgacgccaagggcctgagcgaccccgggaagatcaagcgcctgcgctcccaggtccaggtgagcctcgaggactacatcaacgaccggcagtacgactcccgcggccggttcggggagctgctgctcctgctgcccacgctccagagcatcacctggcagatgatcgagcagatccagttcatcaagctgttcggcatggcgaagatcgacaacctgctccaggagatgctgctgggcgggtccccgagcgacgcgccccacgcccaccaccccctccacccccacctgatgcaggagcacatgggcaccaacgtgatcgtcgccaacaccatgccgacgcacctgtccaacgggcagatgtgcgagtggccccgcccccggggccaggccgccacccccgagaccccgcagcccagcccgcccgggggctccggcagcgagccctacaagctgctccccggggccgtggccaccatcgtgaagcccctgtccgccatcccccagccgacgatcaccaagcaggaggtcatctgaggactagtccctgttcccagagcccacttttttttctttttttgaaataaaatagcctgtctttcagatctaaaaaaaaaaaaaaaaaaaaaaaaaaaaaaaaaaaaaaaaaaaaaaaaaaaaaaaaaaaaaaaaaaaaaaaaaaaaaaaaaaaaaaaaaaaaaaaaaaaa

SEQ ID NO: 4249 - RNA, 1673 nt, synthetic construct
  misc_feature 1..1673: note = mRNA a-1 (A100) (opt1) from Homo sapiens__NP_000448.3__HNF4A(1-474)(R2V)
  source 1..1673: mol_type = other RNA
aggagagtcccgcagtcggcgtccagcggctctgcttgttcgtgtgtgtgtcgttgcaggccttattcaagcttaccatggtgctgagcaagaccctcgtggacatggacatggccgactactccgccgcgctggaccccgcctacaccacgctggagttcgagaacgtccaggtgctcaccatgggcaacgacaccagcccgtccgaggggaccaacctgaacgcccccaacagcctgggcgtgtccgccctctgcgccatctgcggggaccgggcgacgggcaagcactacggggccagctcctgcgacggctgcaagggcttcttccgccggagcgtccgcaagaaccacatgtactcctgccggttcagccgccagtgcgtggtggacaaggacaagcggaaccagtgccgctactgccggctgaagaagtgcttccgcgccgggatgaagaaggaggccgtccagaacgagcgggaccgcatctccacccggcgcagctcctacgaggacagctccctgcccagcatcaacgcgctcctgcaggccgaggtgctgtcccggcagatcaccagccccgtgtccggcatcaacggggacatccgcgccaagaagatcgccagcatcgccgacgtctgcgagagcatgaaggagcagctcctggtgctggtggagtgggcgaagtacatcccggccttctgcgagctccccctggacgaccaggtcgccctgctccgggcccacgccggcgagcacctcctgctgggggcgaccaagcgctccatggtgttcaaggacgtgctgctgctcggcaacgactacatcgtcccccggcactgccccgagctggccgagatgagccgcgtgtccatccggatcctggacgagctcgtgctgccgttccaggagctgcagatcgacgacaacgagtacgcctacctcaaggccatcatcttcttcgaccccgacgccaagggcctgagcgaccccgggaagatcaagcgcctgcgctcccaggtccaggtgagcctcgaggactacatcaacgaccggcagtacgactcccgcggccggttcggggagctgctgctcctgctgcccacgctccagagcatcacctggcagatgatcgagcagatccagttcatcaagctgttcggcatggcgaagatcgacaacctgctccaggagatgctgctgggcgggtccccgagcgacgcgccccacgcccaccaccccctccacccccacctgatgcaggagcacatgggcaccaacgtgatcgtcgccaacaccatgccgacgcacctgtccaacgggcagatgtgcgagtggccccgcccccggggccaggccgccacccccgagaccccgcagcccagcccgcccgggggctccggcagcgagccctacaagctgctccccggggccgtggccaccatcgtgaagcccctgtccgccatcccccagccgacgatcaccaagcaggaggtcatctgaggactagtccctgttcccagagcccacttttttttctttttttgaaataaaatagcctgtctttcagatctaaaaaaaaaaaaaaaaaaaaaaaaaaaaaaaaaaaaaaaaaaaaaaaaaaaaaaaaaaaaaaaaaaaaaaaaaaaaaaaaaaaaaaaaaaaaaaaaaaaa

SEQ ID NO: 4250 - RNA, 1673 nt, synthetic construct
  misc_feature 1..1673: note = mRNA a-1 (A100) (opt1) from Homo sapiens__NP_000448.3__HNF4A(1-474)(R2V_K5V)
  source 1..1673: mol_type = other RNA
aggagagtcccgcagtcggcgtccagcggctctgcttgttcgtgtgtgtgtcgttgcaggccttattcaagcttaccatggtgctgagcgtgaccctcgtggacatggacatggccgactactccgccgcgctggaccccgcctacaccacgctggagttcgagaacgtccaggtgctcaccatgggcaacgacaccagcccgtccgaggggaccaacctgaacgcccccaacagcctgggcgtgtccgccctctgcgccatctgcggggaccgggcgacgggcaagcactacggggccagctcctgcgacggctgcaagggcttcttccgccggagcgtccgcaagaaccacatgtactcctgccggttcagccgccagtgcgtggtggacaaggacaagcggaaccagtgccgctactgccggctgaagaagtgcttccgcgccgggatgaagaaggaggccgtccagaacgagcgggaccgcatctccacccggcgcagctcctacgaggacagctccctgcccagcatcaacgcgctcctgcaggccgaggtgctgtcccggcagatcaccagccccgtgtccggcatcaacggggacatccgcgccaagaagatcgccagcatcgccgacgtctgcgagagcatgaaggagcagctcctggtgctggtggagtgggcgaagtacatcccggccttctgcgagctccccctggacgaccaggtcgccctgctccgggcccacgccggcgagcacctcctgctgggggcgaccaagcgctccatggtgttcaaggacgtgctgctgctcggcaacgactacatcgtcccccggcactgccccgagctggccgagatgagccgcgtgtccatccggatcctggacgagctcgtgctgccgttccaggagctgcagatcgacgacaacgagtacgcctacctcaaggccatcatcttcttcgaccccgacgccaagggcctgagcgaccccgggaagatcaagcgcctgcgctcccaggtccaggtgagcctcgaggactacatcaacgaccggcagtacgactcccgcggccggttcggggagctgctgctcctgctgcccacgctccagagcatcacctggcagatgatcgagcagatccagttcatcaagctgttcggcatggcgaagatcgacaacctgctccaggagatgctgctgggcgggtccccgagcgacgcgccccacgcccaccaccccctccacccccacctgatgcaggagcacatgggcaccaacgtgatcgtcgccaacaccatgccgacgcacctgtccaacgggcagatgtgcgagtggccccgcccccggggccaggccgccacccccgagaccccgcagcccagcccgcccgggggctccggcagcgagccctacaagctgctccccggggccgtggccaccatcgtgaagcccctgtccgccatcccccagccgacgatcaccaagcaggaggtcatctgaggactagtccctgttcccagagcccacttttttttctttttttgaaataaaatagcctgtctttcagatctaaaaaaaaaaaaaaaaaaaaaaaaaaaaaaaaaaaaaaaaaaaaaaaaaaaaaaaaaaaaaaaaaaaaaaaaaaaaaaaaaaaaaaaaaaaaaaaaaaaa

SEQ ID NO: 4251 - RNA, 1673 nt, synthetic construct
  misc_feature 1..1673: note = mRNA a-1 (A100) (opt1) from Homo sapiens__NP_000448.3__HNF4A(1-474)(K179R_K180R)
  source 1..1673: mol_type = other RNA
aggagagtcccgcagtcggcgtccagcggctctgcttgttcgtgtgtgtgtcgttgcaggccttattcaagcttaccatgcgcctgagcaagaccctcgtggacatggacatggccgactactccgccgcgctggaccccgcctacaccacgctggagttcgagaacgtccaggtgctcaccatgggcaacgacaccagcccgtccgaggggaccaacctgaacgcccccaacagcctgggcgtgtccgccctctgcgccatctgcggggaccgggcgacgggcaagcactacggggccagctcctgcgacggctgcaagggcttcttccgccggagcgtccgcaagaaccacatgtactcctgccggttcagccgccagtgcgtggtggacaaggacaagcggaaccagtgccgctactgccggctgaagaagtgcttccgcgccgggatgaagaaggaggccgtccagaacgagcgggaccgcatctccacccggcgcagctcctacgaggacagctccctgcccagcatcaacgcgctcctgcaggccgaggtgctgtcccggcagatcaccagccccgtgtccggcatcaacggggacatccgcgcccggcgcatcgccagcatcgccgacgtctgcgagagcatgaaggagcagctcctggtgctggtggagtgggcgaagtacatcccggccttctgcgagctccccctggacgaccaggtcgccctgctccgggcccacgccggcgagcacctcctgctgggggcgaccaagcgctccatggtgttcaaggacgtgctgctgctcggcaacgactacatcgtcccccggcactgccccgagctggccgagatgagccgcgtgtccatccggatcctggacgagctcgtgctgccgttccaggagctgcagatcgacgacaacgagtacgcctacctcaaggccatcatcttcttcgaccccgacgccaagggcctgagcgaccccgggaagatcaagcgcctgcgctcccaggtccaggtgagcctcgaggactacatcaacgaccggcagtacgactcccgcggccggttcggggagctgctgctcctgctgcccacgctccagagcatcacctggcagatgatcgagcagatccagttcatcaagctgttcggcatggcgaagatcgacaacctgctccaggagatgctgctgggcgggtccccgagcgacgcgccccacgcccaccaccccctccacccccacctgatgcaggagcacatgggcaccaacgtgatcgtcgccaacaccatgccgacgcacctgtccaacgggcagatgtgcgagtggccccgcccccggggccaggccgccacccccgagaccccgcagcccagcccgcccgggggctccggcagcgagccctacaagctgctccccggggccgtggccaccatcgtgaagcccctgtccgccatcccccagccgacgatcaccaagcaggaggtcatctgaggactagtccctgttcccagagcccacttttttttctttttttgaaataaaatagcctgtctttcagatctaaaaaaaaaaaaaaaaaaaaaaaaaaaaaaaaaaaaaaaaaaaaaaaaaaaaaaaaaaaaaaaaaaaaaaaaaaaaaaaaaaaaaaaaaaaaaaaaaaaa

SEQ ID NO: 4252 - RNA, 1673 nt, synthetic construct
  misc_feature 1..1673: note = mRNA a-1 (A100) (opt1) from Homo sapiens__NP_000448.3__HNF4A(1-474)(K234R)
  source 1..1673: mol_type = other RNA
aggagagtcccgcagtcggcgtccagcggctctgcttgttcgtgtgtgtgtcgttgcaggccttattcaagcttaccatgcgcctgagcaagaccctcgtggacatggacatggccgactactccgccgcgctggaccccgcctacaccacgctggagttcgagaacgtccaggtgctcaccatgggcaacgacaccagcccgtccgaggggaccaacctgaacgcccccaacagcctgggcgtgtccgccctctgcgccatctgcggggaccgggcgacgggcaagcactacggggccagctcctgcgacggctgcaagggcttcttccgccggagcgtccgcaagaaccacatgtactcctgccggttcagccgccagtgcgtggtggacaaggacaagcggaaccagtgccgctactgccggctgaagaagtgcttccgcgccgggatgaagaaggaggccgtccagaacgagcgggaccgcatctccacccggcgcagctcctacgaggacagctccctgcccagcatcaacgcgctcctgcaggccgaggtgctgtcccggcagatcaccagccccgtgtccggcatcaacggggacatccgcgccaagaagatcgccagcatcgccgacgtctgcgagagcatgaaggagcagctcctggtgctggtggagtgggcgaagtacatcccggccttctgcgagctccccctggacgaccaggtcgccctgctccgggcccacgccggcgagcacctcctgctgggggcgacccgccgctccatggtgttcaaggacgtgctgctgctcggcaacgactacatcgtcccccggcactgccccgagctggccgagatgagccgcgtgtccatccggatcctggacgagctcgtgctgccgttccaggagctgcagatcgacgacaacgagtacgcctacctcaaggccatcatcttcttcgaccccgacgccaagggcctgagcgaccccgggaagatcaagcgcctgcgctcccaggtccaggtgagcctcgaggactacatcaacgaccggcagtacgactcccgcggccggttcggggagctgctgctcctgctgcccacgctccagagcatcacctggcagatgatcgagcagatccagttcatcaagctgttcggcatggcgaagatcgacaacctgctccaggagatgctgctgggcgggtccccgagcgacgcgccccacgcccaccaccccctccacccccacctgatgcaggagcacatgggcaccaacgtgatcgtcgccaacaccatgccgacgcacctgtccaacgggcagatgtgcgagtggccccgcccccggggccaggccgccacccccgagaccccgcagcccagcccgcccgggggctccggcagcgagccctacaagctgctccccggggccgtggccaccatcgtgaagcccctgtccgccatcccccagccgacgatcaccaagcaggaggtcatctgaggactagtccctgttcccagagcccacttttttttctttttttgaaataaaatagcctgtctttcagatctaaaaaaaaaaaaaaaaaaaaaaaaaaaaaaaaaaaaaaaaaaaaaaaaaaaaaaaaaaaaaaaaaaaaaaaaaaaaaaaaaaaaaaaaaaaaaaaaaaaa

SEQ ID NO: 4253 - RNA, 1673 nt, synthetic construct
  misc_feature 1..1673: note = mRNA a-1 (A100) (opt1) from Homo sapiens__NP_000448.3__HNF4A(1-474)(K300R)
  source 1..1673: mol_type = other RNA
aggagagtcccgcagtcggcgtccagcggctctgcttgttcgtgtgtgtgtcgttgcaggccttattcaagcttaccatgcgcctgagcaagaccctcgtggacatggacatggccgactactccgccgcgctggaccccgcctacaccacgctggagttcgagaacgtccaggtgctcaccatgggcaacgacaccagcccgtccgaggggaccaacctgaacgcccccaacagcctgggcgtgtccgccctctgcgccatctgcggggaccgggcgacgggcaagcactacggggccagctcctgcgacggctgcaagggcttcttccgccggagcgtccgcaagaaccacatgtactcctgccggttcagccgccagtgcgtggtggacaaggacaagcggaaccagtgccgctactgccggctgaagaagtgcttccgcgccgggatgaagaaggaggccgtccagaacgagcgggaccgcatctccacccggcgcagctcctacgaggacagctccctgcccagcatcaacgcgctcctgcaggccgaggtgctgtcccggcagatcaccagccccgtgtccggcatcaacggggacatccgcgccaagaagatcgccagcatcgccgacgtctgcgagagcatgaaggagcagctcctggtgctggtggagtgggcgaagtacatcccggccttctgcgagctccccctggacgaccaggtcgccctgctccgggcccacgccggcgagcacctcctgctgggggcgaccaagcgctccatggtgttcaaggacgtgctgctgctcggcaacgactacatcgtcccccggcactgccccgagctggccgagatgagccgcgtgtccatccggatcctggacgagctcgtgctgccgttccaggagctgcagatcgacgacaacgagtacgcctacctcaaggccatcatcttcttcgaccccgacgcccgcggcctgagcgaccccgggaagatcaagcgcctgcgctcccaggtccaggtgagcctcgaggactacatcaacgaccggcagtacgactcccgcggccggttcggggagctgctgctcctgctgcccacgctccagagcatcacctggcagatgatcgagcagatccagttcatcaagctgttcggcatggcgaagatcgacaacctgctccaggagatgctgctgggcgggtccccgagcgacgcgccccacgcccaccaccccctccacccccacctgatgcaggagcacatgggcaccaacgtgatcgtcgccaacaccatgccgacgcacctgtccaacgggcagatgtgcgagtggccccgcccccggggccaggccgccacccccgagaccccgcagcccagcccgcccgggggctccggcagcgagccctacaagctgctccccggggccgtggccaccatcgtgaagcccctgtccgccatcccccagccgacgatcaccaagcaggaggtcatctgaggactagtccctgttcccagagcccacttttttttctttttttgaaataaaatagcctgtctttcagatctaaaaaaaaaaaaaaaaaaaaaaaaaaaaaaaaaaaaaaaaaaaaaaaaaaaaaaaaaaaaaaaaaaaaaaaaaaaaaaaaaaaaaaaaaaaaaaaaaaaa

SEQ ID NO: 4254 - RNA, 1673 nt, synthetic construct
  misc_feature 1..1673: note = mRNA a-1 (A100) (opt1) from Homo sapiens__NP_000448.3__HNF4A(1-474)(K300R_K307R_K309R)
  source 1..1673: mol_type = other RNA
aggagagtcccgcagtcggcgtccagcggctctgcttgttcgtgtgtgtgtcgttgcaggccttattcaagcttaccatgcgcctgagcaagaccctcgtggacatggacatggccgactactccgccgcgctggaccccgcctacaccacgctggagttcgagaacgtccaggtgctcaccatgggcaacgacaccagcccgtccgaggggaccaacctgaacgcccccaacagcctgggcgtgtccgccctctgcgccatctgcggggaccgggcgacgggcaagcactacggggccagctcctgcgacggctgcaagggcttcttccgccggagcgtccgcaagaaccacatgtactcctgccggttcagccgccagtgcgtggtggacaaggacaagcggaaccagtgccgctactgccggctgaagaagtgcttccgcgccgggatgaagaaggaggccgtccagaacgagcgggaccgcatctccacccggcgcagctcctacgaggacagctccctgcccagcatcaacgcgctcctgcaggccgaggtgctgtcccggcagatcaccagccccgtgtccggcatcaacggggacatccgcgccaagaagatcgccagcatcgccgacgtctgcgagagcatgaaggagcagctcctggtgctggtggagtgggcgaagtacatcccggccttctgcgagctccccctggacgaccaggtcgccctgctccgggcccacgccggcgagcacctcctgctgggggcgaccaagcgctccatggtgttcaaggacgtgctgctgctcggcaacgactacatcgtcccccggcactgccccgagctggccgagatgagccgcgtgtccatccggatcctggacgagctcgtgctgccgttccaggagctgcagatcgacgacaacgagtacgcctacctcaaggccatcatcttcttcgaccccgacgcccgcggcctgagcgaccccgggcgcatccggcgcctgcgctcccaggtccaggtgagcctcgaggactacatcaacgaccggcagtacgactcccgcggccggttcggggagctgctgctcctgctgcccacgctccagagcatcacctggcagatgatcgagcagatccagttcatcaagctgttcggcatggcgaagatcgacaacctgctccaggagatgctgctgggcgggtccccgagcgacgcgccccacgcccaccaccccctccacccccacctgatgcaggagcacatgggcaccaacgtgatcgtcgccaacaccatgccgacgcacctgtccaacgggcagatgtgcgagtggccccgcccccggggccaggccgccacccccgagaccccgcagcccagcccgcccgggggctccggcagcgagccctacaagctgctccccggggccgtggccaccatcgtgaagcccctgtccgccatcccccagccgacgatcaccaagcaggaggtcatctgaggactagtccctgttcccagagcccacttttttttctttttttgaaataaaatagcctgtctttcagatctaaaaaaaaaaaaaaaaaaaaaaaaaaaaaaaaaaaaaaaaaaaaaaaaaaaaaaaaaaaaaaaaaaaaaaaaaaaaaaaaaaaaaaaaaaaaaaaaaaaa

SEQ ID NO: 4255 - RNA, 1673 nt, synthetic construct
  misc_feature 1..1673: note = mRNA a-1 (A100) (opt1) from Homo sapiens__NP_000448.3__HNF4A(1-474)(K447R_K470R)
  source 1..1673: mol_type = other RNA
aggagagtcccgcagtcggcgtccagcggctctgcttgttcgtgtgtgtgtcgttgcaggccttattcaagcttaccatgcgcctgagcaagaccctcgtggacatggacatggccgactactccgccgcgctggaccccgcctacaccacgctggagttcgagaacgtccaggtgctcaccatgggcaacgacaccagcccgtccgaggggaccaacctgaacgcccccaacagcctgggcgtgtccgccctctgcgccatctgcggggaccgggcgacgggcaagcactacggggccagctcctgcgacggctgcaagggcttcttccgccggagcgtccgcaagaaccacatgtactcctgccggttcagccgccagtgcgtggtggacaaggacaagcggaaccagtgccgctactgccggctgaagaagtgcttccgcgccgggatgaagaaggaggccgtccagaacgagcgggaccgcatctccacccggcgcagctcctacgaggacagctccctgcccagcatcaacgcgctcctgcaggccgaggtgctgtcccggcagatcaccagccccgtgtccggcatcaacggggacatccgcgccaagaagatcgccagcatcgccgacgtctgcgagagcatgaaggagcagctcctggtgctggtggagtgggcgaagtacatcccggccttctgcgagctccccctggacgaccaggtcgccctgctccgggcccacgccggcgagcacctcctgctgggggcgaccaagcgctccatggtgttcaaggacgtgctgctgctcggcaacgactacatcgtcccccggcactgccccgagctggccgagatgagccgcgtgtccatccggatcctggacgagctcgtgctgccgttccaggagctgcagatcgacgacaacgagtacgcctacctcaaggccatcatcttcttcgaccccgacgccaagggcctgagcgaccccgggaagatcaagcgcctgcgctcccaggtccaggtgagcctcgaggactacatcaacgaccggcagtacgactcccgcggccggttcggggagctgctgctcctgctgcccacgctccagagcatcacctggcagatgatcgagcagatccagttcatcaagctgttcggcatggcgaagatcgacaacctgctccaggagatgctgctgggcgggtccccgagcgacgcgccccacgcccaccaccccctccacccccacctgatgcaggagcacatgggcaccaacgtgatcgtcgccaacaccatgccgacgcacctgtccaacgggcagatgtgcgagtggccccgcccccggggccaggccgccacccccgagaccccgcagcccagcccgcccgggggctccggcagcgagccctaccggctgctccccggggccgtggccaccatcgtgaagcccctgtccgccatcccccagccgacgatcacccggcaggaggtcatctgaggactagtccctgttcccagagcccacttttttttctttttttgaaataaaatagcctgtctttcagatctaaaaaaaaaaaaaaaaaaaaaaaaaaaaaaaaaaaaaaaaaaaaaaaaaaaaaaaaaaaaaaaaaaaaaaaaaaaaaaaaaaaaaaaaaaaaaaaaaaaa

SEQ ID NO: 4256 - RNA, 1673 nt, synthetic construct
  misc_feature 1..1673: note = mRNA a-1 (A100) (opt1) from Homo sapiens__NP_000448.3__HNF4A(1-474)(K458R)
  source 1..1673: mol_type = other RNA
aggagagtcccgcagtcggcgtccagcggctctgcttgttcgtgtgtgtgtcgttgcaggccttattcaagcttaccatgcgcctgagcaagaccctcgtggacatggacatggccgactactccgccgcgctggaccccgcctacaccacgctggagttcgagaacgtccaggtgctcaccatgggcaacgacaccagcccgtccgaggggaccaacctgaacgcccccaacagcctgggcgtgtccgccctctgcgccatctgcggggaccgggcgacgggcaagcactacggggccagctcctgcgacggctgcaagggcttcttccgccggagcgtccgcaagaaccacatgtactcctgccggttcagccgccagtgcgtggtggacaaggacaagcggaaccagtgccgctactgccggctgaagaagtgcttccgcgccgggatgaagaaggaggccgtccagaacgagcgggaccgcatctccacccggcgcagctcctacgaggacagctccctgcccagcatcaacgcgctcctgcaggccgaggtgctgtcccggcagatcaccagccccgtgtccggcatcaacggggacatccgcgccaagaagatcgccagcatcgccgacgtctgcgagagcatgaaggagcagctcctggtgctggtggagtgggcgaagtacatcccggccttctgcgagctccccctggacgaccaggtcgccctgctccgggcccacgccggcgagcacctcctgctgggggcgaccaagcgctccatggtgttcaaggacgtgctgctgctcggcaacgactacatcgtcccccggcactgccccgagctggccgagatgagccgcgtgtccatccggatcctggacgagctcgtgctgccgttccaggagctgcagatcgacgacaacgagtacgcctacctcaaggccatcatcttcttcgaccccgacgccaagggcctgagcgaccccgggaagatcaagcgcctgcgctcccaggtccaggtgagcctcgaggactacatcaacgaccggcagtacgactcccgcggccggttcggggagctgctgctcctgctgcccacgctccagagcatcacctggcagatgatcgagcagatccagttcatcaagctgttcggcatggcgaagatcgacaacctgctccaggagatgctgctgggcgggtccccgagcgacgcgccccacgcccaccaccccctccacccccacctgatgcaggagcacatgggcaccaacgtgatcgtcgccaacaccatgccgacgcacctgtccaacgggcagatgtgcgagtggccccgcccccggggccaggccgccacccccgagaccccgcagcccagcccgcccgggggctccggcagcgagccctacaagctgctccccggggccgtggccaccatcgtgcggcccctgtccgccatcccccagccgacgatcaccaagcaggaggtcatctgaggactagtccctgttcccagagcccacttttttttctttttttgaaataaaatagcctgtctttcagatctaaaaaaaaaaaaaaaaaaaaaaaaaaaaaaaaaaaaaaaaaaaaaaaaaaaaaaaaaaaaaaaaaaaaaaaaaaaaaaaaaaaaaaaaaaaaaaaaaaaa

SEQ ID NO: 4257 - RNA, 1673 nt, synthetic construct
  misc_feature 1..1673: note = mRNA a-1 (A100) (opt1) from Homo sapiens__NP_000448.3__HNF4A(1-474)(K106R_K108R_K126R_K127R)
  source 1..1673: mol_type = other RNA
aggagagtcccgcagtcggcgtccagcggctctgcttgttcgtgtgtgtgtcgttgcaggccttattcaagcttaccatgcgcctgagcaagaccctcgtggacatggacatggccgactactccgccgcgctggaccccgcctacaccacgctggagttcgagaacgtccaggtgctcaccatgggcaacgacaccagcccgtccgaggggaccaacctgaacgcccccaacagcctgggcgtgtccgccctctgcgccatctgcggggaccgggcgacgggcaagcactacggggccagctcctgcgacggctgcaagggcttcttccgccggagcgtccgcaagaaccacatgtactcctgccggttcagccgccagtgcgtggtggaccgcgaccggcggaaccagtgccgctactgccggctgaagaagtgcttccgcgccgggatgcgccgcgaggccgtccagaacgagcgggaccgcatctccacccggcgcagctcctacgaggacagctccctgcccagcatcaacgcgctcctgcaggccgaggtgctgtcccggcagatcaccagccccgtgtccggcatcaacggggacatccgcgccaagaagatcgccagcatcgccgacgtctgcgagagcatgaaggagcagctcctggtgctggtggagtgggcgaagtacatcccggccttctgcgagctccccctggacgaccaggtcgccctgctccgggcccacgccggcgagcacctcctgctgggggcgaccaagcgctccatggtgttcaaggacgtgctgctgctcggcaacgactacatcgtcccccggcactgccccgagctggccgagatgagccgcgtgtccatccggatcctggacgagctcgtgctgccgttccaggagctgcagatcgacgacaacgagtacgcctacctcaaggccatcatcttcttcgaccccgacgccaagggcctgagcgaccccgggaagatcaagcgcctgcgctcccaggtccaggtgagcctcgaggactacatcaacgaccggcagtacgactcccgcggccggttcggggagctgctgctcctgctgcccacgctccagagcatcacctggcagatgatcgagcagatccagttcatcaagctgttcggcatggcgaagatcgacaacctgctccaggagatgctgctgggcgggtccccgagcgacgcgccccacgcccaccaccccctccacccccacctgatgcaggagcacatgggcaccaacgtgatcgtcgccaacaccatgccgacgcacctgtccaacgggcagatgtgcgagtggccccgcccccggggccaggccgccacccccgagaccccgcagcccagcccgcccgggggctccggcagcgagccctacaagctgctccccggggccgtggccaccatcgtgaagcccctgtccgccatcccccagccgacgatcaccaagcaggaggtcatctgaggactagtccctgttcccagagcccacttttttttctttttttgaaataaaatagcctgtctttcagatctaaaaaaaaaaaaaaaaaaaaaaaaaaaaaaaaaaaaaaaaaaaaaaaaaaaaaaaaaaaaaaaaaaaaaaaaaaaaaaaaaaaaaaaaaaaaaaaaaaaa

SEQ ID NO: 4258 - RNA, 1673 nt, synthetic construct
  misc_feature 1..1673: note = mRNA a-1 (A100) (opt1) from Homo sapiens__NP_000448.3__HNF4A(1-474)(E285Q)
  source 1..1673: mol_type = other RNA
aggagagtcccgcagtcggcgtccagcggctctgcttgttcgtgtgtgtgtcgttgcaggccttattcaagcttaccatgcgcctgagcaagaccctcgtggacatggacatggccgactactccgccgcgctggaccccgcctacaccacgctggagttcgagaacgtccaggtgctcaccatgggcaacgacaccagcccgtccgaggggaccaacctgaacgcccccaacagcctgggcgtgtccgccctctgcgccatctgcggggaccgggcgacgggcaagcactacggggccagctcctgcgacggctgcaagggcttcttccgccggagcgtccgcaagaaccacatgtactcctgccggttcagccgccagtgcgtggtggacaaggacaagcggaaccagtgccgctactgccggctgaagaagtgcttccgcgccgggatgaagaaggaggccgtccagaacgagcgggaccgcatctccacccggcgcagctcctacgaggacagctccctgcccagcatcaacgcgctcctgcaggccgaggtgctgtcccggcagatcaccagccccgtgtccggcatcaacggggacatccgcgccaagaagatcgccagcatcgccgacgtctgcgagagcatgaaggagcagctcctggtgctggtggagtgggcgaagtacatcccggccttctgcgagctccccctggacgaccaggtcgccctgctccgggcccacgccggcgagcacctcctgctgggggcgaccaagcgctccatggtgttcaaggacgtgctgctgctcggcaacgactacatcgtcccccggcactgccccgagctggccgagatgagccgcgtgtccatccggatcctggacgagctcgtgctgccgttccaggagctgcagatcgacgacaaccagtacgcctacctcaaggccatcatcttcttcgaccccgacgccaagggcctgagcgaccccgggaagatcaagcgcctgcgctcccaggtccaggtgagcctcgaggactacatcaacgaccggcagtacgactcccgcggccggttcggggagctgctgctcctgctgcccacgctccagagcatcacctggcagatgatcgagcagatccagttcatcaagctgttcggcatggcgaagatcgacaacctgctccaggagatgctgctgggcgggtccccgagcgacgcgccccacgcccaccaccccctccacccccacctgatgcaggagcacatgggcaccaacgtgatcgtcgccaacaccatgccgacgcacctgtccaacgggcagatgtgcgagtggccccgcccccggggccaggccgccacccccgagaccccgcagcccagcccgcccgggggctccggcagcgagccctacaagctgctccccggggccgtggccaccatcgtgaagcccctgtccgccatcccccagccgacgatcaccaagcaggaggtcatctgaggactagtccctgttcccagagcccacttttttttctttttttgaaataaaatagcctgtctttcagatctaaaaaaaaaaaaaaaaaaaaaaaaaaaaaaaaaaaaaaaaaaaaaaaaaaaaaaaaaaaaaaaaaaaaaaaaaaaaaaaaaaaaaaaaaaaaaaaaaaaa

SEQ ID NO: 4259 - RNA, 1673 nt, synthetic construct
  misc_feature 1..1673: note = mRNA a-1 (A100) (opt1) from Homo sapiens__NP_000448.3__HNF4A(1-474)(T166E)
  source 1..1673: mol_type = other RNA
aggagagtcccgcagtcggcgtccagcggctctgcttgttcgtgtgtgtgtcgttgcaggccttattcaagcttaccatgcgcctgagcaagaccctcgtggacatggacatggccgactactccgccgcgctggaccccgcctacaccacgctggagttcgagaacgtccaggtgctcaccatgggcaacgacaccagcccgtccgaggggaccaacctgaacgcccccaacagcctgggcgtgtccgccctctgcgccatctgcggggaccgggcgacgggcaagcactacggggccagctcctgcgacggctgcaagggcttcttccgccggagcgtccgcaagaaccacatgtactcctgccggttcagccgccagtgcgtggtggacaaggacaagcggaaccagtgccgctactgccggctgaagaagtgcttccgcgccgggatgaagaaggaggccgtccagaacgagcgggaccgcatctccacccggcgcagctcctacgaggacagctccctgcccagcatcaacgcgctcctgcaggccgaggtgctgtcccggcagatcgagagccccgtgtccggcatcaacggggacatccgcgccaagaagatcgccagcatcgccgacgtctgcgagagcatgaaggagcagctcctggtgctggtggagtgggcgaagtacatcccggccttctgcgagctccccctggacgaccaggtcgccctgctccgggcccacgccggcgagcacctcctgctgggggcgaccaagcgctccatggtgttcaaggacgtgctgctgctcggcaacgactacatcgtcccccggcactgccccgagctggccgagatgagccgcgtgtccatccggatcctggacgagctcgtgctgccgttccaggagctgcagatcgacgacaacgagtacgcctacctcaaggccatcatcttcttcgaccccgacgccaagggcctgagcgaccccgggaagatcaagcgcctgcgctcccaggtccaggtgagcctcgaggactacatcaacgaccggcagtacgactcccgcggccggttcggggagctgctgctcctgctgcccacgctccagagcatcacctggcagatgatcgagcagatccagttcatcaagctgttcggcatggcgaagatcgacaacctgctccaggagatgctgctgggcgggtccccgagcgacgcgccccacgcccaccaccccctccacccccacctgatgcaggagcacatgggcaccaacgtgatcgtcgccaacaccatgccgacgcacctgtccaacgggcagatgtgcgagtggccccgcccccggggccaggccgccacccccgagaccccgcagcccagcccgcccgggggctccggcagcgagccctacaagctgctccccggggccgtggccaccatcgtgaagcccctgtccgccatcccccagccgacgatcaccaagcaggaggtcatctgaggactagtccctgttcccagagcccacttttttttctttttttgaaataaaatagcctgtctttcagatctaaaaaaaaaaaaaaaaaaaaaaaaaaaaaaaaaaaaaaaaaaaaaaaaaaaaaaaaaaaaaaaaaaaaaaaaaaaaaaaaaaaaaaaaaaaaaaaaaaaa

SEQ ID NO: 4260 - RNA, 1673 nt, synthetic construct
  misc_feature 1..1673: note = mRNA a-1 (A100) (opt1) from Homo sapiens__NP_000448.3__HNF4A(1-474)(S148A)
  source 1..1673: mol_type = other RNA
aggagagtcccgcagtcggcgtccagcggctctgcttgttcgtgtgtgtgtcgttgcaggccttattcaagcttaccatgcgcctgagcaagaccctcgtggacatggacatggccgactactccgccgcgctggaccccgcctacaccacgctggagttcgagaacgtccaggtgctcaccatgggcaacgacaccagcccgtccgaggggaccaacctgaacgcccccaacagcctgggcgtgtccgccctctgcgccatctgcggggaccgggcgacgggcaagcactacggggccagctcctgcgacggctgcaagggcttcttccgccggagcgtccgcaagaaccacatgtactcctgccggttcagccgccagtgcgtggtggacaaggacaagcggaaccagtgccgctactgccggctgaagaagtgcttccgcgccgggatgaagaaggaggccgtccagaacgagcgggaccgcatctccacccggcgcagctcctacgaggacagcgcgctgcccagcatcaacgcgctcctgcaggccgaggtgctgtcccggcagatcaccagccccgtgtccggcatcaacggggacatccgcgccaagaagatcgccagcatcgccgacgtctgcgagagcatgaaggagcagctcctggtgctggtggagtgggcgaagtacatcccggccttctgcgagctccccctggacgaccaggtcgccctgctccgggcccacgccggcgagcacctcctgctgggggcgaccaagcgctccatggtgttcaaggacgtgctgctgctcggcaacgactacatcgtcccccggcactgccccgagctggccgagatgagccgcgtgtccatccggatcctggacgagctcgtgctgccgttccaggagctgcagatcgacgacaacgagtacgcctacctcaaggccatcatcttcttcgaccccgacgccaagggcctgagcgaccccgggaagatcaagcgcctgcgctcccaggtccaggtgagcctcgaggactacatcaacgaccggcagtacgactcccgcggccggttcggggagctgctgctcctgctgcccacgctccagagcatcacctggcagatgatcgagcagatccagttcatcaagctgttcggcatggcgaagatcgacaacctgctccaggagatgctgctgggcgggtccccgagcgacgcgccccacgcccaccaccccctccacccccacctgatgcaggagcacatgggcaccaacgtgatcgtcgccaacaccatgccgacgcacctgtccaacgggcagatgtgcgagtggccccgcccccggggccaggccgccacccccgagaccccgcagcccagcccgcccgggggctccggcagcgagccctacaagctgctccccggggccgtggccaccatcgtgaagcccctgtccgccatcccccagccgacgatcaccaagcaggaggtcatctgaggactagtccctgttcccagagcccacttttttttctttttttgaaataaaatagcctgtctttcagatctaaaaaaaaaaaaaaaaaaaaaaaaaaaaaaaaaaaaaaaaaaaaaaaaaaaaaaaaaaaaaaaaaaaaaaaaaaaaaaaaaaaaaaaaaaaaaaaaaaaa

SEQ ID NO: 4261 - RNA, 1673 nt, synthetic construct
  misc_feature 1..1673: note = mRNA a-1 (A100) (opt1) from Homo sapiens__NP_000448.3__HNF4A(1-474)(S148E)
  source 1..1673: mol_type = other RNA
aggagagtcccgcagtcggcgtccagcggctctgcttgttcgtgtgtgtgtcgttgcaggccttattcaagcttaccatgcgcctgagcaagaccctcgtggacatggacatggccgactactccgccgcgctggaccccgcctacaccacgctggagttcgagaacgtccaggtgctcaccatgggcaacgacaccagcccgtccgaggggaccaacctgaacgcccccaacagcctgggcgtgtccgccctctgcgccatctgcggggaccgggcgacgggcaagcactacggggccagctcctgcgacggctgcaagggcttcttccgccggagcgtccgcaagaaccacatgtactcctgccggttcagccgccagtgcgtggtggacaaggacaagcggaaccagtgccgctactgccggctgaagaagtgcttccgcgccgggatgaagaaggaggccgtccagaacgagcgggaccgcatctccacccggcgcagctcctacgaggacagcgagctgcccagcatcaacgcgctcctgcaggccgaggtgctgtcccggcagatcaccagccccgtgtccggcatcaacggggacatccgcgccaagaagatcgccagcatcgccgacgtctgcgagagcatgaaggagcagctcctggtgctggtggagtgggcgaagtacatcccggccttctgcgagctccccctggacgaccaggtcgccctgctccgggcccacgccggcgagcacctcctgctgggggcgaccaagcgctccatggtgttcaaggacgtgctgctgctcggcaacgactacatcgtcccccggcactgccccgagctggccgagatgagccgcgtgtccatccggatcctggacgagctcgtgctgccgttccaggagctgcagatcgacgacaacgagtacgcctacctcaaggccatcatcttcttcgaccccgacgccaagggcctgagcgaccccgggaagatcaagcgcctgcgctcccaggtccaggtgagcctcgaggactacatcaacgaccggcagtacgactcccgcggccggttcggggagctgctgctcctgctgcccacgctccagagcatcacctggcagatgatcgagcagatccagttcatcaagctgttcggcatggcgaagatcgacaacctgctccaggagatgctgctgggcgggtccccgagcgacgcgccccacgcccaccaccccctccacccccacctgatgcaggagcacatgggcaccaacgtgatcgtcgccaacaccatgccgacgcacctgtccaacgggcagatgtgcgagtggccccgcccccggggccaggccgccacccccgagaccccgcagcccagcccgcccgggggctccggcagcgagccctacaagctgctccccggggccgtggccaccatcgtgaagcccctgtccgccatcccccagccgacgatcaccaagcaggaggtcatctgaggactagtccctgttcccagagcccacttttttttctttttttgaaataaaatagcctgtctttcagatctaaaaaaaaaaaaaaaaaaaaaaaaaaaaaaaaaaaaaaaaaaaaaaaaaaaaaaaaaaaaaaaaaaaaaaaaaaaaaaaaaaaaaaaaaaaaaaaaaaaa

SEQ ID NO: 4262 - RNA, 1673 nt, synthetic construct
  misc_feature 1..1673: note = mRNA a-1 (A100) (opt1) from Homo sapiens__NP_000448.3__HNF4A(1-474)(S183A)
  source 1..1673: mol_type = other RNA
aggagagtcccgcagtcggcgtccagcggctctgcttgttcgtgtgtgtgtcgttgcaggccttattcaagcttaccatgcgcctgagcaagaccctcgtggacatggacatggccgactactccgccgcgctggaccccgcctacaccacgctggagttcgagaacgtccaggtgctcaccatgggcaacgacaccagcccgtccgaggggaccaacctgaacgcccccaacagcctgggcgtgtccgccctctgcgccatctgcggggaccgggcgacgggcaagcactacggggccagctcctgcgacggctgcaagggcttcttccgccggagcgtccgcaagaaccacatgtactcctgccggttcagccgccagtgcgtggtggacaaggacaagcggaaccagtgccgctactgccggctgaagaagtgcttccgcgccgggatgaagaaggaggccgtccagaacgagcgggaccgcatctccacccggcgcagctcctacgaggacagctccctgcccagcatcaacgcgctcctgcaggccgaggtgctgtcccggcagatcaccagccccgtgtccggcatcaacggggacatccgcgccaagaagatcgccgcgatcgccgacgtctgcgagagcatgaaggagcagctcctggtgctggtggagtgggcgaagtacatcccggccttctgcgagctccccctggacgaccaggtcgccctgctccgggcccacgccggcgagcacctcctgctgggggcgaccaagcgctccatggtgttcaaggacgtgctgctgctcggcaacgactacatcgtcccccggcactgccccgagctggccgagatgagccgcgtgtccatccggatcctggacgagctcgtgctgccgttccaggagctgcagatcgacgacaacgagtacgcctacctcaaggccatcatcttcttcgaccccgacgccaagggcctgagcgaccccgggaagatcaagcgcctgcgctcccaggtccaggtgagcctcgaggactacatcaacgaccggcagtacgactcccgcggccggttcggggagctgctgctcctgctgcccacgctccagagcatcacctggcagatgatcgagcagatccagttcatcaagctgttcggcatggcgaagatcgacaacctgctccaggagatgctgctgggcgggtccccgagcgacgcgccccacgcccaccaccccctccacccccacctgatgcaggagcacatgggcaccaacgtgatcgtcgccaacaccatgccgacgcacctgtccaacgggcagatgtgcgagtggccccgcccccggggccaggccgccacccccgagaccccgcagcccagcccgcccgggggctccggcagcgagccctacaagctgctccccggggccgtggccaccatcgtgaagcccctgtccgccatcccccagccgacgatcaccaagcaggaggtcatctgaggactagtccctgttcccagagcccacttttttttctttttttgaaataaaatagcctgtctttcagatctaaaaaaaaaaaaaaaaaaaaaaaaaaaaaaaaaaaaaaaaaaaaaaaaaaaaaaaaaaaaaaaaaaaaaaaaaaaaaaaaaaaaaaaaaaaaaaaaaaaa

SEQ ID NO: 4263 - RNA, 1673 nt, synthetic construct
  misc_feature 1..1673: note = mRNA a-1 (A100) (opt1) from Homo sapiens__NP_000448.3__HNF4A(1-474)(S183E)
  source 1..1673: mol_type = other RNA
aggagagtcccgcagtcggcgtccagcggctctgcttgttcgtgtgtgtgtcgttgcaggccttattcaagcttaccatgcgcctgagcaagaccctcgtggacatggacatggccgactactccgccgcgctggaccccgcctacaccacgctggagttcgagaacgtccaggtgctcaccatgggcaacgacaccagcccgtccgaggggaccaacctgaacgcccccaacagcctgggcgtgtccgccctctgcgccatctgcggggaccgggcgacgggcaagcactacggggccagctcctgcgacggctgcaagggcttcttccgccggagcgtccgcaagaaccacatgtactcctgccggttcagccgccagtgcgtggtggacaaggacaagcggaaccagtgccgctactgccggctgaagaagtgcttccgcgccgggatgaagaaggaggccgtccagaacgagcgggaccgcatctccacccggcgcagctcctacgaggacagctccctgcccagcatcaacgcgctcctgcaggccgaggtgctgtcccggcagatcaccagccccgtgtccggcatcaacggggacatccgcgccaagaagatcgccgagatcgccgacgtctgcgagagcatgaaggagcagctcctggtgctggtggagtgggcgaagtacatcccggccttctgcgagctccccctggacgaccaggtcgccctgctccgggcccacgccggcgagcacctcctgctgggggcgaccaagcgctccatggtgttcaaggacgtgctgctgctcggcaacgactacatcgtcccccggcactgccccgagctggccgagatgagccgcgtgtccatccggatcctggacgagctcgtgctgccgttccaggagctgcagatcgacgacaacgagtacgcctacctcaaggccatcatcttcttcgaccccgacgccaagggcctgagcgaccccgggaagatcaagcgcctgcgctcccaggtccaggtgagcctcgaggactacatcaacgaccggcagtacgactcccgcggccggttcggggagctgctgctcctgctgcccacgctccagagcatcacctggcagatgatcgagcagatccagttcatcaagctgttcggcatggcgaagatcgacaacctgctccaggagatgctgctgggcgggtccccgagcgacgcgccccacgcccaccaccccctccacccccacctgatgcaggagcacatgggcaccaacgtgatcgtcgccaacaccatgccgacgcacctgtccaacgggcagatgtgcgagtggccccgcccccggggccaggccgccacccccgagaccccgcagcccagcccgcccgggggctccggcagcgagccctacaagctgctccccggggccgtggccaccatcgtgaagcccctgtccgccatcccccagccgacgatcaccaagcaggaggtcatctgaggactagtccctgttcccagagcccacttttttttctttttttgaaataaaatagcctgtctttcagatctaaaaaaaaaaaaaaaaaaaaaaaaaaaaaaaaaaaaaaaaaaaaaaaaaaaaaaaaaaaaaaaaaaaaaaaaaaaaaaaaaaaaaaaaaaaaaaaaaaaa

SEQ ID NO: 4264 - RNA, 1673 nt, synthetic construct
  misc_feature 1..1673: note = mRNA a-1 (A100) (opt1) from Homo sapiens__NP_000448.3__HNF4A(1-474)(S461A)
  source 1..1673: mol_type = other RNA
aggagagtcccgcagtcggcgtccagcggctctgcttgttcgtgtgtgtgtcgttgcaggccttattcaagcttaccatgcgcctgagcaagaccctcgtggacatggacatggccgactactccgccgcgctggaccccgcctacaccacgctggagttcgagaacgtccaggtgctcaccatgggcaacgacaccagcccgtccgaggggaccaacctgaacgcccccaacagcctgggcgtgtccgccctctgcgccatctgcggggaccgggcgacgggcaagcactacggggccagctcctgcgacggctgcaagggcttcttccgccggagcgtccgcaagaaccacatgtactcctgccggttcagccgccagtgcgtggtggacaaggacaagcggaaccagtgccgctactgccggctgaagaagtgcttccgcgccgggatgaagaaggaggccgtccagaacgagcgggaccgcatctccacccggcgcagctcctacgaggacagctccctgcccagcatcaacgcgctcctgcaggccgaggtgctgtcccggcagatcaccagccccgtgtccggcatcaacggggacatccgcgccaagaagatcgccagcatcgccgacgtctgcgagagcatgaaggagcagctcctggtgctggtggagtgggcgaagtacatcccggccttctgcgagctccccctggacgaccaggtcgccctgctccgggcccacgccggcgagcacctcctgctgggggcgaccaagcgctccatggtgttcaaggacgtgctgctgctcggcaacgactacatcgtcccccggcactgccccgagctggccgagatgagccgcgtgtccatccggatcctggacgagctcgtgctgccgttccaggagctgcagatcgacgacaacgagtacgcctacctcaaggccatcatcttcttcgaccccgacgccaagggcctgagcgaccccgggaagatcaagcgcctgcgctcccaggtccaggtgagcctcgaggactacatcaacgaccggcagtacgactcccgcggccggttcggggagctgctgctcctgctgcccacgctccagagcatcacctggcagatgatcgagcagatccagttcatcaagctgttcggcatggcgaagatcgacaacctgctccaggagatgctgctgggcgggtccccgagcgacgcgccccacgcccaccaccccctccacccccacctgatgcaggagcacatgggcaccaacgtgatcgtcgccaacaccatgccgacgcacctgtccaacgggcagatgtgcgagtggccccgcccccggggccaggccgccacccccgagaccccgcagcccagcccgcccgggggctccggcagcgagccctacaagctgctccccggggccgtggccaccatcgtgaagcccctggcggccatcccccagccgacgatcaccaagcaggaggtcatctgaggactagtccctgttcccagagcccacttttttttctttttttgaaataaaatagcctgtctttcagatctaaaaaaaaaaaaaaaaaaaaaaaaaaaaaaaaaaaaaaaaaaaaaaaaaaaaaaaaaaaaaaaaaaaaaaaaaaaaaaaaaaaaaaaaaaaaaaaaaaaa

SEQ ID NO: 4265 - RNA, 1673 nt, synthetic construct
  misc_feature 1..1673: note = mRNA a-1 (A100) (opt1) from Homo sapiens__NP_000448.3__HNF4A(1-474)(S461E)
  source 1..1673: mol_type = other RNA
aggagagtcccgcagtcggcgtccagcggctctgcttgttcgtgtgtgtgtcgttgcaggccttattcaagcttaccatgcgcctgagcaagaccctcgtggacatggacatggccgactactccgccgcgctggaccccgcctacaccacgctggagttcgagaacgtccaggtgctcaccatgggcaacgacaccagcccgtccgaggggaccaacctgaacgcccccaacagcctgggcgtgtccgccctctgcgccatctgcggggaccgggcgacgggcaagcactacggggccagctcctgcgacggctgcaagggcttcttccgccggagcgtccgcaagaaccacatgtactcctgccggttcagccgccagtgcgtggtggacaaggacaagcggaaccagtgccgctactgccggctgaagaagtgcttccgcgccgggatgaagaaggaggccgtccagaacgagcgggaccgcatctccacccggcgcagctcctacgaggacagctccctgcccagcatcaacgcgctcctgcaggccgaggtgctgtcccggcagatcaccagccccgtgtccggcatcaacggggacatccgcgccaagaagatcgccagcatcgccgacgtctgcgagagcatgaaggagcagctcctggtgctggtggagtgggcgaagtacatcccggccttctgcgagctccccctggacgaccaggtcgccctgctccgggcccacgccggcgagcacctcctgctgggggcgaccaagcgctccatggtgttcaaggacgtgctgctgctcggcaacgactacatcgtcccccggcactgccccgagctggccgagatgagccgcgtgtccatccggatcctggacgagctcgtgctgccgttccaggagctgcagatcgacgacaacgagtacgcctacctcaaggccatcatcttcttcgaccccgacgccaagggcctgagcgaccccgggaagatcaagcgcctgcgctcccaggtccaggtgagcctcgaggactacatcaacgaccggcagtacgactcccgcggccggttcggggagctgctgctcctgctgcccacgctccagagcatcacctggcagatgatcgagcagatccagttcatcaagctgttcggcatggcgaagatcgacaacctgctccaggagatgctgctgggcgggtccccgagcgacgcgccccacgcccaccaccccctccacccccacctgatgcaggagcacatgggcaccaacgtgatcgtcgccaacaccatgccgacgcacctgtccaacgggcagatgtgcgagtggccccgcccccggggccaggccgccacccccgagaccccgcagcccagcccgcccgggggctccggcagcgagccctacaagctgctccccggggccgtggccaccatcgtgaagcccctggaggccatcccccagccgacgatcaccaagcaggaggtcatctgaggactagtccctgttcccagagcccacttttttttctttttttgaaataaaatagcctgtctttcagatctaaaaaaaaaaaaaaaaaaaaaaaaaaaaaaaaaaaaaaaaaaaaaaaaaaaaaaaaaaaaaaaaaaaaaaaaaaaaaaaaaaaaaaaaaaaaaaaaaaaa

SEQ ID NO: 4266 - RNA, 1673 nt, synthetic construct
  misc_feature 1..1673: note = mRNA a-1 (A100) (opt1) from Homo sapiens__NP_000448.3__HNF4A(1-474)(S142A_S143A_S313A)
  source 1..1673: mol_type = other RNA
aggagagtcccgcagtcggcgtccagcggctctgcttgttcgtgtgtgtgtcgttgcaggccttattcaagcttaccatgcgcctgagcaagaccctcgtggacatggacatggccgactactccgccgcgctggaccccgcctacaccacgctggagttcgagaacgtccaggtgctcaccatgggcaacgacaccagcccgtccgaggggaccaacctgaacgcccccaacagcctgggcgtgtccgccctctgcgccatctgcggggaccgggcgacgggcaagcactacggggccagctcctgcgacggctgcaagggcttcttccgccggagcgtccgcaagaaccacatgtactcctgccggttcagccgccagtgcgtggtggacaaggacaagcggaaccagtgccgctactgccggctgaagaagtgcttccgcgccgggatgaagaaggaggccgtccagaacgagcgggaccgcatctccacccggcgcgcggcctacgaggacagctccctgcccagcatcaacgcgctcctgcaggccgaggtgctgtcccggcagatcaccagccccgtgtccggcatcaacggggacatccgcgccaagaagatcgccagcatcgccgacgtctgcgagagcatgaaggagcagctcctggtgctggtggagtgggcgaagtacatcccggccttctgcgagctccccctggacgaccaggtcgccctgctccgggcccacgccggcgagcacctcctgctgggggcgaccaagcgctccatggtgttcaaggacgtgctgctgctcggcaacgactacatcgtcccccggcactgccccgagctggccgagatgagccgcgtgtccatccggatcctggacgagctcgtgctgccgttccaggagctgcagatcgacgacaacgagtacgcctacctcaaggccatcatcttcttcgaccccgacgccaagggcctgagcgaccccgggaagatcaagcgcctgcgcgcgcaggtccaggtgagcctcgaggactacatcaacgaccggcagtacgactcccgcggccggttcggggagctgctgctcctgctgcccacgctccagagcatcacctggcagatgatcgagcagatccagttcatcaagctgttcggcatggcgaagatcgacaacctgctccaggagatgctgctgggcgggtccccgagcgacgcgccccacgcccaccaccccctccacccccacctgatgcaggagcacatgggcaccaacgtgatcgtcgccaacaccatgccgacgcacctgtccaacgggcagatgtgcgagtggccccgcccccggggccaggccgccacccccgagaccccgcagcccagcccgcccgggggctccggcagcgagccctacaagctgctccccggggccgtggccaccatcgtgaagcccctgtccgccatcccccagccgacgatcaccaagcaggaggtcatctgaggactagtccctgttcccagagcccacttttttttctttttttgaaataaaatagcctgtctttcagatctaaaaaaaaaaaaaaaaaaaaaaaaaaaaaaaaaaaaaaaaaaaaaaaaaaaaaaaaaaaaaaaaaaaaaaaaaaaaaaaaaaaaaaaaaaaaaaaaaaaa

SEQ ID NO: 4267 - RNA, 1673 nt, synthetic construct
  misc_feature 1..1673: note = mRNA a-1 (A100) (opt1) from Homo sapiens__NP_000448.3__HNF4A(1-474)(S142A_S143A_S313A_K458R)
  source 1..1673: mol_type = other RNA
aggagagtcccgcagtcggcgtccagcggctctgcttgttcgtgtgtgtgtcgttgcaggccttattcaagcttaccatgcgcctgagcaagaccctcgtggacatggacatggccgactactccgccgcgctggaccccgcctacaccacgctggagttcgagaacgtccaggtgctcaccatgggcaacgacaccagcccgtccgaggggaccaacctgaacgcccccaacagcctgggcgtgtccgccctctgcgccatctgcggggaccgggcgacgggcaagcactacggggccagctcctgcgacggctgcaagggcttcttccgccggagcgtccgcaagaaccacatgtactcctgccggttcagccgccagtgcgtggtggacaaggacaagcggaaccagtgccgctactgccggctgaagaagtgcttccgcgccgggatgaagaaggaggccgtccagaacgagcgggaccgcatctccacccggcgcgcggcctacgaggacagctccctgcccagcatcaacgcgctcctgcaggccgaggtgctgtcccggcagatcaccagccccgtgtccggcatcaacggggacatccgcgccaagaagatcgccagcatcgccgacgtctgcgagagcatgaaggagcagctcctggtgctggtggagtgggcgaagtacatcccggccttctgcgagctccccctggacgaccaggtcgccctgctccgggcccacgccggcgagcacctcctgctgggggcgaccaagcgctccatggtgttcaaggacgtgctgctgctcggcaacgactacatcgtcccccggcactgccccgagctggccgagatgagccgcgtgtccatccggatcctggacgagctcgtgctgccgttccaggagctgcagatcgacgacaacgagtacgcctacctcaaggccatcatcttcttcgaccccgacgccaagggcctgagcgaccccgggaagatcaagcgcctgcgcgcgcaggtccaggtgagcctcgaggactacatcaacgaccggcagtacgactcccgcggccggttcggggagctgctgctcctgctgcccacgctccagagcatcacctggcagatgatcgagcagatccagttcatcaagctgttcggcatggcgaagatcgacaacctgctccaggagatgctgctgggcgggtccccgagcgacgcgccccacgcccaccaccccctccacccccacctgatgcaggagcacatgggcaccaacgtgatcgtcgccaacaccatgccgacgcacctgtccaacgggcagatgtgcgagtggccccgcccccggggccaggccgccacccccgagaccccgcagcccagcccgcccgggggctccggcagcgagccctacaagctgctccccggggccgtggccaccatcgtgcggcccctgtccgccatcccccagccgacgatcaccaagcaggaggtcatctgaggactagtccctgttcccagagcccacttttttttctttttttgaaataaaatagcctgtctttcagatctaaaaaaaaaaaaaaaaaaaaaaaaaaaaaaaaaaaaaaaaaaaaaaaaaaaaaaaaaaaaaaaaaaaaaaaaaaaaaaaaaaaaaaaaaaaaaaaaaaaa

SEQ ID NO: 4268 - RNA, 1673 nt, synthetic construct
  misc_feature 1..1673: note = mRNA a-1 (A100) (opt1) from Homo sapiens__NP_000448.3__HNF4A(1-474)(S142A_S143A_S167A_S313A_ S378A_T429A_T432A_S436A_K458R)
  source 1..1673: mol_type = other RNA
aggagagtcccgcagtcggcgtccagcggctctgcttgttcgtgtgtgtgtcgttgcaggccttattcaagcttaccatgcgcctgagcaagaccctcgtggacatggacatggccgactactccgccgcgctggaccccgcctacaccacgctggagttcgagaacgtccaggtgctcaccatgggcaacgacaccagcccgtccgaggggaccaacctgaacgcccccaacagcctgggcgtgtccgccctctgcgccatctgcggggaccgggcgacgggcaagcactacggggccagctcctgcgacggctgcaagggcttcttccgccggagcgtccgcaagaaccacatgtactcctgccggttcagccgccagtgcgtggtggacaaggacaagcggaaccagtgccgctactgccggctgaagaagtgcttccgcgccgggatgaagaaggaggccgtccagaacgagcgggaccgcatctccacccggcgcgcggcctacgaggacagctccctgcccagcatcaacgcgctcctgcaggccgaggtgctgtcccggcagatcaccgcgcccgtgtccggcatcaacggggacatccgcgccaagaagatcgccagcatcgccgacgtctgcgagagcatgaaggagcagctcctggtgctggtggagtgggcgaagtacatcccggccttctgcgagctccccctggacgaccaggtcgccctgctccgggcccacgccggcgagcacctcctgctgggggcgaccaagcgctccatggtgttcaaggacgtgctgctgctcggcaacgactacatcgtcccccggcactgccccgagctggccgagatgagccgcgtgtccatccggatcctggacgagctcgtgctgccgttccaggagctgcagatcgacgacaacgagtacgcctacctcaaggccatcatcttcttcgaccccgacgccaagggcctgagcgaccccgggaagatcaagcgcctgcgcgcgcaggtccaggtgagcctcgaggactacatcaacgaccggcagtacgactcccgcggccggttcggggagctgctgctcctgctgcccacgctccagagcatcacctggcagatgatcgagcagatccagttcatcaagctgttcggcatggcgaagatcgacaacctgctccaggagatgctgctgggcggggcgccgagcgacgcgccccacgcccaccaccccctccacccccacctgatgcaggagcacatgggcaccaacgtgatcgtcgccaacaccatgccgacgcacctgtccaacgggcagatgtgcgagtggccccgcccccggggccaggccgccgcgcccgaggcgccgcagcccgcgccgcccgggggctccggcagcgagccctacaagctgctccccggggccgtggccaccatcgtgcggcccctgtccgccatcccccagccgacgatcaccaagcaggaggtcatctgaggactagtccctgttcccagagcccacttttttttctttttttgaaataaaatagcctgtctttcagatctaaaaaaaaaaaaaaaaaaaaaaaaaaaaaaaaaaaaaaaaaaaaaaaaaaaaaaaaaaaaaaaaaaaaaaaaaaaaaaaaaaaaaaaaaaaaaaaaaaaa

SEQ ID NO: 4269 - RNA, 1673 nt, synthetic construct
  misc_feature 1..1673: note = mRNA a-1 (A100) (opt1) from Homo sapiens__NP_000448.3__HNF4A(1-474)(S142A_S143A_S148A_S167A_ S313A_S378A_T429A_T432A_S436A_K458R)
  source 1..1673: mol_type = other RNA
aggagagtcccgcagtcggcgtccagcggctctgcttgttcgtgtgtgtgtcgttgcaggccttattcaagcttaccatgcgcctgagcaagaccctcgtggacatggacatggccgactactccgccgcgctggaccccgcctacaccacgctggagttcgagaacgtccaggtgctcaccatgggcaacgacaccagcccgtccgaggggaccaacctgaacgcccccaacagcctgggcgtgtccgccctctgcgccatctgcggggaccgggcgacgggcaagcactacggggccagctcctgcgacggctgcaagggcttcttccgccggagcgtccgcaagaaccacatgtactcctgccggttcagccgccagtgcgtggtggacaaggacaagcggaaccagtgccgctactgccggctgaagaagtgcttccgcgccgggatgaagaaggaggccgtccagaacgagcgggaccgcatctccacccggcgcgcggcctacgaggacagcgcgctgcccagcatcaacgcgctcctgcaggccgaggtgctgtcccggcagatcaccgcgcccgtgtccggcatcaacggggacatccgcgccaagaagatcgccagcatcgccgacgtctgcgagagcatgaaggagcagctcctggtgctggtggagtgggcgaagtacatcccggccttctgcgagctccccctggacgaccaggtcgccctgctccgggcccacgccggcgagcacctcctgctgggggcgaccaagcgctccatggtgttcaaggacgtgctgctgctcggcaacgactacatcgtcccccggcactgccccgagctggccgagatgagccgcgtgtccatccggatcctggacgagctcgtgctgccgttccaggagctgcagatcgacgacaacgagtacgcctacctcaaggccatcatcttcttcgaccccgacgccaagggcctgagcgaccccgggaagatcaagcgcctgcgcgcgcaggtccaggtgagcctcgaggactacatcaacgaccggcagtacgactcccgcggccggttcggggagctgctgctcctgctgcccacgctccagagcatcacctggcagatgatcgagcagatccagttcatcaagctgttcggcatggcgaagatcgacaacctgctccaggagatgctgctgggcggggcgccgagcgacgcgccccacgcccaccaccccctccacccccacctgatgcaggagcacatgggcaccaacgtgatcgtcgccaacaccatgccgacgcacctgtccaacgggcagatgtgcgagtggccccgcccccggggccaggccgccgcgcccgaggcgccgcagcccgcgccgcccgggggctccggcagcgagccctacaagctgctccccggggccgtggccaccatcgtgcggcccctgtccgccatcccccagccgacgatcaccaagcaggaggtcatctgaggactagtccctgttcccagagcccacttttttttctttttttgaaataaaatagcctgtctttcagatctaaaaaaaaaaaaaaaaaaaaaaaaaaaaaaaaaaaaaaaaaaaaaaaaaaaaaaaaaaaaaaaaaaaaaaaaaaaaaaaaaaaaaaaaaaaaaaaaaaaa

SEQ ID NO: 4270 - RNA, 1673 nt, synthetic construct
  misc_feature 1..1673: note = mRNA a-1 (A100) (opt1) from Homo sapiens__NP_000448.3__HNF4A(1-474)(K106R_K108R_K126R_K127R_ S142A_S143A_S148A_S167A_S313A_S378A_T429A_T432A_S436A_K458R )
  source 1..1673: mol_type = other RNA
aggagagtcccgcagtcggcgtccagcggctctgcttgttcgtgtgtgtgtcgttgcaggccttattcaagcttaccatgcgcctgagcaagaccctcgtggacatggacatggccgactactccgccgcgctggaccccgcctacaccacgctggagttcgagaacgtccaggtgctcaccatgggcaacgacaccagcccgtccgaggggaccaacctgaacgcccccaacagcctgggcgtgtccgccctctgcgccatctgcggggaccgggcgacgggcaagcactacggggccagctcctgcgacggctgcaagggcttcttccgccggagcgtccgcaagaaccacatgtactcctgccggttcagccgccagtgcgtggtggaccgcgaccggcggaaccagtgccgctactgccggctgaagaagtgcttccgcgccgggatgcgccgcgaggccgtccagaacgagcgggaccgcatctccacccggcgcgcggcctacgaggacagcgcgctgcccagcatcaacgcgctcctgcaggccgaggtgctgtcccggcagatcaccgcgcccgtgtccggcatcaacggggacatccgcgccaagaagatcgccagcatcgccgacgtctgcgagagcatgaaggagcagctcctggtgctggtggagtgggcgaagtacatcccggccttctgcgagctccccctggacgaccaggtcgccctgctccgggcccacgccggcgagcacctcctgctgggggcgaccaagcgctccatggtgttcaaggacgtgctgctgctcggcaacgactacatcgtcccccggcactgccccgagctggccgagatgagccgcgtgtccatccggatcctggacgagctcgtgctgccgttccaggagctgcagatcgacgacaacgagtacgcctacctcaaggccatcatcttcttcgaccccgacgccaagggcctgagcgaccccgggaagatcaagcgcctgcgcgcgcaggtccaggtgagcctcgaggactacatcaacgaccggcagtacgactcccgcggccggttcggggagctgctgctcctgctgcccacgctccagagcatcacctggcagatgatcgagcagatccagttcatcaagctgttcggcatggcgaagatcgacaacctgctccaggagatgctgctgggcggggcgccgagcgacgcgccccacgcccaccaccccctccacccccacctgatgcaggagcacatgggcaccaacgtgatcgtcgccaacaccatgccgacgcacctgtccaacgggcagatgtgcgagtggccccgcccccggggccaggccgccgcgcccgaggcgccgcagcccgcgccgcccgggggctccggcagcgagccctacaagctgctccccggggccgtggccaccatcgtgcggcccctgtccgccatcccccagccgacgatcaccaagcaggaggtcatctgaggactagtccctgttcccagagcccacttttttttctttttttgaaataaaatagcctgtctttcagatctaaaaaaaaaaaaaaaaaaaaaaaaaaaaaaaaaaaaaaaaaaaaaaaaaaaaaaaaaaaaaaaaaaaaaaaaaaaaaaaaaaaaaaaaaaaaaaaaaaaa

SEQ ID NO: 4271 - RNA, 1673 nt, synthetic construct
  misc_feature 1..1673: note = mRNA a-1 (A100) (opt1) from Homo sapiens__NP_000448.3__HNF4A(1-474)(S142A_S143A_S148A_T166A_ S167A_S313A_S378A_T429A_T432A_S436A_K458R)
  source 1..1673: mol_type = other RNA
aggagagtcccgcagtcggcgtccagcggctctgcttgttcgtgtgtgtgtcgttgcaggccttattcaagcttaccatgcgcctgagcaagaccctcgtggacatggacatggccgactactccgccgcgctggaccccgcctacaccacgctggagttcgagaacgtccaggtgctcaccatgggcaacgacaccagcccgtccgaggggaccaacctgaacgcccccaacagcctgggcgtgtccgccctctgcgccatctgcggggaccgggcgacgggcaagcactacggggccagctcctgcgacggctgcaagggcttcttccgccggagcgtccgcaagaaccacatgtactcctgccggttcagccgccagtgcgtggtggacaaggacaagcggaaccagtgccgctactgccggctgaagaagtgcttccgcgccgggatgaagaaggaggccgtccagaacgagcgggaccgcatctccacccggcgcgcggcctacgaggacagcgcgctgcccagcatcaacgcgctcctgcaggccgaggtgctgtcccggcagatcgcggcgcccgtgtccggcatcaacggggacatccgcgccaagaagatcgccagcatcgccgacgtctgcgagagcatgaaggagcagctcctggtgctggtggagtgggcgaagtacatcccggccttctgcgagctccccctggacgaccaggtcgccctgctccgggcccacgccggcgagcacctcctgctgggggcgaccaagcgctccatggtgttcaaggacgtgctgctgctcggcaacgactacatcgtcccccggcactgccccgagctggccgagatgagccgcgtgtccatccggatcctggacgagctcgtgctgccgttccaggagctgcagatcgacgacaacgagtacgcctacctcaaggccatcatcttcttcgaccccgacgccaagggcctgagcgaccccgggaagatcaagcgcctgcgcgcgcaggtccaggtgagcctcgaggactacatcaacgaccggcagtacgactcccgcggccggttcggggagctgctgctcctgctgcccacgctccagagcatcacctggcagatgatcgagcagatccagttcatcaagctgttcggcatggcgaagatcgacaacctgctccaggagatgctgctgggcggggcgccgagcgacgcgccccacgcccaccaccccctccacccccacctgatgcaggagcacatgggcaccaacgtgatcgtcgccaacaccatgccgacgcacctgtccaacgggcagatgtgcgagtggccccgcccccggggccaggccgccgcgcccgaggcgccgcagcccgcgccgcccgggggctccggcagcgagccctacaagctgctccccggggccgtggccaccatcgtgcggcccctgtccgccatcccccagccgacgatcaccaagcaggaggtcatctgaggactagtccctgttcccagagcccacttttttttctttttttgaaataaaatagcctgtctttcagatctaaaaaaaaaaaaaaaaaaaaaaaaaaaaaaaaaaaaaaaaaaaaaaaaaaaaaaaaaaaaaaaaaaaaaaaaaaaaaaaaaaaaaaaaaaaaaaaaaaaa

SEQ ID NO: 4272 - RNA, 1673 nt, synthetic construct
  misc_feature 1..1673: note = mRNA a-1 (A100) (opt1) from Homo sapiens__NP_000448.3__HNF4A(1-474)(S87A_S142A_S143A_S148A_T 166A_S167A_S313A_S378A_T429A_T432A_S436A_K458R)
  source 1..1673: mol_type = other RNA
aggagagtcccgcagtcggcgtccagcggctctgcttgttcgtgtgtgtgtcgttgcaggccttattcaagcttaccatgcgcctgagcaagaccctcgtggacatggacatggccgactactccgccgcgctggaccccgcctacaccacgctggagttcgagaacgtccaggtgctcaccatgggcaacgacaccagcccgtccgaggggaccaacctgaacgcccccaacagcctgggcgtgtccgccctctgcgccatctgcggggaccgggcgacgggcaagcactacggggccagctcctgcgacggctgcaagggcttcttccgccgggcggtccgcaagaaccacatgtactcctgccggttcagccgccagtgcgtggtggacaaggacaagcggaaccagtgccgctactgccggctgaagaagtgcttccgcgccgggatgaagaaggaggccgtccagaacgagcgggaccgcatctccacccggcgcgcggcctacgaggacagcgcgctgcccagcatcaacgcgctcctgcaggccgaggtgctgtcccggcagatcgcggcgcccgtgtccggcatcaacggggacatccgcgccaagaagatcgccagcatcgccgacgtctgcgagagcatgaaggagcagctcctggtgctggtggagtgggcgaagtacatcccggccttctgcgagctccccctggacgaccaggtcgccctgctccgggcccacgccggcgagcacctcctgctgggggcgaccaagcgctccatggtgttcaaggacgtgctgctgctcggcaacgactacatcgtcccccggcactgccccgagctggccgagatgagccgcgtgtccatccggatcctggacgagctcgtgctgccgttccaggagctgcagatcgacgacaacgagtacgcctacctcaaggccatcatcttcttcgaccccgacgccaagggcctgagcgaccccgggaagatcaagcgcctgcgcgcgcaggtccaggtgagcctcgaggactacatcaacgaccggcagtacgactcccgcggccggttcggggagctgctgctcctgctgcccacgctccagagcatcacctggcagatgatcgagcagatccagttcatcaagctgttcggcatggcgaagatcgacaacctgctccaggagatgctgctgggcggggcgccgagcgacgcgccccacgcccaccaccccctccacccccacctgatgcaggagcacatgggcaccaacgtgatcgtcgccaacaccatgccgacgcacctgtccaacgggcagatgtgcgagtggccccgcccccggggccaggccgccgcgcccgaggcgccgcagcccgcgccgcccgggggctccggcagcgagccctacaagctgctccccggggccgtggccaccatcgtgcggcccctgtccgccatcccccagccgacgatcaccaagcaggaggtcatctgaggactagtccctgttcccagagcccacttttttttctttttttgaaataaaatagcctgtctttcagatctaaaaaaaaaaaaaaaaaaaaaaaaaaaaaaaaaaaaaaaaaaaaaaaaaaaaaaaaaaaaaaaaaaaaaaaaaaaaaaaaaaaaaaaaaaaaaaaaaaaa

SEQ ID NO: 4273 - RNA, 1673 nt, synthetic construct
  misc_feature 1..1673: note = mRNA a-1 (A100) (opt1) from Homo sapiens__NP_000448.3__HNF4A(1-474)(S87A_K106R_K108R_K126R_K 127R_S142A_S143A_S148A_T166A_S167A_S313A_S378A_T429A_T432A_ S436A_K458R)
  source 1..1673: mol_type = other RNA
aggagagtcccgcagtcggcgtccagcggctctgcttgttcgtgtgtgtgtcgttgcaggccttattcaagcttaccatgcgcctgagcaagaccctcgtggacatggacatggccgactactccgccgcgctggaccccgcctacaccacgctggagttcgagaacgtccaggtgctcaccatgggcaacgacaccagcccgtccgaggggaccaacctgaacgcccccaacagcctgggcgtgtccgccctctgcgccatctgcggggaccgggcgacgggcaagcactacggggccagctcctgcgacggctgcaagggcttcttccgccgggcggtccgcaagaaccacatgtactcctgccggttcagccgccagtgcgtggtggaccgcgaccggcggaaccagtgccgctactgccggctgaagaagtgcttccgcgccgggatgcgccgcgaggccgtccagaacgagcgggaccgcatctccacccggcgcgcggcctacgaggacagcgcgctgcccagcatcaacgcgctcctgcaggccgaggtgctgtcccggcagatcgcggcgcccgtgtccggcatcaacggggacatccgcgccaagaagatcgccagcatcgccgacgtctgcgagagcatgaaggagcagctcctggtgctggtggagtgggcgaagtacatcccggccttctgcgagctccccctggacgaccaggtcgccctgctccgggcccacgccggcgagcacctcctgctgggggcgaccaagcgctccatggtgttcaaggacgtgctgctgctcggcaacgactacatcgtcccccggcactgccccgagctggccgagatgagccgcgtgtccatccggatcctggacgagctcgtgctgccgttccaggagctgcagatcgacgacaacgagtacgcctacctcaaggccatcatcttcttcgaccccgacgccaagggcctgagcgaccccgggaagatcaagcgcctgcgcgcgcaggtccaggtgagcctcgaggactacatcaacgaccggcagtacgactcccgcggccggttcggggagctgctgctcctgctgcccacgctccagagcatcacctggcagatgatcgagcagatccagttcatcaagctgttcggcatggcgaagatcgacaacctgctccaggagatgctgctgggcggggcgccgagcgacgcgccccacgcccaccaccccctccacccccacctgatgcaggagcacatgggcaccaacgtgatcgtcgccaacaccatgccgacgcacctgtccaacgggcagatgtgcgagtggccccgcccccggggccaggccgccgcgcccgaggcgccgcagcccgcgccgcccgggggctccggcagcgagccctacaagctgctccccggggccgtggccaccatcgtgcggcccctgtccgccatcccccagccgacgatcaccaagcaggaggtcatctgaggactagtccctgttcccagagcccacttttttttctttttttgaaataaaatagcctgtctttcagatctaaaaaaaaaaaaaaaaaaaaaaaaaaaaaaaaaaaaaaaaaaaaaaaaaaaaaaaaaaaaaaaaaaaaaaaaaaaaaaaaaaaaaaaaaaaaaaaaaaaa

SEQ ID NO: 4274 - RNA, 1673 nt, synthetic construct
  misc_feature 1..1673: note = mRNA a-1 (A100) (opt1) from Homo sapiens__NP_000448.3__HNF4A(1-474)(S87A_K106R_K108R_K126R_K 127R)
  source 1..1673: mol_type = other RNA
aggagagtcccgcagtcggcgtccagcggctctgcttgttcgtgtgtgtgtcgttgcaggccttattcaagcttaccatgcgcctgagcaagaccctcgtggacatggacatggccgactactccgccgcgctggaccccgcctacaccacgctggagttcgagaacgtccaggtgctcaccatgggcaacgacaccagcccgtccgaggggaccaacctgaacgcccccaacagcctgggcgtgtccgccctctgcgccatctgcggggaccgggcgacgggcaagcactacggggccagctcctgcgacggctgcaagggcttcttccgccgggcggtccgcaagaaccacatgtactcctgccggttcagccgccagtgcgtggtggaccgcgaccggcggaaccagtgccgctactgccggctgaagaagtgcttccgcgccgggatgcgccgggaggccgtccagaacgagcgggaccgcatctccacccggcgcagctcctacgaggacagctccctgcccagcatcaacgcgctcctgcaggccgaggtgctgtcccggcagatcaccagccccgtgtccggcatcaacggggacatccgcgccaagaagatcgccagcatcgccgacgtctgcgagagcatgaaggagcagctcctggtgctggtggagtgggcgaagtacatcccggccttctgcgagctccccctggacgaccaggtcgccctgctccgggcccacgccggcgagcacctcctgctgggggcgaccaagcgctccatggtgttcaaggacgtgctgctgctcggcaacgactacatcgtcccccggcactgccccgagctggccgagatgagccgcgtgtccatccggatcctggacgagctcgtgctgccgttccaggagctgcagatcgacgacaacgagtacgcctacctcaaggccatcatcttcttcgaccccgacgccaagggcctgagcgaccccgggaagatcaagcgcctgcgctcccaggtccaggtgagcctcgaggactacatcaacgaccggcagtacgactcccgcggccggttcggggagctgctgctcctgctgcccacgctccagagcatcacctggcagatgatcgagcagatccagttcatcaagctgttcggcatggcgaagatcgacaacctgctccaggagatgctgctgggcgggtccccgagcgacgcgccccacgcccaccaccccctccacccccacctgatgcaggagcacatgggcaccaacgtgatcgtcgccaacaccatgccgacgcacctgtccaacgggcagatgtgcgagtggccccgcccccggggccaggccgccacccccgagaccccgcagcccagcccgcccgggggctccggcagcgagccctacaagctgctccccggggccgtggccaccatcgtgaagcccctgtccgccatcccccagccgacgatcaccaagcaggaggtcatctgaggactagtccctgttcccagagcccacttttttttctttttttgaaataaaatagcctgtctttcagatctaaaaaaaaaaaaaaaaaaaaaaaaaaaaaaaaaaaaaaaaaaaaaaaaaaaaaaaaaaaaaaaaaaaaaaaaaaaaaaaaaaaaaaaaaaaaaaaaaaaa

SEQ ID NO: 4275 - RNA, 1673 nt, synthetic construct
  misc_feature 1..1673: note = mRNA a-1 (A100) (opt1) from Homo sapiens__NP_000448.3__HNF4A(1-474)(S87A_K106R_K108R_K126R_K 127R_S142A_S143A_S148A_T166A_S167A_S313A_S378A_T429A_T432A_ S436A_K458R_S461A)
  source 1..1673: mol_type = other RNA
aggagagtcccgcagtcggcgtccagcggctctgcttgttcgtgtgtgtgtcgttgcaggccttattcaagcttaccatgcgcctgagcaagaccctcgtggacatggacatggccgactactccgccgcgctggaccccgcctacaccacgctggagttcgagaacgtccaggtgctcaccatgggcaacgacaccagcccgtccgaggggaccaacctgaacgcccccaacagcctgggcgtgtccgccctctgcgccatctgcggggaccgggcgacgggcaagcactacggggccagctcctgcgacggctgcaagggcttcttccgccgggcggtccgcaagaaccacatgtactcctgccggttcagccgccagtgcgtggtggaccgcgaccggcggaaccagtgccgctactgccggctgaagaagtgcttccgcgccgggatgcgccgggaggccgtccagaacgagcgggaccgcatctccacccggcgcgccgcctacgaggacagcgccctgcccagcatcaacgcgctcctgcaggccgaggtgctgtcccggcagatcgccgcgcccgtgtccggcatcaacggggacatccgcgccaagaagatcgccagcatcgccgacgtctgcgagagcatgaaggagcagctcctggtgctggtggagtgggcgaagtacatcccggccttctgcgagctccccctggacgaccaggtcgccctgctccgggcccacgccggcgagcacctcctgctgggggcgaccaagcgctccatggtgttcaaggacgtgctgctgctcggcaacgactacatcgtcccccggcactgccccgagctggccgagatgagccgcgtgtccatccggatcctggacgagctcgtgctgccgttccaggagctgcagatcgacgacaacgagtacgcctacctcaaggccatcatcttcttcgaccccgacgccaagggcctgagcgaccccgggaagatcaagcgcctgcgcgcccaggtccaggtgagcctcgaggactacatcaacgaccggcagtacgactcccgcggccggttcggggagctgctgctcctgctgcccacgctccagagcatcacctggcagatgatcgagcagatccagttcatcaagctgttcggcatggcgaagatcgacaacctgctccaggagatgctgctgggcggggccccgagcgacgcgccccacgcccaccaccccctccacccccacctgatgcaggagcacatgggcaccaacgtgatcgtcgccaacaccatgccgacgcacctgtccaacgggcagatgtgcgagtggccccgcccccggggccaggccgccgcccccgaggccccgcagcccgcgccgcccgggggctccggcagcgagccctacaagctgctccccggggccgtggccaccatcgtgcggcccctggccgccatcccccagccgacgatcaccaagcaggaggtcatctgaggactagtccctgttcccagagcccacttttttttctttttttgaaataaaatagcctgtctttcagatctaaaaaaaaaaaaaaaaaaaaaaaaaaaaaaaaaaaaaaaaaaaaaaaaaaaaaaaaaaaaaaaaaaaaaaaaaaaaaaaaaaaaaaaaaaaaaaaaaaaa

SEQ ID NO: 4276 - RNA, 1673 nt, synthetic construct
  misc_feature 1..1673: note = mRNA a-1 (A100) (opt1) from Homo sapiens__NP_000448.3__HNF4A(1-474)(S87A_K106R_K108R_K126R_K 127R_S142A_S143A_S148A_T166A_S167A_S313A_S378A_T429A_T432A_ S436A_K458R_S461E)
  source 1..1673: mol_type = other RNA
aggagagtcccgcagtcggcgtccagcggctctgcttgttcgtgtgtgtgtcgttgcaggccttattcaagcttaccatgcgcctgagcaagaccctcgtggacatggacatggccgactactccgccgcgctggaccccgcctacaccacgctggagttcgagaacgtccaggtgctcaccatgggcaacgacaccagcccgtccgaggggaccaacctgaacgcccccaacagcctgggcgtgtccgccctctgcgccatctgcggggaccgggcgacgggcaagcactacggggccagctcctgcgacggctgcaagggcttcttccgccgggcggtccgcaagaaccacatgtactcctgccggttcagccgccagtgcgtggtggaccgcgaccggcggaaccagtgccgctactgccggctgaagaagtgcttccgcgccgggatgcgccgggaggccgtccagaacgagcgggaccgcatctccacccggcgcgccgcctacgaggacagcgccctgcccagcatcaacgcgctcctgcaggccgaggtgctgtcccggcagatcgccgcgcccgtgtccggcatcaacggggacatccgcgccaagaagatcgccagcatcgccgacgtctgcgagagcatgaaggagcagctcctggtgctggtggagtgggcgaagtacatcccggccttctgcgagctccccctggacgaccaggtcgccctgctccgggcccacgccggcgagcacctcctgctgggggcgaccaagcgctccatggtgttcaaggacgtgctgctgctcggcaacgactacatcgtcccccggcactgccccgagctggccgagatgagccgcgtgtccatccggatcctggacgagctcgtgctgccgttccaggagctgcagatcgacgacaacgagtacgcctacctcaaggccatcatcttcttcgaccccgacgccaagggcctgagcgaccccgggaagatcaagcgcctgcgcgcccaggtccaggtgagcctcgaggactacatcaacgaccggcagtacgactcccgcggccggttcggggagctgctgctcctgctgcccacgctccagagcatcacctggcagatgatcgagcagatccagttcatcaagctgttcggcatggcgaagatcgacaacctgctccaggagatgctgctgggcggggccccgagcgacgcgccccacgcccaccaccccctccacccccacctgatgcaggagcacatgggcaccaacgtgatcgtcgccaacaccatgccgacgcacctgtccaacgggcagatgtgcgagtggccccgcccccggggccaggccgccgcccccgaggccccgcagcccgcgccgcccgggggctccggcagcgagccctacaagctgctccccggggccgtggccaccatcgtgcggcccctggaggccatcccccagccgacgatcaccaagcaggaggtcatctgaggactagtccctgttcccagagcccacttttttttctttttttgaaataaaatagcctgtctttcagatctaaaaaaaaaaaaaaaaaaaaaaaaaaaaaaaaaaaaaaaaaaaaaaaaaaaaaaaaaaaaaaaaaaaaaaaaaaaaaaaaaaaaaaaaaaaaaaaaaaaa

SEQ ID NO: 4277 - RNA, 1673 nt, synthetic construct
  misc_feature 1..1673: note = mRNA a-1 (A100) (opt1) from Homo sapiens__NP_000448.3__HNF4A(1-474)(S87A_K106R_K108R_K126R_K 127R_S142A_S143A_S148E_T166A_S167E_S313A_S378E_T429E_T432E_ S436E_K458R_S461E)
  source 1..1673: mol_type = other RNA
aggagagtcccgcagtcggcgtccagcggctctgcttgttcgtgtgtgtgtcgttgcaggccttattcaagcttaccatgcgcctgagcaagaccctcgtggacatggacatggccgactactccgccgcgctggaccccgcctacaccacgctggagttcgagaacgtccaggtgctcaccatgggcaacgacaccagcccgtccgaggggaccaacctgaacgcccccaacagcctgggcgtgtccgccctctgcgccatctgcggggaccgggcgacgggcaagcactacggggccagctcctgcgacggctgcaagggcttcttccgccgggcggtccgcaagaaccacatgtactcctgccggttcagccgccagtgcgtggtggaccgcgaccggcggaaccagtgccgctactgccggctgaagaagtgcttccgcgccgggatgcgccgggaggccgtccagaacgagcgggaccgcatctccacccggcgcgccgcctacgaggacagcgagctgcccagcatcaacgcgctcctgcaggccgaggtgctgtcccggcagatcgccgagcccgtgtccggcatcaacggggacatccgcgccaagaagatcgccagcatcgccgacgtctgcgagagcatgaaggagcagctcctggtgctggtggagtgggcgaagtacatcccggccttctgcgagctccccctggacgaccaggtcgccctgctccgggcccacgccggcgagcacctcctgctgggggcgaccaagcgctccatggtgttcaaggacgtgctgctgctcggcaacgactacatcgtcccccggcactgccccgagctggccgagatgagccgcgtgtccatccggatcctggacgagctcgtgctgccgttccaggagctgcagatcgacgacaacgagtacgcctacctcaaggccatcatcttcttcgaccccgacgccaagggcctgagcgaccccgggaagatcaagcgcctgcgcgcccaggtccaggtgagcctcgaggactacatcaacgaccggcagtacgactcccgcggccggttcggggagctgctgctcctgctgcccacgctccagagcatcacctggcagatgatcgagcagatccagttcatcaagctgttcggcatggcgaagatcgacaacctgctccaggagatgctgctgggcggggagccgagcgacgcgccccacgcccaccaccccctccacccccacctgatgcaggagcacatgggcaccaacgtgatcgtcgccaacaccatgccgacgcacctgtccaacgggcagatgtgcgagtggccccgcccccggggccaggccgccgagcccgaggagccgcagcccgagccgcccgggggctccggcagcgagccctacaagctgctccccggggccgtggccaccatcgtgcggcccctggaggccatcccccagccgacgatcaccaagcaggaggtcatctgaggactagtccctgttcccagagcccacttttttttctttttttgaaataaaatagcctgtctttcagatctaaaaaaaaaaaaaaaaaaaaaaaaaaaaaaaaaaaaaaaaaaaaaaaaaaaaaaaaaaaaaaaaaaaaaaaaaaaaaaaaaaaaaaaaaaaaaaaaaaaa

SEQ ID NO: 4278 - RNA, 1673 nt, synthetic construct
  misc_feature 1..1673: note = mRNA a-1 (A100) (opt1) from Homo sapiens__NP_000448.3__HNF4A(1-474)(S87A_K106R_K108R_K126R_K 127R_S142A_S143A_S148A_T166A_S167A_K179R_K180R_S313A_S378A_ T429A_T432A_S436A_K458R_S461E)
  source 1..1673: mol_type = other RNA
aggagagtcccgcagtcggcgtccagcggctctgcttgttcgtgtgtgtgtcgttgcaggccttattcaagcttaccatgcgcctgagcaagaccctcgtggacatggacatggccgactactccgccgcgctggaccccgcctacaccacgctggagttcgagaacgtccaggtgctcaccatgggcaacgacaccagcccgtccgaggggaccaacctgaacgcccccaacagcctgggcgtgtccgccctctgcgccatctgcggggaccgggcgacgggcaagcactacggggccagctcctgcgacggctgcaagggcttcttccgccgggcggtccgcaagaaccacatgtactcctgccggttcagccgccagtgcgtggtggaccgcgaccggcggaaccagtgccgctactgccggctgaagaagtgcttccgcgccgggatgcgccgggaggccgtccagaacgagcgggaccgcatctccacccggcgcgccgcctacgaggacagcgccctgcccagcatcaacgcgctcctgcaggccgaggtgctgtcccggcagatcgccgcgcccgtgtccggcatcaacggggacatccgcgcccgccggatcgccagcatcgccgacgtctgcgagagcatgaaggagcagctcctggtgctggtggagtgggcgaagtacatcccggccttctgcgagctccccctggacgaccaggtcgccctgctccgggcccacgccggcgagcacctcctgctgggggcgaccaagcgctccatggtgttcaaggacgtgctgctgctcggcaacgactacatcgtcccccggcactgccccgagctggccgagatgagccgcgtgtccatccggatcctggacgagctcgtgctgccgttccaggagctgcagatcgacgacaacgagtacgcctacctcaaggccatcatcttcttcgaccccgacgccaagggcctgagcgaccccgggaagatcaagcgcctgcgcgcccaggtccaggtgagcctcgaggactacatcaacgaccggcagtacgactcccgcggccggttcggggagctgctgctcctgctgcccacgctccagagcatcacctggcagatgatcgagcagatccagttcatcaagctgttcggcatggcgaagatcgacaacctgctccaggagatgctgctgggcggggccccgagcgacgcgccccacgcccaccaccccctccacccccacctgatgcaggagcacatgggcaccaacgtgatcgtcgccaacaccatgccgacgcacctgtccaacgggcagatgtgcgagtggccccgcccccggggccaggccgccgcccccgaggccccgcagcccgcgccgcccgggggctccggcagcgagccctacaagctgctccccggggccgtggccaccatcgtgcggcccctggaggccatcccccagccgacgatcaccaagcaggaggtcatctgaggactagtccctgttcccagagcccacttttttttctttttttgaaataaaatagcctgtctttcagatctaaaaaaaaaaaaaaaaaaaaaaaaaaaaaaaaaaaaaaaaaaaaaaaaaaaaaaaaaaaaaaaaaaaaaaaaaaaaaaaaaaaaaaaaaaaaaaaaaaaa

SEQ ID NO: 4279 - RNA, 1673 nt, synthetic construct
  misc_feature 1..1673: note = mRNA a-1 (A100) (opt1) from Homo sapiens__NP_000448.3__HNF4A(1-474)(S87A_K106R_K108R_K126R_K 127R_S142A_S143A_S148A_T166A_S167A_K300R_K307R_K309R_S313A_ S378A_T429A_T432A_S436A_K458R_S461E)
  source 1..1673: mol_type = other RNA
aggagagtcccgcagtcggcgtccagcggctctgcttgttcgtgtgtgtgtcgttgcaggccttattcaagcttaccatgcgcctgagcaagaccctcgtggacatggacatggccgactactccgccgcgctggaccccgcctacaccacgctggagttcgagaacgtccaggtgctcaccatgggcaacgacaccagcccgtccgaggggaccaacctgaacgcccccaacagcctgggcgtgtccgccctctgcgccatctgcggggaccgggcgacgggcaagcactacggggccagctcctgcgacggctgcaagggcttcttccgccgggcggtccgcaagaaccacatgtactcctgccggttcagccgccagtgcgtggtggaccgcgaccggcggaaccagtgccgctactgccggctgaagaagtgcttccgcgccgggatgcgccgggaggccgtccagaacgagcgggaccgcatctccacccggcgcgccgcctacgaggacagcgccctgcccagcatcaacgcgctcctgcaggccgaggtgctgtcccggcagatcgccgcgcccgtgtccggcatcaacggggacatccgcgccaagaagatcgccagcatcgccgacgtctgcgagagcatgaaggagcagctcctggtgctggtggagtgggcgaagtacatcccggccttctgcgagctccccctggacgaccaggtcgccctgctccgggcccacgccggcgagcacctcctgctgggggcgaccaagcgctccatggtgttcaaggacgtgctgctgctcggcaacgactacatcgtcccccggcactgccccgagctggccgagatgagccgcgtgtccatccggatcctggacgagctcgtgctgccgttccaggagctgcagatcgacgacaacgagtacgcctacctcaaggccatcatcttcttcgaccccgacgcccgcggcctgagcgaccccgggcggatccgccgcctgcgcgcccaggtccaggtgagcctcgaggactacatcaacgaccggcagtacgactcccgcggccggttcggggagctgctgctcctgctgcccacgctccagagcatcacctggcagatgatcgagcagatccagttcatcaagctgttcggcatggcgaagatcgacaacctgctccaggagatgctgctgggcggggccccgagcgacgcgccccacgcccaccaccccctccacccccacctgatgcaggagcacatgggcaccaacgtgatcgtcgccaacaccatgccgacgcacctgtccaacgggcagatgtgcgagtggccccgcccccggggccaggccgccgcccccgaggccccgcagcccgcgccgcccgggggctccggcagcgagccctacaagctgctccccggggccgtggccaccatcgtgcggcccctggaggccatcccccagccgacgatcaccaagcaggaggtcatctgaggactagtccctgttcccagagcccacttttttttctttttttgaaataaaatagcctgtctttcagatctaaaaaaaaaaaaaaaaaaaaaaaaaaaaaaaaaaaaaaaaaaaaaaaaaaaaaaaaaaaaaaaaaaaaaaaaaaaaaaaaaaaaaaaaaaaaaaaaaaaa

SEQ ID NO: 4280 - RNA, 1673 nt, synthetic construct
  misc_feature 1..1673: note = mRNA a-1 (A100) (opt1) from Homo sapiens__NP_000448.3__HNF4A(1-474)(S87A_K106R_K108R_K126R_K 127R_S142A_S143A_S148A_T166A_S167A_S313A_S378A_T429A_T432A_ S436A_K447R_K458R_S461E_K470R)
  source 1..1673: mol_type = other RNA
aggagagtcccgcagtcggcgtccagcggctctgcttgttcgtgtgtgtgtcgttgcaggccttattcaagcttaccatgcgcctgagcaagaccctcgtggacatggacatggccgactactccgccgcgctggaccccgcctacaccacgctggagttcgagaacgtccaggtgctcaccatgggcaacgacaccagcccgtccgaggggaccaacctgaacgcccccaacagcctgggcgtgtccgccctctgcgccatctgcggggaccgggcgacgggcaagcactacggggccagctcctgcgacggctgcaagggcttcttccgccgggcggtccgcaagaaccacatgtactcctgccggttcagccgccagtgcgtggtggaccgcgaccggcggaaccagtgccgctactgccggctgaagaagtgcttccgcgccgggatgcgccgggaggccgtccagaacgagcgggaccgcatctccacccggcgcgccgcctacgaggacagcgccctgcccagcatcaacgcgctcctgcaggccgaggtgctgtcccggcagatcgccgcgcccgtgtccggcatcaacggggacatccgcgccaagaagatcgccagcatcgccgacgtctgcgagagcatgaaggagcagctcctggtgctggtggagtgggcgaagtacatcccggccttctgcgagctccccctggacgaccaggtcgccctgctccgggcccacgccggcgagcacctcctgctgggggcgaccaagcgctccatggtgttcaaggacgtgctgctgctcggcaacgactacatcgtcccccggcactgccccgagctggccgagatgagccgcgtgtccatccggatcctggacgagctcgtgctgccgttccaggagctgcagatcgacgacaacgagtacgcctacctcaaggccatcatcttcttcgaccccgacgccaagggcctgagcgaccccgggaagatcaagcgcctgcgcgcccaggtccaggtgagcctcgaggactacatcaacgaccggcagtacgactcccgcggccggttcggggagctgctgctcctgctgcccacgctccagagcatcacctggcagatgatcgagcagatccagttcatcaagctgttcggcatggcgaagatcgacaacctgctccaggagatgctgctgggcggggccccgagcgacgcgccccacgcccaccaccccctccacccccacctgatgcaggagcacatgggcaccaacgtgatcgtcgccaacaccatgccgacgcacctgtccaacgggcagatgtgcgagtggccccgcccccggggccaggccgccgcccccgaggccccgcagcccgcgccgcccgggggctccggcagcgagccctaccgcctgctccccggggccgtggccaccatcgtgcggcccctggaggccatcccccagccgacgatcacccggcaggaggtcatctgaggactagtccctgttcccagagcccacttttttttctttttttgaaataaaatagcctgtctttcagatctaaaaaaaaaaaaaaaaaaaaaaaaaaaaaaaaaaaaaaaaaaaaaaaaaaaaaaaaaaaaaaaaaaaaaaaaaaaaaaaaaaaaaaaaaaaaaaaaaaaa

SEQ ID NO: 4281 - RNA, 1673 nt, synthetic construct
  misc_feature 1..1673: note = mRNA a-1 (A100) (opt1) from Homo sapiens__NP_000448.3__HNF4A(1-474)(S87A_K106R_K108R_K126R_K 127R_S142A_S143A_S148A_T166A_S167A_K179R_K180R_K234R_K300R_ K307R_K309R_S313A_S378A_T429A_T432A_S436A_K447R_K458R_S461E _K470R)
  source 1..1673: mol_type = other RNA
aggagagtcccgcagtcggcgtccagcggctctgcttgttcgtgtgtgtgtcgttgcaggccttattcaagcttaccatgcgcctgagcaagaccctcgtggacatggacatggccgactactccgccgcgctggaccccgcctacaccacgctggagttcgagaacgtccaggtgctcaccatgggcaacgacaccagcccgtccgaggggaccaacctgaacgcccccaacagcctgggcgtgtccgccctctgcgccatctgcggggaccgggcgacgggcaagcactacggggccagctcctgcgacggctgcaagggcttcttccgccgggcggtccgcaagaaccacatgtactcctgccggttcagccgccagtgcgtggtggaccgcgaccggcggaaccagtgccgctactgccggctgaagaagtgcttccgcgccgggatgcgccgggaggccgtccagaacgagcgggaccgcatctccacccggcgcgccgcctacgaggacagcgccctgcccagcatcaacgcgctcctgcaggccgaggtgctgtcccggcagatcgccgcgcccgtgtccggcatcaacggggacatccgcgcccgccggatcgccagcatcgccgacgtctgcgagagcatgaaggagcagctcctggtgctggtggagtgggcgaagtacatcccggccttctgcgagctccccctggacgaccaggtcgccctgctccgggcccacgccggcgagcacctcctgctgggggcgacccggcgctccatggtgttcaaggacgtgctgctgctcggcaacgactacatcgtcccccggcactgccccgagctggccgagatgagccgcgtgtccatccggatcctggacgagctcgtgctgccgttccaggagctgcagatcgacgacaacgagtacgcctacctcaaggccatcatcttcttcgaccccgacgcccgcggcctgagcgaccccgggcggatccgccgcctgcgcgcccaggtccaggtgagcctcgaggactacatcaacgaccggcagtacgactcccgcggccggttcggggagctgctgctcctgctgcccacgctccagagcatcacctggcagatgatcgagcagatccagttcatcaagctgttcggcatggcgaagatcgacaacctgctccaggagatgctgctgggcggggccccgagcgacgcgccccacgcccaccaccccctccacccccacctgatgcaggagcacatgggcaccaacgtgatcgtcgccaacaccatgccgacgcacctgtccaacgggcagatgtgcgagtggccccgcccccggggccaggccgccgcccccgaggccccgcagcccgcgccgcccgggggctccggcagcgagccctaccgcctgctccccggggccgtggccaccatcgtgcggcccctggaggccatcccccagccgacgatcacccggcaggaggtcatctgaggactagtccctgttcccagagcccacttttttttctttttttgaaataaaatagcctgtctttcagatctaaaaaaaaaaaaaaaaaaaaaaaaaaaaaaaaaaaaaaaaaaaaaaaaaaaaaaaaaaaaaaaaaaaaaaaaaaaaaaaaaaaaaaaaaaaaaaaaaaaa

SEQ ID NO: 4282 - RNA, 1673 nt, synthetic construct
  misc_feature 1..1673: note = mRNA a-1 (A100) (opt1) from Homo sapiens__NP_000448.3__HNF4A(1-474)(S87A_S95A_S99A_K106R_K10 8R_K126R_K127R_S142A_S143A_S148A_T166A_S167A_S313A_S378A_T4 29A_T432A_S436A_K458R_S461E)
  source 1..1673: mol_type = other RNA
aggagagtcccgcagtcggcgtccagcggctctgcttgttcgtgtgtgtgtcgttgcaggccttattcaagcttaccatgcgcctgagcaagaccctcgtggacatggacatggccgactactccgccgcgctggaccccgcctacaccacgctggagttcgagaacgtccaggtgctcaccatgggcaacgacaccagcccgtccgaggggaccaacctgaacgcccccaacagcctgggcgtgtccgccctctgcgccatctgcggggaccgggcgacgggcaagcactacggggccagctcctgcgacggctgcaagggcttcttccgccgggcggtccgcaagaaccacatgtacgcctgccggttcgcccgccagtgcgtggtggaccgcgaccggcggaaccagtgccgctactgccggctgaagaagtgcttccgcgccgggatgcgccgggaggccgtccagaacgagcgggaccgcatctccacccggcgcgccgcctacgaggacagcgccctgcccagcatcaacgcgctcctgcaggccgaggtgctgtcccggcagatcgccgcgcccgtgtccggcatcaacggggacatccgcgccaagaagatcgccagcatcgccgacgtctgcgagagcatgaaggagcagctcctggtgctggtggagtgggcgaagtacatcccggccttctgcgagctccccctggacgaccaggtcgccctgctccgggcccacgccggcgagcacctcctgctgggggcgaccaagcgctccatggtgttcaaggacgtgctgctgctcggcaacgactacatcgtcccccggcactgccccgagctggccgagatgagccgcgtgtccatccggatcctggacgagctcgtgctgccgttccaggagctgcagatcgacgacaacgagtacgcctacctcaaggccatcatcttcttcgaccccgacgccaagggcctgagcgaccccgggaagatcaagcgcctgcgcgcccaggtccaggtgagcctcgaggactacatcaacgaccggcagtacgactcccgcggccggttcggggagctgctgctcctgctgcccacgctccagagcatcacctggcagatgatcgagcagatccagttcatcaagctgttcggcatggcgaagatcgacaacctgctccaggagatgctgctgggcggggccccgagcgacgcgccccacgcccaccaccccctccacccccacctgatgcaggagcacatgggcaccaacgtgatcgtcgccaacaccatgccgacgcacctgtccaacgggcagatgtgcgagtggccccgcccccggggccaggccgccgcccccgaggccccgcagcccgcgccgcccgggggctccggcagcgagccctacaagctgctccccggggccgtggccaccatcgtgcggcccctggaggccatcccccagccgacgatcaccaagcaggaggtcatctgaggactagtccctgttcccagagcccacttttttttctttttttgaaataaaatagcctgtctttcagatctaaaaaaaaaaaaaaaaaaaaaaaaaaaaaaaaaaaaaaaaaaaaaaaaaaaaaaaaaaaaaaaaaaaaaaaaaaaaaaaaaaaaaaaaaaaaaaaaaaaa

SEQ ID NO: 4283 - RNA, 1673 nt, synthetic construct
  misc_feature 1..1673: note = mRNA a-1 (A100) (opt1) from Homo sapiens__NP_000448.3__HNF4A(1-474)(S87A_K106R_K108R_K126R_K 127R_S138A_T139A_S142A_S143A_S148A_T166A_S167A_S313A_S378A_ T429A_T432A_S436A_K458R_S461E)
  source 1..1673: mol_type = other RNA
aggagagtcccgcagtcggcgtccagcggctctgcttgttcgtgtgtgtgtcgttgcaggccttattcaagcttaccatgcgcctgagcaagaccctcgtggacatggacatggccgactactccgccgcgctggaccccgcctacaccacgctggagttcgagaacgtccaggtgctcaccatgggcaacgacaccagcccgtccgaggggaccaacctgaacgcccccaacagcctgggcgtgtccgccctctgcgccatctgcggggaccgggcgacgggcaagcactacggggccagctcctgcgacggctgcaagggcttcttccgccgggcggtccgcaagaaccacatgtactcctgccggttcagccgccagtgcgtggtggaccgcgaccggcggaaccagtgccgctactgccggctgaagaagtgcttccgcgccgggatgcgccgggaggccgtccagaacgagcgggaccgcatcgccgcccggcgcgccgcctacgaggacagcgccctgcccagcatcaacgcgctcctgcaggccgaggtgctgtcccggcagatcgccgcgcccgtgtccggcatcaacggggacatccgcgccaagaagatcgccagcatcgccgacgtctgcgagagcatgaaggagcagctcctggtgctggtggagtgggcgaagtacatcccggccttctgcgagctccccctggacgaccaggtcgccctgctccgggcccacgccggcgagcacctcctgctgggggcgaccaagcgctccatggtgttcaaggacgtgctgctgctcggcaacgactacatcgtcccccggcactgccccgagctggccgagatgagccgcgtgtccatccggatcctggacgagctcgtgctgccgttccaggagctgcagatcgacgacaacgagtacgcctacctcaaggccatcatcttcttcgaccccgacgccaagggcctgagcgaccccgggaagatcaagcgcctgcgcgcccaggtccaggtgagcctcgaggactacatcaacgaccggcagtacgactcccgcggccggttcggggagctgctgctcctgctgcccacgctccagagcatcacctggcagatgatcgagcagatccagttcatcaagctgttcggcatggcgaagatcgacaacctgctccaggagatgctgctgggcggggccccgagcgacgcgccccacgcccaccaccccctccacccccacctgatgcaggagcacatgggcaccaacgtgatcgtcgccaacaccatgccgacgcacctgtccaacgggcagatgtgcgagtggccccgcccccggggccaggccgccgcccccgaggccccgcagcccgcgccgcccgggggctccggcagcgagccctacaagctgctccccggggccgtggccaccatcgtgcggcccctggaggccatcccccagccgacgatcaccaagcaggaggtcatctgaggactagtccctgttcccagagcccacttttttttctttttttgaaataaaatagcctgtctttcagatctaaaaaaaaaaaaaaaaaaaaaaaaaaaaaaaaaaaaaaaaaaaaaaaaaaaaaaaaaaaaaaaaaaaaaaaaaaaaaaaaaaaaaaaaaaaaaaaaaaaa

SEQ ID NO: 4284 - RNA, 1673 nt, synthetic construct
  misc_feature 1..1673: note = mRNA a-1 (A100) (opt1) from Homo sapiens__NP_000448.3__HNF4A(1-474)(S87A_S95A_S99A_K106R_K10 8R_K126R_K127R_S138A_T139A_S142A_S143A_S148A_T166A_S167A_S3 13A_S378A_T429A_T432A_S436A_K458R_S461E)
  source 1..1673: mol_type = other RNA
aggagagtcccgcagtcggcgtccagcggctctgcttgttcgtgtgtgtgtcgttgcaggccttattcaagcttaccatgcgcctgagcaagaccctcgtggacatggacatggccgactactccgccgcgctggaccccgcctacaccacgctggagttcgagaacgtccaggtgctcaccatgggcaacgacaccagcccgtccgaggggaccaacctgaacgcccccaacagcctgggcgtgtccgccctctgcgccatctgcggggaccgggcgacgggcaagcactacggggccagctcctgcgacggctgcaagggcttcttccgccgggcggtccgcaagaaccacatgtacgcctgccggttcgcccgccagtgcgtggtggaccgcgaccggcggaaccagtgccgctactgccggctgaagaagtgcttccgcgccgggatgcgccgggaggccgtccagaacgagcgggaccgcatcgccgcccggcgcgccgcctacgaggacagcgccctgcccagcatcaacgcgctcctgcaggccgaggtgctgtcccggcagatcgccgcgcccgtgtccggcatcaacggggacatccgcgccaagaagatcgccagcatcgccgacgtctgcgagagcatgaaggagcagctcctggtgctggtggagtgggcgaagtacatcccggccttctgcgagctccccctggacgaccaggtcgccctgctccgggcccacgccggcgagcacctcctgctgggggcgaccaagcgctccatggtgttcaaggacgtgctgctgctcggcaacgactacatcgtcccccggcactgccccgagctggccgagatgagccgcgtgtccatccggatcctggacgagctcgtgctgccgttccaggagctgcagatcgacgacaacgagtacgcctacctcaaggccatcatcttcttcgaccccgacgccaagggcctgagcgaccccgggaagatcaagcgcctgcgcgcccaggtccaggtgagcctcgaggactacatcaacgaccggcagtacgactcccgcggccggttcggggagctgctgctcctgctgcccacgctccagagcatcacctggcagatgatcgagcagatccagttcatcaagctgttcggcatggcgaagatcgacaacctgctccaggagatgctgctgggcggggccccgagcgacgcgccccacgcccaccaccccctccacccccacctgatgcaggagcacatgggcaccaacgtgatcgtcgccaacaccatgccgacgcacctgtccaacgggcagatgtgcgagtggccccgcccccggggccaggccgccgcccccgaggccccgcagcccgcgccgcccgggggctccggcagcgagccctacaagctgctccccggggccgtggccaccatcgtgcggcccctggaggccatcccccagccgacgatcaccaagcaggaggtcatctgaggactagtccctgttcccagagcccacttttttttctttttttgaaataaaatagcctgtctttcagatctaaaaaaaaaaaaaaaaaaaaaaaaaaaaaaaaaaaaaaaaaaaaaaaaaaaaaaaaaaaaaaaaaaaaaaaaaaaaaaaaaaaaaaaaaaaaaaaaaaaa

SEQ ID NO: 4285 - RNA, 1673 nt, synthetic construct
  misc_feature 1..1673: note = mRNA a-1 (A100) (opt1) from Homo sapiens__NP_000448.3__HNF4A(1-474)
  source 1..1673: mol_type = other RNA
aggagagtcccgcagtcggcgtccagcggctctgcttgttcgtgtgtgtgtcgttgcaggccttattcaagcttaccatgcgcctgagcaagaccctcgtggacatggacatggccgactactccgccgcgctggaccccgcctacaccacgctggagttcgagaacgtccaggtgctcaccatgggcaacgacaccagcccgtccgaggggaccaacctgaacgcccccaacagcctgggcgtgtccgccctctgcgccatctgcggggaccgggcgacgggcaagcactacggggccagctcctgcgacggctgcaagggcttcttccgccggagcgtccgcaagaaccacatgtactcctgccggttcagccgccagtgcgtggtggacaaggacaagcggaaccagtgccgctactgccggctgaagaagtgcttccgcgccgggatgaagaaggaggccgtccagaacgagcgggaccgcatctccacccggcgcagctcctacgaggacagctccctgcccagcatcaacgcgctcctgcaggccgaggtgctgtcccggcagatcaccagccccgtgtccggcatcaacggggacatccgcgccaagaagatcgccagcatcgccgacgtctgcgagagcatgaaggagcagctcctggtgctggtggagtgggcgaagtacatcccggccttctgcgagctccccctggacgaccaggtcgccctgctccgggcccacgccggcgagcacctcctgctgggggcgaccaagcgctccatggtgttcaaggacgtgctgctgctcggcaacgactacatcgtcccccggcactgccccgagctggccgagatgagccgcgtgtccatccggatcctggacgagctcgtgctgccgttccaggagctgcagatcgacgacaacgagtacgcctacctcaaggccatcatcttcttcgaccccgacgccaagggcctgagcgaccccgggaagatcaagcgcctgcgctcccaggtccaggtgagcctcgaggactacatcaacgaccggcagtacgactcccgcggccggttcggggagctgctgctcctgctgcccacgctccagagcatcacctggcagatgatcgagcagatccagttcatcaagctgttcggcatggcgaagatcgacaacctgctccaggagatgctgctgggcgggtccccgagcgacgcgccccacgcccaccaccccctccacccccacctgatgcaggagcacatgggcaccaacgtgatcgtcgccaacaccatgccgacgcacctgtccaacgggcagatgtgcgagtggccccgcccccggggccaggccgccacccccgagaccccgcagcccagcccgcccgggggctccggcagcgagccctacaagctcctgcccggggccgtggccaccatcgtgaagcccctgtccgccatcccccagccgacgatcaccaagcaggaggtcatctgaggactagtccctgttcccagagcccacttttttttctttttttgaaataaaatagcctgtctttcagatctaaaaaaaaaaaaaaaaaaaaaaaaaaaaaaaaaaaaaaaaaaaaaaaaaaaaaaaaaaaaaaaaaaaaaaaaaaaaaaaaaaaaaaaaaaaaaaaaaaaa

SEQ ID NO: 4286 - RNA, 1673 nt, synthetic construct
  misc_feature 1..1673: note = mRNA a-1 (A100) (opt1) from Homo sapiens__NP_000448.3__HNF4A(1-474)(S313A)
  source 1..1673: mol_type = other RNA
aggagagtcccgcagtcggcgtccagcggctctgcttgttcgtgtgtgtgtcgttgcaggccttattcaagcttaccatgcgcctgagcaagaccctcgtggacatggacatggccgactactccgccgcgctggaccccgcctacaccacgctggagttcgagaacgtccaggtgctcaccatgggcaacgacaccagcccgtccgaggggaccaacctgaacgcccccaacagcctgggcgtgtccgccctctgcgccatctgcggggaccgggcgacgggcaagcactacggggccagctcctgcgacggctgcaagggcttcttccgccggagcgtccgcaagaaccacatgtactcctgccggttcagccgccagtgcgtggtggacaaggacaagcggaaccagtgccgctactgccggctgaagaagtgcttccgcgccgggatgaagaaggaggccgtccagaacgagcgggaccgcatctccacccggcgcagctcctacgaggacagctccctgcccagcatcaacgcgctcctgcaggccgaggtgctgtcccggcagatcaccagccccgtgtccggcatcaacggggacatccgcgccaagaagatcgccagcatcgccgacgtctgcgagagcatgaaggagcagctcctggtgctggtggagtgggcgaagtacatcccggccttctgcgagctccccctggacgaccaggtcgccctgctccgggcccacgccggcgagcacctcctgctgggggcgaccaagcgctccatggtgttcaaggacgtgctgctgctcggcaacgactacatcgtcccccggcactgccccgagctggccgagatgagccgcgtgtccatccggatcctggacgagctcgtgctgccgttccaggagctgcagatcgacgacaacgagtacgcctacctcaaggccatcatcttcttcgaccccgacgccaagggcctgagcgaccccgggaagatcaagcgcctgcgcgcgcaggtccaggtgtccctcgaggactacatcaacgaccggcagtacgacagccgcggccggttcggggagctgctgctcctgctgcccacgctccagtccatcacctggcagatgatcgagcagatccagttcatcaagctgttcggcatggccaagatcgacaacctgctccaggagatgctgctgggcgggagcccgtccgacgcgccccacgcccaccaccccctccacccccacctgatgcaggagcacatgggcaccaacgtgatcgtcgccaacaccatgccgacgcacctgagcaacgggcagatgtgcgagtggccccgcccccggggccaggccgccacccccgagaccccgcagccctccccgcccgggggcagcggctccgagccctacaagctgctccccggggccgtggccaccatcgtgaagcccctgagcgcgatcccccagccgacgatcaccaagcaggaggtcatctgaggactagtccctgttcccagagcccacttttttttctttttttgaaataaaatagcctgtctttcagatctaaaaaaaaaaaaaaaaaaaaaaaaaaaaaaaaaaaaaaaaaaaaaaaaaaaaaaaaaaaaaaaaaaaaaaaaaaaaaaaaaaaaaaaaaaaaaaaaaaaa

SEQ ID NO: 4287 - RNA, 1673 nt, synthetic construct
  misc_feature 1..1673: note = mRNA a-1 (A100) (opt1) from Homo sapiens__NP_000448.3__HNF4A(1-474)(S313E)
  source 1..1673: mol_type = other RNA
aggagagtcccgcagtcggcgtccagcggctctgcttgttcgtgtgtgtgtcgttgcaggccttattcaagcttaccatgcgcctgagcaagaccctcgtggacatggacatggccgactactccgccgcgctggaccccgcctacaccacgctggagttcgagaacgtccaggtgctcaccatgggcaacgacaccagcccgtccgaggggaccaacctgaacgcccccaacagcctgggcgtgtccgccctctgcgccatctgcggggaccgggcgacgggcaagcactacggggccagctcctgcgacggctgcaagggcttcttccgccggagcgtccgcaagaaccacatgtactcctgccggttcagccgccagtgcgtggtggacaaggacaagcggaaccagtgccgctactgccggctgaagaagtgcttccgcgccgggatgaagaaggaggccgtccagaacgagcgggaccgcatctccacccggcgcagctcctacgaggacagctccctgcccagcatcaacgcgctcctgcaggccgaggtgctgtcccggcagatcaccagccccgtgtccggcatcaacggggacatccgcgccaagaagatcgccagcatcgccgacgtctgcgagagcatgaaggagcagctcctggtgctggtggagtgggcgaagtacatcccggccttctgcgagctccccctggacgaccaggtcgccctgctccgggcccacgccggcgagcacctcctgctgggggcgaccaagcgctccatggtgttcaaggacgtgctgctgctcggcaacgactacatcgtcccccggcactgccccgagctggccgagatgagccgcgtgtccatccggatcctggacgagctcgtgctgccgttccaggagctgcagatcgacgacaacgagtacgcctacctcaaggccatcatcttcttcgaccccgacgccaagggcctgagcgaccccgggaagatcaagcgcctgcgcgagcaggtccaggtgtccctcgaggactacatcaacgaccggcagtacgacagccgcggccggttcggggagctgctgctcctgctgcccacgctccagtccatcacctggcagatgatcgagcagatccagttcatcaagctgttcggcatggcgaagatcgacaacctgctccaggagatgctgctgggcgggagcccgtccgacgcgccccacgcccaccaccccctccacccccacctgatgcaggagcacatgggcaccaacgtgatcgtcgccaacaccatgccgacgcacctgagcaacgggcagatgtgcgagtggccccgcccccggggccaggccgccacccccgagaccccgcagccctccccgcccgggggcagcggctccgagccctacaagctgctccccggggccgtggccaccatcgtgaagcccctgagcgccatcccccagccgacgatcaccaagcaggaggtcatctgaggactagtccctgttcccagagcccacttttttttctttttttgaaataaaatagcctgtctttcagatctaaaaaaaaaaaaaaaaaaaaaaaaaaaaaaaaaaaaaaaaaaaaaaaaaaaaaaaaaaaaaaaaaaaaaaaaaaaaaaaaaaaaaaaaaaaaaaaaaaaa

SEQ ID NO: 4288 - RNA, 1673 nt, synthetic construct
  misc_feature 1..1673: note = mRNA a-1 (A100) (opt1) from Homo sapiens__NP_000448.3__HNF4A(1-474)(S142A_S143A)
  source 1..1673: mol_type = other RNA
aggagagtcccgcagtcggcgtccagcggctctgcttgttcgtgtgtgtgtcgttgcaggccttattcaagcttaccatgcgcctgagcaagaccctcgtggacatggacatggccgactactccgccgcgctggaccccgcctacaccacgctggagttcgagaacgtccaggtgctcaccatgggcaacgacaccagcccgtccgaggggaccaacctgaacgcccccaacagcctgggcgtgtccgccctctgcgccatctgcggggaccgggcgacgggcaagcactacggggccagctcctgcgacggctgcaagggcttcttccgccggagcgtccgcaagaaccacatgtactcctgccggttcagccgccagtgcgtggtggacaaggacaagcggaaccagtgccgctactgccggctgaagaagtgcttccgcgccgggatgaagaaggaggccgtccagaacgagcgggaccgcatctccacccggcgcgcggcctacgaggacagctccctgcccagcatcaacgccctcctgcaggccgaggtgctgtcccggcagatcaccagccccgtgtccggcatcaacggggacatccgcgccaagaagatcgcgagcatcgccgacgtctgcgagtccatgaaggagcagctcctggtgctggtggagtgggccaagtacatcccggccttctgcgagctccccctggacgaccaggtcgccctgctccgggcgcacgccggcgagcacctcctgctgggggccaccaagcgcagcatggtgttcaaggacgtgctgctgctcggcaacgactacatcgtcccccggcactgccccgagctggccgagatgagccgcgtgtccatccggatcctggacgagctcgtgctgccgttccaggagctgcagatcgacgacaacgagtacgcctacctcaaggcgatcatcttcttcgaccccgacgccaagggcctgagcgaccccgggaagatcaagcgcctgcgctcccaggtccaggtgagcctcgaggactacatcaacgaccggcagtacgactcccgcggccggttcggggagctgctgctcctgctgcccacgctccagagcatcacctggcagatgatcgagcagatccagttcatcaagctgttcggcatggccaagatcgacaacctgctccaggagatgctgctgggcgggtccccgagcgacgcgccccacgcccaccaccccctccacccccacctgatgcaggagcacatgggcaccaacgtgatcgtcgccaacaccatgccgacgcacctgtccaacgggcagatgtgcgagtggccccgcccccggggccaggccgccacccccgagaccccgcagcccagcccgcccgggggctccggcagcgagccctacaagctgctccccggggccgtggcgaccatcgtgaagcccctgtccgccatcccccagccgacgatcaccaagcaggaggtcatctgaggactagtccctgttcccagagcccacttttttttctttttttgaaataaaatagcctgtctttcagatctaaaaaaaaaaaaaaaaaaaaaaaaaaaaaaaaaaaaaaaaaaaaaaaaaaaaaaaaaaaaaaaaaaaaaaaaaaaaaaaaaaaaaaaaaaaaaaaaaaaa

SEQ ID NO: 4289 - RNA, 1673 nt, synthetic construct
  misc_feature 1..1673: note = mRNA a-1 (A100) (opt1) from Homo sapiens__NP_000448.3__HNF4A(1-474)(S142E_S143E)
  source 1..1673: mol_type = other RNA
aggagagtcccgcagtcggcgtccagcggctctgcttgttcgtgtgtgtgtcgttgcaggccttattcaagcttaccatgcgcctgagcaagaccctcgtggacatggacatggccgactactccgccgcgctggaccccgcctacaccacgctggagttcgagaacgtccaggtgctcaccatgggcaacgacaccagcccgtccgaggggaccaacctgaacgcccccaacagcctgggcgtgtccgccctctgcgccatctgcggggaccgggcgacgggcaagcactacggggccagctcctgcgacggctgcaagggcttcttccgccggagcgtccgcaagaaccacatgtactcctgccggttcagccgccagtgcgtggtggacaaggacaagcggaaccagtgccgctactgccggctgaagaagtgcttccgcgccgggatgaagaaggaggccgtccagaacgagcgggaccgcatctccacccggcgcgaggagtacgaggacagctccctgcccagcatcaacgcgctcctgcaggccgaggtgctgtcccggcagatcaccagccccgtgtccggcatcaacggggacatccgcgccaagaagatcgccagcatcgccgacgtctgcgagtccatgaaggagcagctcctggtgctggtggagtgggcgaagtacatcccggccttctgcgagctccccctggacgaccaggtcgccctgctccgggcccacgccggcgagcacctcctgctgggggcgaccaagcgcagcatggtgttcaaggacgtgctgctgctcggcaacgactacatcgtcccccggcactgccccgagctggccgagatgagccgcgtgtccatccggatcctggacgagctcgtgctgccgttccaggagctgcagatcgacgacaacgagtacgcctacctcaaggccatcatcttcttcgaccccgacgccaagggcctgagcgaccccgggaagatcaagcgcctgcgctcccaggtccaggtgagcctcgaggactacatcaacgaccggcagtacgactcccgcggccggttcggggagctgctgctcctgctgcccacgctccagagcatcacctggcagatgatcgagcagatccagttcatcaagctgttcggcatggcgaagatcgacaacctgctccaggagatgctgctgggcgggtccccgagcgacgcgccccacgcccaccaccccctccacccccacctgatgcaggagcacatgggcaccaacgtgatcgtcgccaacaccatgccgacgcacctgtccaacgggcagatgtgcgagtggccccgcccccggggccaggccgccacccccgagaccccgcagcccagcccgcccgggggctccggcagcgagccctacaagctgctccccggggccgtggccaccatcgtgaagcccctgtccgccatcccccagccgacgatcaccaagcaggaggtcatctgaggactagtccctgttcccagagcccacttttttttctttttttgaaataaaatagcctgtctttcagatctaaaaaaaaaaaaaaaaaaaaaaaaaaaaaaaaaaaaaaaaaaaaaaaaaaaaaaaaaaaaaaaaaaaaaaaaaaaaaaaaaaaaaaaaaaaaaaaaaaaa

SEQ ID NO: 4290 - RNA, 1673 nt, synthetic construct
  misc_feature 1..1673: note = mRNA a-1 (A100) (opt1) from Homo sapiens__NP_000448.3__HNF4A(1-474)(S143A)
  source 1..1673: mol_type = other RNA
aggagagtcccgcagtcggcgtccagcggctctgcttgttcgtgtgtgtgtcgttgcaggccttattcaagcttaccatgcgcctgagcaagaccctcgtggacatggacatggccgactactccgccgcgctggaccccgcctacaccacgctggagttcgagaacgtccaggtgctcaccatgggcaacgacaccagcccgtccgaggggaccaacctgaacgcccccaacagcctgggcgtgtccgccctctgcgccatctgcggggaccgggcgacgggcaagcactacggggccagctcctgcgacggctgcaagggcttcttccgccggagcgtccgcaagaaccacatgtactcctgccggttcagccgccagtgcgtggtggacaaggacaagcggaaccagtgccgctactgccggctgaagaagtgcttccgcgccgggatgaagaaggaggccgtccagaacgagcgggaccgcatctccacccggcgcagcgcgtacgaggactccagcctgccctccatcaacgccctcctgcaggccgaggtgctgagccggcagatcacctcccccgtgagcggcatcaacggggacatccgcgccaagaagatcgcctccatcgcggacgtctgcgagagcatgaaggagcagctcctggtgctggtggagtgggccaagtacatcccggccttctgcgagctccccctggacgaccaggtcgccctgctccgggcccacgcgggcgagcacctcctgctgggggccaccaagcgcagcatggtgttcaaggacgtgctgctgctcggcaacgactacatcgtcccccggcactgccccgagctggccgagatgtcccgcgtgagcatccggatcctggacgagctcgtgctgccgttccaggagctgcagatcgacgacaacgagtacgcctacctcaaggccatcatcttcttcgaccccgacgcgaagggcctgtccgaccccgggaagatcaagcgcctgcgcagccaggtccaggtgtccctcgaggactacatcaacgaccggcagtacgacagccgcggccggttcggggagctgctgctcctgctgcccacgctccagtccatcacctggcagatgatcgagcagatccagttcatcaagctgttcggcatggccaagatcgacaacctgctccaggagatgctgctgggcgggagcccgtccgacgcgccccacgcccaccaccccctccacccccacctgatgcaggagcacatgggcaccaacgtgatcgtcgccaacaccatgccgacgcacctgagcaacgggcagatgtgcgagtggccccgcccccggggccaggccgccacccccgagaccccgcagccctccccgcccgggggcagcggctccgagccctacaagctgctccccggggccgtggccaccatcgtgaagcccctgagcgcgatcccccagccgacgatcaccaagcaggaggtcatctgaggactagtccctgttcccagagcccacttttttttctttttttgaaataaaatagcctgtctttcagatctaaaaaaaaaaaaaaaaaaaaaaaaaaaaaaaaaaaaaaaaaaaaaaaaaaaaaaaaaaaaaaaaaaaaaaaaaaaaaaaaaaaaaaaaaaaaaaaaaaaa

SEQ ID NO: 4291 - RNA, 1673 nt, synthetic construct
  misc_feature 1..1673: note = mRNA a-1 (A100) (opt1) from Homo sapiens__NP_000448.3__HNF4A(1-474)(T166A)
  source 1..1673: mol_type = other RNA
aggagagtcccgcagtcggcgtccagcggctctgcttgttcgtgtgtgtgtcgttgcaggccttattcaagcttaccatgcgcctgagcaagaccctcgtggacatggacatggccgactactccgccgcgctggaccccgcctacaccacgctggagttcgagaacgtccaggtgctcaccatgggcaacgacaccagcccgtccgaggggaccaacctgaacgcccccaacagcctgggcgtgtccgccctctgcgccatctgcggggaccgggcgacgggcaagcactacggggccagctcctgcgacggctgcaagggcttcttccgccggagcgtccgcaagaaccacatgtactcctgccggttcagccgccagtgcgtggtggacaaggacaagcggaaccagtgccgctactgccggctgaagaagtgcttccgcgccgggatgaagaaggaggccgtccagaacgagcgggaccgcatctccacccggcgcagctcctacgaggacagctccctgcccagcatcaacgcgctcctgcaggccgaggtgctgtcccggcagatcgccagccccgtgtccggcatcaacggggacatccgcgccaagaagatcgccagcatcgcggacgtctgcgagagcatgaaggagcagctcctggtgctggtggagtgggccaagtacatcccggccttctgcgagctccccctggacgaccaggtcgccctgctccgggcccacgcgggcgagcacctcctgctgggggccaccaagcgctccatggtgttcaaggacgtgctgctgctcggcaacgactacatcgtcccccggcactgccccgagctggccgagatgagccgcgtgtccatccggatcctggacgagctcgtgctgccgttccaggagctgcagatcgacgacaacgagtacgcctacctcaaggccatcatcttcttcgaccccgacgcgaagggcctgagcgaccccgggaagatcaagcgcctgcgctcccaggtccaggtgagcctcgaggactacatcaacgaccggcagtacgactcccgcggccggttcggggagctgctgctcctgctgcccaccctccagagcatcacgtggcagatgatcgagcagatccagttcatcaagctgttcggcatggccaagatcgacaacctgctccaggagatgctgctgggcgggtccccgagcgacgcgccccacgcccaccaccccctccacccccacctgatgcaggagcacatgggcaccaacgtgatcgtcgccaacaccatgccgacccacctgtccaacgggcagatgtgcgagtggccccgcccccggggccaggccgccacgcccgagaccccgcagcccagcccgcccgggggctccggcagcgagccctacaagctgctccccggggccgtggccaccatcgtgaagcccctgtccgcgatcccccagccgaccatcacgaagcaggaggtcatctgaggactagtccctgttcccagagcccacttttttttctttttttgaaataaaatagcctgtctttcagatctaaaaaaaaaaaaaaaaaaaaaaaaaaaaaaaaaaaaaaaaaaaaaaaaaaaaaaaaaaaaaaaaaaaaaaaaaaaaaaaaaaaaaaaaaaaaaaaaaaaa

SEQ ID NO: 4292 - RNA, 1673 nt, synthetic construct
  misc_feature 1..1673: note = mRNA a-1 (A100) (opt1) from Homo sapiens__NP_000448.3__HNF4A(1-474)(S167E)
  source 1..1673: mol_type = other RNA
aggagagtcccgcagtcggcgtccagcggctctgcttgttcgtgtgtgtgtcgttgcaggccttattcaagcttaccatgcgcctgagcaagaccctcgtggacatggacatggccgactactccgccgcgctggaccccgcctacaccacgctggagttcgagaacgtccaggtgctcaccatgggcaacgacaccagcccgtccgaggggaccaacctgaacgcccccaacagcctgggcgtgtccgccctctgcgccatctgcggggaccgggcgacgggcaagcactacggggccagctcctgcgacggctgcaagggcttcttccgccggagcgtccgcaagaaccacatgtactcctgccggttcagccgccagtgcgtggtggacaaggacaagcggaaccagtgccgctactgccggctgaagaagtgcttccgcgccgggatgaagaaggaggccgtccagaacgagcgggaccgcatctccacccggcgcagctcctacgaggacagctccctgcccagcatcaacgcgctcctgcaggccgaggtgctgtcccggcagatcaccgagcccgtgagcggcatcaacggggacatccgcgccaagaagatcgcctccatcgccgacgtctgcgagagcatgaaggagcagctcctggtgctggtggagtgggcgaagtacatcccggccttctgcgagctccccctggacgaccaggtcgccctgctccgggcccacgccggcgagcacctcctgctgggggcgaccaagcgcagcatggtgttcaaggacgtgctgctgctcggcaacgactacatcgtcccccggcactgccccgagctggccgagatgtcccgcgtgagcatccggatcctggacgagctcgtgctgccgttccaggagctgcagatcgacgacaacgagtacgcctacctcaaggccatcatcttcttcgaccccgacgccaagggcctgtccgaccccgggaagatcaagcgcctgcgcagccaggtccaggtgtccctcgaggactacatcaacgaccggcagtacgacagccgcggccggttcggggagctgctgctcctgctgcccacgctccagtccatcacctggcagatgatcgagcagatccagttcatcaagctgttcggcatggcgaagatcgacaacctgctccaggagatgctgctgggcgggagcccgtccgacgcgccccacgcccaccaccccctccacccccacctgatgcaggagcacatgggcaccaacgtgatcgtcgccaacaccatgccgacgcacctgagcaacgggcagatgtgcgagtggccccgcccccggggccaggccgccacccccgagaccccgcagccctccccgcccgggggcagcggctccgagccctacaagctgctccccggggccgtggccaccatcgtgaagcccctgagcgccatcccccagccgacgatcaccaagcaggaggtcatctgaggactagtccctgttcccagagcccacttttttttctttttttgaaataaaatagcctgtctttcagatctaaaaaaaaaaaaaaaaaaaaaaaaaaaaaaaaaaaaaaaaaaaaaaaaaaaaaaaaaaaaaaaaaaaaaaaaaaaaaaaaaaaaaaaaaaaaaaaaaaaa

SEQ ID NO: 4293 - RNA, 1673 nt, synthetic construct
  misc_feature 1..1673: note = mRNA a-1 (A100) (opt1) from Homo sapiens__NP_000448.3__HNF4A(1-474)(S167A)
  source 1..1673: mol_type = other RNA
aggagagtcccgcagtcggcgtccagcggctctgcttgttcgtgtgtgtgtcgttgcaggccttattcaagcttaccatgcgcctgagcaagaccctcgtggacatggacatggccgactactccgccgcgctggaccccgcctacaccacgctggagttcgagaacgtccaggtgctcaccatgggcaacgacaccagcccgtccgaggggaccaacctgaacgcccccaacagcctgggcgtgtccgccctctgcgccatctgcggggaccgggcgacgggcaagcactacggggccagctcctgcgacggctgcaagggcttcttccgccggagcgtccgcaagaaccacatgtactcctgccggttcagccgccagtgcgtggtggacaaggacaagcggaaccagtgccgctactgccggctgaagaagtgcttccgcgccgggatgaagaaggaggccgtccagaacgagcgggaccgcatctccacccggcgcagctcctacgaggacagctccctgcccagcatcaacgcgctcctgcaggccgaggtgctgtcccggcagatcaccgcccccgtgagcggcatcaacggggacatccgcgccaagaagatcgcctccatcgcggacgtctgcgagagcatgaaggagcagctcctggtgctggtggagtgggccaagtacatcccggccttctgcgagctccccctggacgaccaggtcgccctgctccgggcccacgcgggcgagcacctcctgctgggggccaccaagcgcagcatggtgttcaaggacgtgctgctgctcggcaacgactacatcgtcccccggcactgccccgagctggccgagatgtcccgcgtgagcatccggatcctggacgagctcgtgctgccgttccaggagctgcagatcgacgacaacgagtacgcctacctcaaggccatcatcttcttcgaccccgacgcgaagggcctgtccgaccccgggaagatcaagcgcctgcgcagccaggtccaggtgtccctcgaggactacatcaacgaccggcagtacgacagccgcggccggttcggggagctgctgctcctgctgcccacgctccagtccatcacctggcagatgatcgagcagatccagttcatcaagctgttcggcatggccaagatcgacaacctgctccaggagatgctgctgggcgggagcccgtccgacgcgccccacgcccaccaccccctccacccccacctgatgcaggagcacatgggcaccaacgtgatcgtcgccaacaccatgccgacgcacctgagcaacgggcagatgtgcgagtggccccgcccccggggccaggccgccacccccgagaccccgcagccctccccgcccgggggcagcggctccgagccctacaagctgctccccggggccgtggccaccatcgtgaagcccctgagcgcgatcccccagccgacgatcaccaagcaggaggtcatctgaggactagtccctgttcccagagcccacttttttttctttttttgaaataaaatagcctgtctttcagatctaaaaaaaaaaaaaaaaaaaaaaaaaaaaaaaaaaaaaaaaaaaaaaaaaaaaaaaaaaaaaaaaaaaaaaaaaaaaaaaaaaaaaaaaaaaaaaaaaaaa

SEQ ID NO: 4294 - RNA, 1673 nt, synthetic construct
  misc_feature 1..1673: note = mRNA a-1 (A100) (opt1) from Homo sapiens__NP_000448.3__HNF4A(1-474)(S167A_S378A_T429A_T432A_ S436A)
  source 1..1673: mol_type = other RNA
aggagagtcccgcagtcggcgtccagcggctctgcttgttcgtgtgtgtgtcgttgcaggccttattcaagcttaccatgcgcctgagcaagaccctcgtggacatggacatggccgactactccgccgcgctggaccccgcctacaccacgctggagttcgagaacgtccaggtgctcaccatgggcaacgacaccagcccgtccgaggggaccaacctgaacgcccccaacagcctgggcgtgtccgccctctgcgccatctgcggggaccgggcgacgggcaagcactacggggccagctcctgcgacggctgcaagggcttcttccgccggagcgtccgcaagaaccacatgtactcctgccggttcagccgccagtgcgtggtggacaaggacaagcggaaccagtgccgctactgccggctgaagaagtgcttccgcgccgggatgaagaaggaggccgtccagaacgagcgggaccgcatctccacccggcgcagctcctacgaggacagctccctgcccagcatcaacgcgctcctgcaggccgaggtgctgtcccggcagatcaccgcccccgtgagcggcatcaacggggacatccgcgccaagaagatcgcctccatcgcggacgtctgcgagagcatgaaggagcagctcctggtgctggtggagtgggccaagtacatcccggccttctgcgagctccccctggacgaccaggtcgccctgctccgggcccacgcgggcgagcacctcctgctgggggccaccaagcgcagcatggtgttcaaggacgtgctgctgctcggcaacgactacatcgtcccccggcactgccccgagctggccgagatgtcccgcgtgagcatccggatcctggacgagctcgtgctgccgttccaggagctgcagatcgacgacaacgagtacgcctacctcaaggccatcatcttcttcgaccccgacgcgaagggcctgtccgaccccgggaagatcaagcgcctgcgcagccaggtccaggtgtccctcgaggactacatcaacgaccggcagtacgacagccgcggccggttcggggagctgctgctcctgctgcccacgctccagtccatcacctggcagatgatcgagcagatccagttcatcaagctgttcggcatggccaagatcgacaacctgctccaggagatgctgctgggcggggccccgagcgacgcgccccacgcccaccaccccctccacccccacctgatgcaggagcacatgggcaccaacgtgatcgtcgccaacaccatgccgacgcacctgtccaacgggcagatgtgcgagtggccccgcccccggggccaggccgccgcccccgaggcgccgcagcccgccccgcccgggggcagcggctccgagccctacaagctgctccccggggccgtggccaccatcgtgaagcccctgagcgccatcccccagccgaccatcaccaagcaggaggtcatctgaggactagtccctgttcccagagcccacttttttttctttttttgaaataaaatagcctgtctttcagatctaaaaaaaaaaaaaaaaaaaaaaaaaaaaaaaaaaaaaaaaaaaaaaaaaaaaaaaaaaaaaaaaaaaaaaaaaaaaaaaaaaaaaaaaaaaaaaaaaaaa

SEQ ID NO: 4295 - RNA, 1673 nt, synthetic construct
  misc_feature 1..1673: note = mRNA a-1 (A100) (opt1) from Homo sapiens__NP_000448.3__HNF4A(1-474)(S167E_S378E_T429E_T432E_ S436E)
  source 1..1673: mol_type = other RNA
aggagagtcccgcagtcggcgtccagcggctctgcttgttcgtgtgtgtgtcgttgcaggccttattcaagcttaccatgcgcctgagcaagaccctcgtggacatggacatggccgactactccgccgcgctggaccccgcctacaccacgctggagttcgagaacgtccaggtgctcaccatgggcaacgacaccagcccgtccgaggggaccaacctgaacgcccccaacagcctgggcgtgtccgccctctgcgccatctgcggggaccgggcgacgggcaagcactacggggccagctcctgcgacggctgcaagggcttcttccgccggagcgtccgcaagaaccacatgtactcctgccggttcagccgccagtgcgtggtggacaaggacaagcggaaccagtgccgctactgccggctgaagaagtgcttccgcgccgggatgaagaaggaggccgtccagaacgagcgggaccgcatctccacccggcgcagctcctacgaggacagctccctgcccagcatcaacgcgctcctgcaggccgaggtgctgtcccggcagatcaccgagcccgtgagcggcatcaacggggacatccgcgccaagaagatcgcctccatcgccgacgtctgcgagagcatgaaggagcagctcctggtgctggtggagtgggcgaagtacatcccggccttctgcgagctccccctggacgaccaggtcgccctgctccgggcccacgccggcgagcacctcctgctgggggcgaccaagcgcagcatggtgttcaaggacgtgctgctgctcggcaacgactacatcgtcccccggcactgccccgagctggccgagatgtcccgcgtgagcatccggatcctggacgagctcgtgctgccgttccaggagctgcagatcgacgacaacgagtacgcctacctcaaggccatcatcttcttcgaccccgacgccaagggcctgtccgaccccgggaagatcaagcgcctgcgcagccaggtccaggtgtccctcgaggactacatcaacgaccggcagtacgacagccgcggccggttcggggagctgctgctcctgctgcccacgctccagtccatcacctggcagatgatcgagcagatccagttcatcaagctgttcggcatggcgaagatcgacaacctgctccaggagatgctgctgggcggggagccgagcgacgcgccccacgcccaccaccccctccacccccacctgatgcaggagcacatgggcaccaacgtgatcgtcgccaacaccatgccgacgcacctgtccaacgggcagatgtgcgagtggccccgcccccggggccaggccgccgagcccgaggagccgcagcccgagccgcccgggggcagcggctccgagccctacaagctgctccccggggccgtggccaccatcgtgaagcccctgagcgccatcccccagccgaccatcaccaagcaggaggtcatctgaggactagtccctgttcccagagcccacttttttttctttttttgaaataaaatagcctgtctttcagatctaaaaaaaaaaaaaaaaaaaaaaaaaaaaaaaaaaaaaaaaaaaaaaaaaaaaaaaaaaaaaaaaaaaaaaaaaaaaaaaaaaaaaaaaaaaaaaaaaaaa

SEQ ID NO: 4296 - RNA, 1673 nt, synthetic construct
  misc_feature 1..1673: note = mRNA a-1 (A100) (opt1) from Homo sapiens__NP_000448.3__HNF4A(1-474)(S87A)
  source 1..1673: mol_type = other RNA
aggagagtcccgcagtcggcgtccagcggctctgcttgttcgtgtgtgtgtcgttgcaggccttattcaagcttaccatgcgcctgagcaagaccctcgtggacatggacatggccgactactccgccgcgctggaccccgcctacaccacgctggagttcgagaacgtccaggtgctcaccatgggcaacgacaccagcccgtccgaggggaccaacctgaacgcccccaacagcctgggcgtgtccgccctctgcgccatctgcggggaccgggcgacgggcaagcactacggggccagctcctgcgacggctgcaagggcttcttccgccgggccgtccgcaagaaccacatgtacagctgccggttctcccgccagtgcgtggtggacaaggacaagcggaaccagtgccgctactgccggctgaagaagtgcttccgcgccgggatgaagaaggaggcggtccagaacgagcgggaccgcatcagcacccggcgctccagctacgaggactccagcctgccctccatcaacgccctcctgcaggccgaggtgctgagccggcagatcacctcccccgtgagcggcatcaacggggacatccgcgccaagaagatcgcctccatcgcggacgtctgcgagagcatgaaggagcagctcctggtgctggtggagtgggccaagtacatcccggccttctgcgagctccccctggacgaccaggtcgccctgctccgggcccacgcgggcgagcacctcctgctgggggccaccaagcgcagcatggtgttcaaggacgtgctgctgctcggcaacgactacatcgtcccccggcactgccccgagctggccgagatgtcccgcgtgagcatccggatcctggacgagctcgtgctgccgttccaggagctgcagatcgacgacaacgagtacgcctacctcaaggccatcatcttcttcgaccccgacgcgaagggcctgtccgaccccgggaagatcaagcgcctgcgcagccaggtccaggtgtccctcgaggactacatcaacgaccggcagtacgacagccgcggccggttcggggagctgctgctcctgctgcccacgctccagtccatcacctggcagatgatcgagcagatccagttcatcaagctgttcggcatggccaagatcgacaacctgctccaggagatgctgctgggcgggagcccgtccgacgcgccccacgcccaccaccccctccacccccacctgatgcaggagcacatgggcaccaacgtgatcgtcgccaacaccatgccgacgcacctgagcaacgggcagatgtgcgagtggccccgcccccggggccaggccgccacccccgagaccccgcagccctccccgcccgggggcagcggctccgagccctacaagctgctccccggggccgtggccaccatcgtgaagcccctgagcgcgatcccccagccgacgatcaccaagcaggaggtcatctgaggactagtccctgttcccagagcccacttttttttctttttttgaaataaaatagcctgtctttcagatctaaaaaaaaaaaaaaaaaaaaaaaaaaaaaaaaaaaaaaaaaaaaaaaaaaaaaaaaaaaaaaaaaaaaaaaaaaaaaaaaaaaaaaaaaaaaaaaaaaaa

SEQ ID NO: 4297 - RNA, 1673 nt, synthetic construct
  misc_feature 1..1673: note = mRNA a-1 (A100) (opt1) from Homo sapiens__NP_000448.3__HNF4A(1-474)(S87E)
  source 1..1673: mol_type = other RNA
aggagagtcccgcagtcggcgtccagcggctctgcttgttcgtgtgtgtgtcgttgcaggccttattcaagcttaccatgcgcctgagcaagaccctcgtggacatggacatggccgactactccgccgcgctggaccccgcctacaccacgctggagttcgagaacgtccaggtgctcaccatgggcaacgacaccagcccgtccgaggggaccaacctgaacgcccccaacagcctgggcgtgtccgccctctgcgccatctgcggggaccgggcgacgggcaagcactacggggccagctcctgcgacggctgcaagggcttcttccgccgggaggtccgcaagaaccacatgtacagctgccggttctcccgccagtgcgtggtggacaaggacaagcggaaccagtgccgctactgccggctgaagaagtgcttccgcgccgggatgaagaaggaggccgtccagaacgagcgggaccgcatcagcacccggcgctccagctacgaggactccagcctgccctccatcaacgcgctcctgcaggccgaggtgctgagccggcagatcacctcccccgtgagcggcatcaacggggacatccgcgccaagaagatcgcctccatcgccgacgtctgcgagagcatgaaggagcagctcctggtgctggtggagtgggcgaagtacatcccggccttctgcgagctccccctggacgaccaggtcgccctgctccgggcccacgccggcgagcacctcctgctgggggcgaccaagcgcagcatggtgttcaaggacgtgctgctgctcggcaacgactacatcgtcccccggcactgccccgagctggccgagatgtcccgcgtgagcatccggatcctggacgagctcgtgctgccgttccaggagctgcagatcgacgacaacgagtacgcctacctcaaggccatcatcttcttcgaccccgacgccaagggcctgtccgaccccgggaagatcaagcgcctgcgcagccaggtccaggtgtccctcgaggactacatcaacgaccggcagtacgacagccgcggccggttcggggagctgctgctcctgctgcccacgctccagtccatcacctggcagatgatcgagcagatccagttcatcaagctgttcggcatggcgaagatcgacaacctgctccaggagatgctgctgggcgggagcccgtccgacgcgccccacgcccaccaccccctccacccccacctgatgcaggagcacatgggcaccaacgtgatcgtcgccaacaccatgccgacgcacctgagcaacgggcagatgtgcgagtggccccgcccccggggccaggccgccacccccgagaccccgcagccctccccgcccgggggcagcggctccgagccctacaagctgctccccggggccgtggccaccatcgtgaagcccctgagcgccatcccccagccgacgatcaccaagcaggaggtcatctgaggactagtccctgttcccagagcccacttttttttctttttttgaaataaaatagcctgtctttcagatctaaaaaaaaaaaaaaaaaaaaaaaaaaaaaaaaaaaaaaaaaaaaaaaaaaaaaaaaaaaaaaaaaaaaaaaaaaaaaaaaaaaaaaaaaaaaaaaaaaaa

SEQ ID NO: 4298 - RNA, 1673 nt, synthetic construct
  misc_feature 1..1673: note = mRNA a-1 (A100) (opt1) from Homo sapiens__NP_000448.3__HNF4A(1-474)(R2V)
  source 1..1673: mol_type = other RNA
aggagagtcccgcagtcggcgtccagcggctctgcttgttcgtgtgtgtgtcgttgcaggccttattcaagcttaccatggtgctgagcaagaccctcgtcgacatggacatggccgactactccgccgcgctggaccccgcctacaccacgctggagttcgagaacgtccaggtgctcaccatgggcaacgacaccagcccgtccgaggggaccaacctgaacgcccccaacagcctgggcgtgtccgccctctgcgccatctgcggggaccgcgcgacgggcaagcactacggggccagctcctgcgacggctgcaagggcttcttccggcgcagcgtgcggaagaaccacatgtactcctgccgcttcagccggcagtgcgtggtcgacaaggacaagcgcaaccagtgccggtactgccgcctgaagaagtgcttccgggccgggatgaagaaggaggccgtgcagaacgagcgcgaccggatctccacccgccggagctcctacgaggacagctccctgcccagcatcaacgcgctcctgcaggccgaggtgctgtcccgccagatcaccagccccgtctccggcatcaacggggacatccgggccaagaagatcgccagcatcgccgacgtgtgcgagagcatgaaggagcagctcctggtgctggtcgagtgggcgaagtacatcccggccttctgcgagctccccctggacgaccaggtggccctgctccgcgcccacgccggcgagcacctcctgctgggggcgaccaagcggtccatggtgttcaaggacgtcctgctgctcggcaacgactacatcgtgccccgccactgccccgagctggccgagatgagccgggtgtccatccgcatcctggacgagctcgtcctgccgttccaggagctgcagatcgacgacaacgagtacgcctacctcaaggccatcatcttcttcgaccccgacgccaagggcctgagcgaccccgggaagatcaagcggctgcgctcccaggtccaggtgagcctcgaggactacatcaacgaccgccagtacgactcccggggccgcttcggggagctgctgctcctgctgcccacgctccagagcatcacctggcagatgatcgagcagatccagttcatcaagctgttcggcatggcgaagatcgacaacctgctccaggagatgctgctgggcgggtccccgagcgacgcgccccacgcccaccaccccctccacccccacctgatgcaggagcacatgggcaccaacgtgatcgtggccaacaccatgccgacgcacctgtccaacgggcagatgtgcgagtggccccggccccgcggccaggccgccacccccgagaccccgcagcccagcccgcccgggggctccggcagcgagccctacaagctgctccccggggccgtggccaccatcgtcaagcccctgtccgccatcccccagccgacgatcaccaagcaggaggtgatctgaggactagtccctgttcccagagcccacttttttttctttttttgaaataaaatagcctgtctttcagatctaaaaaaaaaaaaaaaaaaaaaaaaaaaaaaaaaaaaaaaaaaaaaaaaaaaaaaaaaaaaaaaaaaaaaaaaaaaaaaaaaaaaaaaaaaaaaaaaaaaa

SEQ ID NO: 4299 - RNA, 1673 nt, synthetic construct
  misc_feature 1..1673: note = mRNA a-1 (A100) (opt1) from Homo sapiens__NP_000448.3__HNF4A(1-474)(R2V_K5V)
  source 1..1673: mol_type = other RNA
aggagagtcccgcagtcggcgtccagcggctctgcttgttcgtgtgtgtgtcgttgcaggccttattcaagcttaccatggtgctgagcgtcaccctcgtggacatggacatggccgactactccgccgcgctggaccccgcctacaccacgctggagttcgagaacgtgcaggtcctcaccatgggcaacgacaccagcccgtccgaggggaccaacctgaacgcccccaacagcctgggcgtgtccgccctctgcgccatctgcggggaccgcgcgacgggcaagcactacggggccagctcctgcgacggctgcaagggcttcttccggcgcagcgtgcggaagaaccacatgtactcctgccgcttcagccggcagtgcgtcgtggacaaggacaagcgcaaccagtgccggtactgccgcctgaagaagtgcttccgggccgggatgaagaaggaggccgtgcagaacgagcgcgaccggatctccacccgccggagctcctacgaggacagctccctgcccagcatcaacgcgctcctgcaggccgaggtcctgtcccgccagatcaccagccccgtgtccggcatcaacggggacatccgggccaagaagatcgccagcatcgccgacgtgtgcgagagcatgaaggagcagctcctggtcctggtggagtgggcgaagtacatcccggccttctgcgagctccccctggacgaccaggtggccctgctccgcgcccacgccggcgagcacctcctgctgggggcgaccaagcggtccatggtcttcaaggacgtgctgctgctcggcaacgactacatcgtgccccgccactgccccgagctggccgagatgagccgggtctccatccgcatcctggacgagctcgtgctgccgttccaggagctgcagatcgacgacaacgagtacgcctacctcaaggccatcatcttcttcgaccccgacgccaagggcctgagcgaccccgggaagatcaagcggctgcgctcccaggtgcaggtcagcctcgaggactacatcaacgaccgccagtacgactcccggggccgcttcggggagctgctgctcctgctgcccacgctccagagcatcacctggcagatgatcgagcagatccagttcatcaagctgttcggcatggcgaagatcgacaacctgctccaggagatgctgctgggcgggtccccgagcgacgcgccccacgcccaccaccccctccacccccacctgatgcaggagcacatgggcaccaacgtgatcgtggccaacaccatgccgacgcacctgtccaacgggcagatgtgcgagtggccccggccccgcggccaggccgccacccccgagaccccgcagcccagcccgcccgggggctccggcagcgagccctacaagctgctccccggggccgtcgccaccatcgtgaagcccctgtccgccatcccccagccgacgatcaccaagcaggaggtcatctgaggactagtccctgttcccagagcccacttttttttctttttttgaaataaaatagcctgtctttcagatctaaaaaaaaaaaaaaaaaaaaaaaaaaaaaaaaaaaaaaaaaaaaaaaaaaaaaaaaaaaaaaaaaaaaaaaaaaaaaaaaaaaaaaaaaaaaaaaaaaaa

SEQ ID NO: 4300 - RNA, 1673 nt, synthetic construct
  misc_feature 1..1673: note = mRNA a-1 (A100) (opt1) from Homo sapiens__NP_000448.3__HNF4A(1-474)(K179R_K180R)
  source 1..1673: mol_type = other RNA
aggagagtcccgcagtcggcgtccagcggctctgcttgttcgtgtgtgtgtcgttgcaggccttattcaagcttaccatgcgcctgagcaagaccctcgtggacatggacatggccgactactccgccgcgctggaccccgcctacaccacgctggagttcgagaacgtccaggtgctcaccatgggcaacgacaccagcccgtccgaggggaccaacctgaacgcccccaacagcctgggcgtgtccgccctctgcgccatctgcggggaccgggcgacgggcaagcactacggggccagctcctgcgacggctgcaagggcttcttccgccggagcgtccgcaagaaccacatgtactcctgccggttcagccgccagtgcgtggtggacaaggacaagcggaaccagtgccgctactgccggctgaagaagtgcttccgcgccgggatgaagaaggaggccgtccagaacgagcgggaccgcatctccacccggcgcagctcctacgaggacagctccctgcccagcatcaacgcgctcctgcaggccgaggtgctgtcccggcagatcaccagccccgtgtccggcatcaacggggacatccgcgcccggcgcatcgccagcatcgccgacgtctgcgagagcatgaaggagcagctcctggtgctggtggagtgggcgaagtacatcccggccttctgcgagctccccctggacgaccaggtcgccctgctccgggcccacgccggcgagcacctcctgctgggggcgaccaagcgctccatggtgttcaaggacgtgctgctgctcggcaacgactacatcgtcccccggcactgccccgagctggccgagatgagccgcgtgtccatccgcatcctggacgagctcgtgctgccgttccaggagctgcagatcgacgacaacgagtacgcctacctcaaggccatcatcttcttcgaccccgacgccaagggcctgagcgaccccgggaagatcaagcggctgcgctcccaggtccaggtgagcctcgaggactacatcaacgaccggcagtacgactcccgcggccggttcggggagctgctgctcctgctgcccacgctccagagcatcacctggcagatgatcgagcagatccagttcatcaagctgttcggcatggcgaagatcgacaacctgctccaggagatgctgctgggcgggtccccgagcgacgcgccccacgcccaccaccccctccacccccacctgatgcaggagcacatgggcaccaacgtgatcgtcgccaacaccatgccgacgcacctgtccaacgggcagatgtgcgagtggccccgcccccggggccaggccgccacccccgagaccccgcagcccagcccgcccgggggctccggcagcgagccctacaagctgctccccggggccgtggccaccatcgtgaagcccctgtccgccatcccccagccgacgatcaccaagcaggaggtcatctgaggactagtccctgttcccagagcccacttttttttctttttttgaaataaaatagcctgtctttcagatctaaaaaaaaaaaaaaaaaaaaaaaaaaaaaaaaaaaaaaaaaaaaaaaaaaaaaaaaaaaaaaaaaaaaaaaaaaaaaaaaaaaaaaaaaaaaaaaaaaaa

SEQ ID NO: 4301 - RNA, 1673 nt, synthetic construct
  misc_feature 1..1673: note = mRNA a-1 (A100) (opt1) from Homo sapiens__NP_000448.3__HNF4A(1-474)(K234R)
  source 1..1673: mol_type = other RNA
aggagagtcccgcagtcggcgtccagcggctctgcttgttcgtgtgtgtgtcgttgcaggccttattcaagcttaccatgcgcctgagcaagaccctcgtggacatggacatggccgactactccgccgcgctggaccccgcctacaccacgctggagttcgagaacgtccaggtgctcaccatgggcaacgacaccagcccgtccgaggggaccaacctgaacgcccccaacagcctgggcgtgtccgccctctgcgccatctgcggggaccgggcgacgggcaagcactacggggccagctcctgcgacggctgcaagggcttcttccgccggagcgtccgcaagaaccacatgtactcctgccggttcagccgccagtgcgtggtggacaaggacaagcggaaccagtgccgctactgccggctgaagaagtgcttccgcgccgggatgaagaaggaggccgtccagaacgagcgggaccgcatctccacccggcgcagctcctacgaggacagctccctgcccagcatcaacgcgctcctgcaggccgaggtgctgtcccggcagatcaccagccccgtgtccggcatcaacggggacatccgcgccaagaagatcgccagcatcgccgacgtctgcgagagcatgaaggagcagctcctggtgctggtggagtgggcgaagtacatcccggccttctgcgagctccccctggacgaccaggtcgccctgctccgggcccacgccggcgagcacctcctgctgggggcgacccgccggtccatggtgttcaaggacgtgctgctgctcggcaacgactacatcgtcccccgccactgccccgagctggccgagatgagccgggtgtccatccgcatcctggacgagctcgtgctgccgttccaggagctgcagatcgacgacaacgagtacgcctacctcaaggccatcatcttcttcgaccccgacgccaagggcctgagcgaccccgggaagatcaagcgcctgcggtcccaggtccaggtgagcctcgaggactacatcaacgaccgccagtacgactcccggggccgcttcggggagctgctgctcctgctgcccacgctccagagcatcacctggcagatgatcgagcagatccagttcatcaagctgttcggcatggcgaagatcgacaacctgctccaggagatgctgctgggcgggtccccgagcgacgcgccccacgcccaccaccccctccacccccacctgatgcaggagcacatgggcaccaacgtgatcgtcgccaacaccatgccgacgcacctgtccaacgggcagatgtgcgagtggccccggccccgcggccaggccgccacccccgagaccccgcagcccagcccgcccgggggctccggcagcgagccctacaagctgctccccggggccgtggccaccatcgtgaagcccctgtccgccatcccccagccgacgatcaccaagcaggaggtcatctgaggactagtccctgttcccagagcccacttttttttctttttttgaaataaaatagcctgtctttcagatctaaaaaaaaaaaaaaaaaaaaaaaaaaaaaaaaaaaaaaaaaaaaaaaaaaaaaaaaaaaaaaaaaaaaaaaaaaaaaaaaaaaaaaaaaaaaaaaaaaaa

SEQ ID NO: 4302 - RNA, 1673 nt, synthetic construct
  misc_feature 1..1673: note = mRNA a-1 (A100) (opt1) from Homo sapiens__NP_000448.3__HNF4A(1-474)(K300R)
  source 1..1673: mol_type = other RNA
aggagagtcccgcagtcggcgtccagcggctctgcttgttcgtgtgtgtgtcgttgcaggccttattcaagcttaccatgcgcctgagcaagaccctcgtggacatggacatggccgactactccgccgcgctggaccccgcctacaccacgctggagttcgagaacgtccaggtgctcaccatgggcaacgacaccagcccgtccgaggggaccaacctgaacgcccccaacagcctgggcgtgtccgccctctgcgccatctgcggggaccgggcgacgggcaagcactacggggccagctcctgcgacggctgcaagggcttcttccgccggagcgtccgcaagaaccacatgtactcctgccggttcagccgccagtgcgtggtggacaaggacaagcggaaccagtgccgctactgccggctgaagaagtgcttccgcgccgggatgaagaaggaggccgtccagaacgagcgggaccgcatctccacccggcgcagctcctacgaggacagctccctgcccagcatcaacgcgctcctgcaggccgaggtgctgtcccggcagatcaccagccccgtgtccggcatcaacggggacatccgcgccaagaagatcgccagcatcgccgacgtctgcgagagcatgaaggagcagctcctggtgctggtggagtgggcgaagtacatcccggccttctgcgagctccccctggacgaccaggtcgccctgctccgggcccacgccggcgagcacctcctgctgggggcgaccaagcgctccatggtgttcaaggacgtgctgctgctcggcaacgactacatcgtcccccggcactgccccgagctggccgagatgagccgcgtgtccatccggatcctggacgagctcgtgctgccgttccaggagctgcagatcgacgacaacgagtacgcctacctcaaggccatcatcttcttcgaccccgacgcccgcggcctgagcgaccccgggaagatcaagcgcctgcggtcccaggtccaggtgagcctcgaggactacatcaacgaccgccagtacgactcccggggccgcttcggggagctgctgctcctgctgcccacgctccagagcatcacctggcagatgatcgagcagatccagttcatcaagctgttcggcatggcgaagatcgacaacctgctccaggagatgctgctgggcgggtccccgagcgacgcgccccacgcccaccaccccctccacccccacctgatgcaggagcacatgggcaccaacgtgatcgtcgccaacaccatgccgacgcacctgtccaacgggcagatgtgcgagtggccccggccccgcggccaggccgccacccccgagaccccgcagcccagcccgcccgggggctccggcagcgagccctacaagctgctccccggggccgtggccaccatcgtgaagcccctgtccgccatcccccagccgacgatcaccaagcaggaggtcatctgaggactagtccctgttcccagagcccacttttttttctttttttgaaataaaatagcctgtctttcagatctaaaaaaaaaaaaaaaaaaaaaaaaaaaaaaaaaaaaaaaaaaaaaaaaaaaaaaaaaaaaaaaaaaaaaaaaaaaaaaaaaaaaaaaaaaaaaaaaaaaa

SEQ ID NO: 4303 - RNA, 1673 nt, synthetic construct
  misc_feature 1..1673: note = mRNA a-1 (A100) (opt1) from Homo sapiens__NP_000448.3__HNF4A(1-474)(K300R_K307R_K309R)
  source 1..1673: mol_type = other RNA
aggagagtcccgcagtcggcgtccagcggctctgcttgttcgtgtgtgtgtcgttgcaggccttattcaagcttaccatgcgcctgagcaagaccctcgtggacatggacatggccgactactccgccgcgctggaccccgcctacaccacgctggagttcgagaacgtccaggtgctcaccatgggcaacgacaccagcccgtccgaggggaccaacctgaacgcccccaacagcctgggcgtgtccgccctctgcgccatctgcggggaccgggcgacgggcaagcactacggggccagctcctgcgacggctgcaagggcttcttccgccggagcgtccgcaagaaccacatgtactcctgccggttcagccgccagtgcgtggtggacaaggacaagcggaaccagtgccgctactgccggctgaagaagtgcttccgcgccgggatgaagaaggaggccgtccagaacgagcgggaccgcatctccacccggcgcagctcctacgaggacagctccctgcccagcatcaacgcgctcctgcaggccgaggtgctgtcccggcagatcaccagccccgtgtccggcatcaacggggacatccgcgccaagaagatcgccagcatcgccgacgtctgcgagagcatgaaggagcagctcctggtgctggtggagtgggcgaagtacatcccggccttctgcgagctccccctggacgaccaggtcgccctgctccgggcccacgccggcgagcacctcctgctgggggcgaccaagcgctccatggtgttcaaggacgtgctgctgctcggcaacgactacatcgtcccccggcactgccccgagctggccgagatgagccgcgtgtccatccggatcctggacgagctcgtgctgccgttccaggagctgcagatcgacgacaacgagtacgcctacctcaaggccatcatcttcttcgaccccgacgcccgcggcctgagcgaccccgggcgcatccggcgcctgcggtcccaggtccaggtgagcctcgaggactacatcaacgaccgccagtacgactcccggggccgcttcggggagctgctgctcctgctgcccacgctccagagcatcacctggcagatgatcgagcagatccagttcatcaagctgttcggcatggcgaagatcgacaacctgctccaggagatgctgctgggcgggtccccgagcgacgcgccccacgcccaccaccccctccacccccacctgatgcaggagcacatgggcaccaacgtgatcgtcgccaacaccatgccgacgcacctgtccaacgggcagatgtgcgagtggccccggccccgcggccaggccgccacccccgagaccccgcagcccagcccgcccgggggctccggcagcgagccctacaagctgctccccggggccgtggccaccatcgtgaagcccctgtccgccatcccccagccgacgatcaccaagcaggaggtcatctgaggactagtccctgttcccagagcccacttttttttctttttttgaaataaaatagcctgtctttcagatctaaaaaaaaaaaaaaaaaaaaaaaaaaaaaaaaaaaaaaaaaaaaaaaaaaaaaaaaaaaaaaaaaaaaaaaaaaaaaaaaaaaaaaaaaaaaaaaaaaaa

SEQ ID NO: 4304 - RNA, 1673 nt, synthetic construct
  misc_feature 1..1673: note = mRNA a-1 (A100) (opt1) from Homo sapiens__NP_000448.3__HNF4A(1-474)(K447R_K470R)
  source 1..1673: mol_type = other RNA
aggagagtcccgcagtcggcgtccagcggctctgcttgttcgtgtgtgtgtcgttgcaggccttattcaagcttaccatgcgcctgagcaagaccctcgtggacatggacatggccgactactccgccgcgctggaccccgcctacaccacgctggagttcgagaacgtccaggtgctcaccatgggcaacgacaccagcccgtccgaggggaccaacctgaacgcccccaacagcctgggcgtgtccgccctctgcgccatctgcggggaccgggcgacgggcaagcactacggggccagctcctgcgacggctgcaagggcttcttccgccggagcgtccgcaagaaccacatgtactcctgccggttcagccgccagtgcgtggtggacaaggacaagcggaaccagtgccgctactgccggctgaagaagtgcttccgcgccgggatgaagaaggaggccgtccagaacgagcgggaccgcatctccacccggcgcagctcctacgaggacagctccctgcccagcatcaacgcgctcctgcaggccgaggtgctgtcccggcagatcaccagccccgtgtccggcatcaacggggacatccgcgccaagaagatcgccagcatcgccgacgtctgcgagagcatgaaggagcagctcctggtgctggtggagtgggcgaagtacatcccggccttctgcgagctccccctggacgaccaggtcgccctgctccgggcccacgccggcgagcacctcctgctgggggcgaccaagcgctccatggtgttcaaggacgtgctgctgctcggcaacgactacatcgtcccccggcactgccccgagctggccgagatgagccgcgtgtccatccggatcctggacgagctcgtgctgccgttccaggagctgcagatcgacgacaacgagtacgcctacctcaaggccatcatcttcttcgaccccgacgccaagggcctgagcgaccccgggaagatcaagcgcctgcgctcccaggtccaggtgagcctcgaggactacatcaacgaccggcagtacgactcccgcggccggttcggggagctgctgctcctgctgcccacgctccagagcatcacctggcagatgatcgagcagatccagttcatcaagctgttcggcatggcgaagatcgacaacctgctccaggagatgctgctgggcgggtccccgagcgacgcgccccacgcccaccaccccctccacccccacctgatgcaggagcacatgggcaccaacgtgatcgtcgccaacaccatgccgacgcacctgtccaacgggcagatgtgcgagtggccccgcccccggggccaggccgccacccccgagaccccgcagcccagcccgcccgggggctccggcagcgagccctaccgcctgctccccggggccgtggccaccatcgtgaagcccctgtccgccatcccccagccgacgatcacccggcaggaggtcatctgaggactagtccctgttcccagagcccacttttttttctttttttgaaataaaatagcctgtctttcagatctaaaaaaaaaaaaaaaaaaaaaaaaaaaaaaaaaaaaaaaaaaaaaaaaaaaaaaaaaaaaaaaaaaaaaaaaaaaaaaaaaaaaaaaaaaaaaaaaaaaa

SEQ ID NO: 4305 - RNA, 1673 nt, synthetic construct
  misc_feature 1..1673: note = mRNA a-1 (A100) (opt1) from Homo sapiens__NP_000448.3__HNF4A(1-474)(K458R)
  source 1..1673: mol_type = other RNA
aggagagtcccgcagtcggcgtccagcggctctgcttgttcgtgtgtgtgtcgttgcaggccttattcaagcttaccatgcgcctgagcaagaccctcgtggacatggacatggccgactactccgccgcgctggaccccgcctacaccacgctggagttcgagaacgtccaggtgctcaccatgggcaacgacaccagcccgtccgaggggaccaacctgaacgcccccaacagcctgggcgtgtccgccctctgcgccatctgcggggaccgggcgacgggcaagcactacggggccagctcctgcgacggctgcaagggcttcttccgccggagcgtccgcaagaaccacatgtactcctgccggttcagccgccagtgcgtggtggacaaggacaagcggaaccagtgccgctactgccggctgaagaagtgcttccgcgccgggatgaagaaggaggccgtccagaacgagcgggaccgcatctccacccggcgcagctcctacgaggacagctccctgcccagcatcaacgcgctcctgcaggccgaggtgctgtcccggcagatcaccagccccgtgtccggcatcaacggggacatccgcgccaagaagatcgccagcatcgccgacgtctgcgagagcatgaaggagcagctcctggtgctggtggagtgggcgaagtacatcccggccttctgcgagctccccctggacgaccaggtcgccctgctccgggcccacgccggcgagcacctcctgctgggggcgaccaagcgctccatggtgttcaaggacgtgctgctgctcggcaacgactacatcgtcccccggcactgccccgagctggccgagatgagccgcgtgtccatccggatcctggacgagctcgtgctgccgttccaggagctgcagatcgacgacaacgagtacgcctacctcaaggccatcatcttcttcgaccccgacgccaagggcctgagcgaccccgggaagatcaagcgcctgcgctcccaggtccaggtgagcctcgaggactacatcaacgaccggcagtacgactcccgcggccggttcggggagctgctgctcctgctgcccacgctccagagcatcacctggcagatgatcgagcagatccagttcatcaagctgttcggcatggcgaagatcgacaacctgctccaggagatgctgctgggcgggtccccgagcgacgcgccccacgcccaccaccccctccacccccacctgatgcaggagcacatgggcaccaacgtgatcgtcgccaacaccatgccgacgcacctgtccaacgggcagatgtgcgagtggccccgcccccggggccaggccgccacccccgagaccccgcagcccagcccgcccgggggctccggcagcgagccctacaagctgctccccggggccgtggccaccatcgtgcgccccctgtccgccatcccccagccgacgatcaccaagcaggaggtcatctgaggactagtccctgttcccagagcccacttttttttctttttttgaaataaaatagcctgtctttcagatctaaaaaaaaaaaaaaaaaaaaaaaaaaaaaaaaaaaaaaaaaaaaaaaaaaaaaaaaaaaaaaaaaaaaaaaaaaaaaaaaaaaaaaaaaaaaaaaaaaaa

SEQ ID NO: 4306 - RNA, 1673 nt, synthetic construct
  misc_feature 1..1673: note = mRNA a-1 (A100) (opt1) from Homo sapiens__NP_000448.3__HNF4A(1-474)(K106R_K108R_K126R_K127R)
  source 1..1673: mol_type = other RNA
aggagagtcccgcagtcggcgtccagcggctctgcttgttcgtgtgtgtgtcgttgcaggccttattcaagcttaccatgcgcctgagcaagaccctcgtggacatggacatggccgactactccgccgcgctggaccccgcctacaccacgctggagttcgagaacgtccaggtgctcaccatgggcaacgacaccagcccgtccgaggggaccaacctgaacgcccccaacagcctgggcgtgtccgccctctgcgccatctgcggggaccgggcgacgggcaagcactacggggccagctcctgcgacggctgcaagggcttcttccgccggagcgtccgcaagaaccacatgtactcctgccggttcagccgccagtgcgtggtggaccgggaccgccggaaccagtgccgctactgccggctgaagaagtgcttccgcgccgggatgcggcgcgaggccgtccagaacgagcgggaccgcatctccacccggcgcagctcctacgaggacagctccctgcccagcatcaacgcgctcctgcaggccgaggtgctgtcccggcagatcaccagccccgtgtccggcatcaacggggacatccgcgccaagaagatcgccagcatcgccgacgtctgcgagagcatgaaggagcagctcctggtgctggtggagtgggcgaagtacatcccggccttctgcgagctccccctggacgaccaggtcgccctgctccgggcccacgccggcgagcacctcctgctgggggcgaccaagcgctccatggtgttcaaggacgtgctgctgctcggcaacgactacatcgtcccccgccactgccccgagctggccgagatgagccgggtgtccatccgcatcctggacgagctcgtgctgccgttccaggagctgcagatcgacgacaacgagtacgcctacctcaaggccatcatcttcttcgaccccgacgccaagggcctgagcgaccccgggaagatcaagcggctgcgctcccaggtccaggtgagcctcgaggactacatcaacgaccggcagtacgactcccgcggccggttcggggagctgctgctcctgctgcccacgctccagagcatcacctggcagatgatcgagcagatccagttcatcaagctgttcggcatggcgaagatcgacaacctgctccaggagatgctgctgggcgggtccccgagcgacgcgccccacgcccaccaccccctccacccccacctgatgcaggagcacatgggcaccaacgtgatcgtcgccaacaccatgccgacgcacctgtccaacgggcagatgtgcgagtggccccgcccccggggccaggccgccacccccgagaccccgcagcccagcccgcccgggggctccggcagcgagccctacaagctgctccccggggccgtggccaccatcgtgaagcccctgtccgccatcccccagccgacgatcaccaagcaggaggtcatctgaggactagtccctgttcccagagcccacttttttttctttttttgaaataaaatagcctgtctttcagatctaaaaaaaaaaaaaaaaaaaaaaaaaaaaaaaaaaaaaaaaaaaaaaaaaaaaaaaaaaaaaaaaaaaaaaaaaaaaaaaaaaaaaaaaaaaaaaaaaaaa

SEQ ID NO: 4307 - RNA, 1673 nt, synthetic construct; identical to SEQ ID NO: 4258
  misc_feature 1..1673: note = mRNA a-1 (A100) (opt1) from Homo sapiens__NP_000448.3__HNF4A(1-474)(E285Q)
  source 1..1673: mol_type = other RNA

SEQ ID NO: 4308 - RNA, 1673 nt, synthetic construct
  misc_feature 1..1673: note = mRNA a-1 (A100) (opt1) from Homo sapiens__NP_000448.3__HNF4A(1-474)(T166E)
  source 1..1673: mol_type = other RNA
aggagagtcccgcagtcggcgtccagcggctctgcttgttcgtgtgtgtgtcgttgcaggccttattcaagcttaccatgcgcctgagcaagaccctcgtggacatggacatggccgactactccgccgcgctggaccccgcctacaccacgctggagttcgagaacgtccaggtgctcaccatgggcaacgacaccagcccgtccgaggggaccaacctgaacgcccccaacagcctgggcgtgtccgccctctgcgccatctgcggggaccgggcgacgggcaagcactacggggccagctcctgcgacggctgcaagggcttcttccgccggagcgtccgcaagaaccacatgtactcctgccggttcagccgccagtgcgtggtggacaaggacaagcggaaccagtgccgctactgccggctgaagaagtgcttccgcgccgggatgaagaaggaggccgtccagaacgagcgggaccgcatctccacccggcgcagctcctacgaggacagctccctgcccagcatcaacgcgctcctgcaggccgaggtgctgtcccggcagatcgagagccccgtgtccggcatcaacggggacatccgcgccaagaagatcgccagcatcgccgacgtctgcgagagcatgaaggagcagctcctggtgctggtggagtgggcgaagtacatcccggccttctgcgagctccccctggacgaccaggtcgccctgctccgggcccacgccggcgagcacctcctgctgggggcgaccaagcgctccatggtgttcaaggacgtgctgctgctcggcaacgactacatcgtcccccggcactgccccgagctggccgagatgagccgcgtgtccatccggatcctggacgagctcgtgctgccgttccaggagctgcagatcgacgacaacgagtacgcctacctcaaggccatcatcttcttcgaccccgacgccaagggcctgagcgaccccgggaagatcaagcgcctgcgctcccaggtccaggtgagcctcgaggactacatcaacgaccggcagtacgactcccgcggccggttcggggagctgctgctcctgctgcccaccctccagagcatcacgtggcagatgatcgagcagatccagttcatcaagctgttcggcatggcgaagatcgacaacctgctccaggagatgctgctgggcgggtccccgagcgacgcgccccacgcccaccaccccctccacccccacctgatgcaggagcacatgggcaccaacgtgatcgtcgccaacaccatgccgacccacctgtccaacgggcagatgtgcgagtggccccgcccccggggccaggccgccacgcccgagaccccgcagcccagcccgcccgggggctccggcagcgagccctacaagctgctccccggggccgtggccaccatcgtgaagcccctgtccgccatcccccagccgaccatcacgaagcaggaggtcatctgaggactagtccctgttcccagagcccacttttttttctttttttgaaataaaatagcctgtctttcagatctaaaaaaaaaaaaaaaaaaaaaaaaaaaaaaaaaaaaaaaaaaaaaaaaaaaaaaaaaaaaaaaaaaaaaaaaaaaaaaaaaaaaaaaaaaaaaaaaaaaa

SEQ ID NO: 4309 - RNA, 1673 nt, synthetic construct
  misc_feature 1..1673: note = mRNA a-1 (A100) (opt1) from Homo sapiens__NP_000448.3__HNF4A(1-474)(S148A)
  source 1..1673: mol_type = other RNA
aggagagtcccgcagtcggcgtccagcggctctgcttgttcgtgtgtgtgtcgttgcaggccttattcaagcttaccatgcgcctgagcaagaccctcgtggacatggacatggccgactactccgccgcgctggaccccgcctacaccacgctggagttcgagaacgtccaggtgctcaccatgggcaacgacaccagcccgtccgaggggaccaacctgaacgcccccaacagcctgggcgtgtccgccctctgcgccatctgcggggaccgggcgacgggcaagcactacggggccagctcctgcgacggctgcaagggcttcttccgccggagcgtccgcaagaaccacatgtactcctgccggttcagccgccagtgcgtggtggacaaggacaagcggaaccagtgccgctactgccggctgaagaagtgcttccgcgccgggatgaagaaggaggccgtccagaacgagcgggaccgcatctccacccggcgcagctcctacgaggacagcgcgctgccctccatcaacgccctcctgcaggccgaggtgctgagccggcagatcacctcccccgtgagcggcatcaacggggacatccgcgccaagaagatcgcctccatcgcggacgtctgcgagagcatgaaggagcagctcctggtgctggtggagtgggccaagtacatcccggccttctgcgagctccccctggacgaccaggtcgccctgctccgggcccacgcgggcgagcacctcctgctgggggccaccaagcgcagcatggtgttcaaggacgtgctgctgctcggcaacgactacatcgtcccccggcactgccccgagctggccgagatgtcccgcgtgagcatccggatcctggacgagctcgtgctgccgttccaggagctgcagatcgacgacaacgagtacgcctacctcaaggccatcatcttcttcgaccccgacgcgaagggcctgtccgaccccgggaagatcaagcgcctgcgcagccaggtccaggtgtccctcgaggactacatcaacgaccggcagtacgacagccgcggccggttcggggagctgctgctcctgctgcccacgctccagtccatcacctggcagatgatcgagcagatccagttcatcaagctgttcggcatggccaagatcgacaacctgctccaggagatgctgctgggcgggagcccgtccgacgcgccccacgcccaccaccccctccacccccacctgatgcaggagcacatgggcaccaacgtgatcgtcgccaacaccatgccgacgcacctgagcaacgggcagatgtgcgagtggccccgcccccggggccaggccgccacccccgagaccccgcagccctccccgcccgggggcagcggctccgagccctacaagctgctccccggggccgtggccaccatcgtgaagcccctgagcgcgatcccccagccgacgatcaccaagcaggaggtcatctgaggactagtccctgttcccagagcccacttttttttctttttttgaaataaaatagcctgtctttcagatctaaaaaaaaaaaaaaaaaaaaaaaaaaaaaaaaaaaaaaaaaaaaaaaaaaaaaaaaaaaaaaaaaaaaaaaaaaaaaaaaaaaaaaaaaaaaaaaaaaaa

SEQ ID NO: 4310 - RNA, 1673 nt, synthetic construct
  misc_feature 1..1673: note = mRNA a-1 (A100) (opt1) from Homo sapiens__NP_000448.3__HNF4A(1-474)(S148E)
  source 1..1673: mol_type = other RNA
aggagagtcccgcagtcggcgtccagcggctctgcttgttcgtgtgtgtgtcgttgcaggccttattcaagcttaccatgcgcctgagcaagaccctcgtggacatggacatggccgactactccgccgcgctggaccccgcctacaccacgctggagttcgagaacgtccaggtgctcaccatgggcaacgacaccagcccgtccgaggggaccaacctgaacgcccccaacagcctgggcgtgtccgccctctgcgccatctgcggggaccgggcgacgggcaagcactacggggccagctcctgcgacggctgcaagggcttcttccgccggagcgtccgcaagaaccacatgtactcctgccggttcagccgccagtgcgtggtggacaaggacaagcggaaccagtgccgctactgccggctgaagaagtgcttccgcgccgggatgaagaaggaggccgtccagaacgagcgggaccgcatctccacccggcgcagctcctacgaggacagcgagctgccctccatcaacgcgctcctgcaggccgaggtgctgagccggcagatcacctcccccgtgagcggcatcaacggggacatccgcgccaagaagatcgcctccatcgccgacgtctgcgagagcatgaaggagcagctcctggtgctggtggagtgggcgaagtacatcccggccttctgcgagctccccctggacgaccaggtcgccctgctccgggcccacgccggcgagcacctcctgctgggggcgaccaagcgcagcatggtgttcaaggacgtgctgctgctcggcaacgactacatcgtcccccggcactgccccgagctggccgagatgtcccgcgtgagcatccggatcctggacgagctcgtgctgccgttccaggagctgcagatcgacgacaacgagtacgcctacctcaaggccatcatcttcttcgaccccgacgccaagggcctgtccgaccccgggaagatcaagcgcctgcgcagccaggtccaggtgtccctcgaggactacatcaacgaccggcagtacgacagccgcggccggttcggggagctgctgctcctgctgcccacgctccagtccatcacctggcagatgatcgagcagatccagttcatcaagctgttcggcatggcgaagatcgacaacctgctccaggagatgctgctgggcgggagcccgtccgacgcgccccacgcccaccaccccctccacccccacctgatgcaggagcacatgggcaccaacgtgatcgtcgccaacaccatgccgacgcacctgagcaacgggcagatgtgcgagtggccccgcccccggggccaggccgccacccccgagaccccgcagccctccccgcccgggggcagcggctccgagccctacaagctgctccccggggccgtggccaccatcgtgaagcccctgagcgccatcccccagccgacgatcaccaagcaggaggtcatctgaggactagtccctgttcccagagcccacttttttttctttttttgaaataaaatagcctgtctttcagatctaaaaaaaaaaaaaaaaaaaaaaaaaaaaaaaaaaaaaaaaaaaaaaaaaaaaaaaaaaaaaaaaaaaaaaaaaaaaaaaaaaaaaaaaaaaaaaaaaaaa

SEQ ID NO: 4311 - RNA, 1673 nt, synthetic construct
  misc_feature 1..1673: note = mRNA a-1 (A100) (opt1) from Homo sapiens__NP_000448.3__HNF4A(1-474)(S183A)
  source 1..1673: mol_type = other RNA
aggagagtcccgcagtcggcgtccagcggctctgcttgttcgtgtgtgtgtcgttgcaggccttattcaagcttaccatgcgcctgagcaagaccctcgtggacatggacatggccgactactccgccgcgctggaccccgcctacaccacgctggagttcgagaacgtccaggtgctcaccatgggcaacgacaccagcccgtccgaggggaccaacctgaacgcccccaacagcctgggcgtgtccgccctctgcgccatctgcggggaccgggcgacgggcaagcactacggggccagctcctgcgacggctgcaagggcttcttccgccggagcgtccgcaagaaccacatgtactcctgccggttcagccgccagtgcgtggtggacaaggacaagcggaaccagtgccgctactgccggctgaagaagtgcttccgcgccgggatgaagaaggaggccgtccagaacgagcgggaccgcatctccacccggcgcagctcctacgaggacagctccctgcccagcatcaacgcgctcctgcaggccgaggtgctgtcccggcagatcaccagccccgtgtccggcatcaacggggacatccgcgccaagaagatcgccgccatcgcggacgtctgcgagagcatgaaggagcagctcctggtgctggtggagtgggccaagtacatcccggccttctgcgagctccccctggacgaccaggtcgccctgctccgggcccacgcgggcgagcacctcctgctgggggccaccaagcgcagcatggtgttcaaggacgtgctgctgctcggcaacgactacatcgtcccccggcactgccccgagctggccgagatgtcccgcgtgagcatccggatcctggacgagctcgtgctgccgttccaggagctgcagatcgacgacaacgagtacgcctacctcaaggccatcatcttcttcgaccccgacgcgaagggcctgtccgaccccgggaagatcaagcgcctgcgcagccaggtccaggtgtccctcgaggactacatcaacgaccggcagtacgacagccgcggccggttcggggagctgctgctcctgctgcccacgctccagtccatcacctggcagatgatcgagcagatccagttcatcaagctgttcggcatggccaagatcgacaacctgctccaggagatgctgctgggcgggagcccgtccgacgcgccccacgcccaccaccccctccacccccacctgatgcaggagcacatgggcaccaacgtgatcgtcgccaacaccatgccgacgcacctgagcaacgggcagatgtgcgagtggccccgcccccggggccaggccgccacccccgagaccccgcagccctccccgcccgggggcagcggctccgagccctacaagctgctccccggggccgtggccaccatcgtgaagcccctgagcgcgatcccccagccgacgatcaccaagcaggaggtcatctgaggactagtccctgttcccagagcccacttttttttctttttttgaaataaaatagcctgtctttcagatctaaaaaaaaaaaaaaaaaaaaaaaaaaaaaaaaaaaaaaaaaaaaaaaaaaaaaaaaaaaaaaaaaaaaaaaaaaaaaaaaaaaaaaaaaaaaaaaaaaaa

SEQ ID NO: 4312 - RNA, 1673 nt, synthetic construct
  misc_feature 1..1673: note = mRNA a-1 (A100) (opt1) from Homo sapiens__NP_000448.3__HNF4A(1-474)(S183E)
  source 1..1673: mol_type = other RNA
aggagagtcccgcagtcggcgtccagcggctctgcttgttcgtgtgtgtgtcgttgcaggccttattcaagcttaccatgcgcctgagcaagaccctcgtggacatggacatggccgactactccgccgcgctggaccccgcctacaccacgctggagttcgagaacgtccaggtgctcaccatgggcaacgacaccagcccgtccgaggggaccaacctgaacgcccccaacagcctgggcgtgtccgccctctgcgccatctgcggggaccgggcgacgggcaagcactacggggccagctcctgcgacggctgcaagggcttcttccgccggagcgtccgcaagaaccacatgtactcctgccggttcagccgccagtgcgtggtggacaaggacaagcggaaccagtgccgctactgccggctgaagaagtgcttccgcgccgggatgaagaaggaggccgtccagaacgagcgggaccgcatctccacccggcgcagctcctacgaggacagctccctgcccagcatcaacgcgctcctgcaggccgaggtgctgtcccggcagatcaccagccccgtgtccggcatcaacggggacatccgcgccaagaagatcgccgagatcgccgacgtctgcgagagcatgaaggagcagctcctggtgctggtggagtgggcgaagtacatcccggccttctgcgagctccccctggacgaccaggtcgccctgctccgggcccacgccggcgagcacctcctgctgggggcgaccaagcgcagcatggtgttcaaggacgtgctgctgctcggcaacgactacatcgtcccccggcactgccccgagctggccgagatgtcccgcgtgagcatccggatcctggacgagctcgtgctgccgttccaggagctgcagatcgacgacaacgagtacgcctacctcaaggccatcatcttcttcgaccccgacgccaagggcctgtccgaccccgggaagatcaagcgcctgcgcagccaggtccaggtgtccctcgaggactacatcaacgaccggcagtacgacagccgcggccggttcggggagctgctgctcctgctgcccacgctccagtccatcacctggcagatgatcgagcagatccagttcatcaagctgttcggcatggcgaagatcgacaacctgctccaggagatgctgctgggcgggagcccgtccgacgcgccccacgcccaccaccccctccacccccacctgatgcaggagcacatgggcaccaacgtgatcgtcgccaacaccatgccgacgcacctgagcaacgggcagatgtgcgagtggccccgcccccggggccaggccgccacccccgagaccccgcagccctccccgcccgggggcagcggctccgagccctacaagctgctccccggggccgtggccaccatcgtgaagcccctgagcgccatcccccagccgacgatcaccaagcaggaggtcatctgaggactagtccctgttcccagagcccacttttttttctttttttgaaataaaatagcctgtctttcagatctaaaaaaaaaaaaaaaaaaaaaaaaaaaaaaaaaaaaaaaaaaaaaaaaaaaaaaaaaaaaaaaaaaaaaaaaaaaaaaaaaaaaaaaaaaaaaaaaaaaa

SEQ ID NO: 4313 - RNA, 1673 nt, synthetic construct
  misc_feature 1..1673: note = mRNA a-1 (A100) (opt1) from Homo sapiens__NP_000448.3__HNF4A(1-474)(S461A)
  source 1..1673: mol_type = other RNA
aggagagtcccgcagtcggcgtccagcggctctgcttgttcgtgtgtgtgtcgttgcaggccttattcaagcttaccatgcgcctgagcaagaccctcgtggacatggacatggccgactactccgccgcgctggaccccgcctacaccacgctggagttcgagaacgtccaggtgctcaccatgggcaacgacaccagcccgtccgaggggaccaacctgaacgcccccaacagcctgggcgtgtccgccctctgcgccatctgcggggaccgggcgacgggcaagcactacggggccagctcctgcgacggctgcaagggcttcttccgccggagcgtccgcaagaaccacatgtactcctgccggttcagccgccagtgcgtggtggacaaggacaagcggaaccagtgccgctactgccggctgaagaagtgcttccgcgccgggatgaagaaggaggccgtccagaacgagcgggaccgcatctccacccggcgcagctcctacgaggacagctccctgcccagcatcaacgcgctcctgcaggccgaggtgctgtcccggcagatcaccagccccgtgtccggcatcaacggggacatccgcgccaagaagatcgccagcatcgccgacgtctgcgagagcatgaaggagcagctcctggtgctggtggagtgggcgaagtacatcccggccttctgcgagctccccctggacgaccaggtcgccctgctccgggcccacgccggcgagcacctcctgctgggggcgaccaagcgctccatggtgttcaaggacgtgctgctgctcggcaacgactacatcgtcccccggcactgccccgagctggccgagatgagccgcgtgtccatccggatcctggacgagctcgtgctgccgttccaggagctgcagatcgacgacaacgagtacgcctacctcaaggccatcatcttcttcgaccccgacgccaagggcctgagcgaccccgggaagatcaagcgcctgcgctcccaggtccaggtgagcctcgaggactacatcaacgaccggcagtacgactcccgcggccggttcggggagctgctgctcctgctgcccacgctccagagcatcacctggcagatgatcgagcagatccagttcatcaagctgttcggcatggcgaagatcgacaacctgctccaggagatgctgctgggcgggtccccgagcgacgcgccccacgcccaccaccccctccacccccacctgatgcaggagcacatgggcaccaacgtgatcgtcgccaacaccatgccgacgcacctgtccaacgggcagatgtgcgagtggccccgcccccggggccaggccgccacccccgagaccccgcagcccagcccgcccgggggctccggcagcgagccctacaagctgctccccggggccgtggccaccatcgtgaagcccctggccgcgatcccccagccgacgatcaccaagcaggaggtcatctgaggactagtccctgttcccagagcccacttttttttctttttttgaaataaaatagcctgtctttcagatctaaaaaaaaaaaaaaaaaaaaaaaaaaaaaaaaaaaaaaaaaaaaaaaaaaaaaaaaaaaaaaaaaaaaaaaaaaaaaaaaaaaaaaaaaaaaaaaaaaaa

SEQ ID NO: 4314 - RNA, 1673 nt, synthetic construct; identical to SEQ ID NO: 4265
  misc_feature 1..1673: note = mRNA a-1 (A100) (opt1) from Homo sapiens__NP_000448.3__HNF4A(1-474)(S461E)
  source 1..1673: mol_type = other RNA

SEQ ID NO: 4315 - RNA, 1673 nt, synthetic construct
  misc_feature 1..1673: note = mRNA a-1 (A100) (opt1) from Homo sapiens__NP_000448.3__HNF4A(1-474)(S142A_S143A_S313A)
  source 1..1673: mol_type = other RNA
aggagagtcccgcagtcggcgtccagcggctctgcttgttcgtgtgtgtgtcgttgcaggccttattcaagcttaccatgcgcctgagcaagaccctcgtggacatggacatggccgactactccgccgcgctggaccccgcctacaccacgctggagttcgagaacgtccaggtgctcaccatgggcaacgacaccagcccgtccgaggggaccaacctgaacgcccccaacagcctgggcgtgtccgccctctgcgccatctgcggggaccgggcgacgggcaagcactacggggccagctcctgcgacggctgcaagggcttcttccgccggagcgtccgcaagaaccacatgtactcctgccggttcagccgccagtgcgtggtggacaaggacaagcggaaccagtgccgctactgccggctgaagaagtgcttccgcgccgggatgaagaaggaggccgtccagaacgagcgggaccgcatctccacccggcgcgcggcctacgaggacagctccctgcccagcatcaacgccctcctgcaggccgaggtgctgtcccggcagatcaccagccccgtgtccggcatcaacggggacatccgcgccaagaagatcgcgagcatcgccgacgtctgcgagtccatgaaggagcagctcctggtgctggtggagtgggccaagtacatcccggccttctgcgagctccccctggacgaccaggtcgccctgctccgggcgcacgccggcgagcacctcctgctgggggccaccaagcgcagcatggtgttcaaggacgtgctgctgctcggcaacgactacatcgtcccccggcactgccccgagctggccgagatgagccgcgtgtccatccggatcctggacgagctcgtgctgccgttccaggagctgcagatcgacgacaacgagtacgcctacctcaaggcgatcatcttcttcgaccccgacgccaagggcctgagcgaccccgggaagatcaagcgcctgcgcgcccaggtccaggtgtccctcgaggactacatcaacgaccggcagtacgacagccgcggccggttcggggagctgctgctcctgctgcccacgctccagtccatcacctggcagatgatcgagcagatccagttcatcaagctgttcggcatggccaagatcgacaacctgctccaggagatgctgctgggcgggagcccgtccgacgcgccccacgcccaccaccccctccacccccacctgatgcaggagcacatgggcaccaacgtgatcgtcgccaacaccatgccgacgcacctgagcaacgggcagatgtgcgagtggccccgcccccggggccaggccgccacccccgagaccccgcagccctccccgcccgggggcagcggctccgagccctacaagctgctccccggggcggtggccaccatcgtgaagcccctgagcgccatcccccagccgacgatcaccaagcaggaggtcatctgaggactagtccctgttcccagagcccacttttttttctttttttgaaataaaatagcctgtctttcagatctaaaaaaaaaaaaaaaaaaaaaaaaaaaaaaaaaaaaaaaaaaaaaaaaaaaaaaaaaaaaaaaaaaaaaaaaaaaaaaaaaaaaaaaaaaaaaaaaaaaa

SEQ ID NO: 4316 - RNA, 1673 nt, synthetic construct
  misc_feature 1..1673: note = mRNA a-1 (A100) (opt1) from Homo sapiens__NP_000448.3__HNF4A(1-474)(S142A_S143A_S313A_K458R)
  source 1..1673: mol_type = other RNA
aggagagtcccgcagtcggcgtccagcggctctgcttgttcgtgtgtgtgtcgttgcaggccttattcaagcttaccatgcgcctgagcaagaccctcgtggacatggacatggccgactactccgccgcgctggaccccgcctacaccacgctggagttcgagaacgtccaggtgctcaccatgggcaacgacaccagcccgtccgaggggaccaacctgaacgcccccaacagcctgggcgtgtccgccctctgcgccatctgcggggaccgggcgacgggcaagcactacggggccagctcctgcgacggctgcaagggcttcttccgccggagcgtccgcaagaaccacatgtactcctgccggttcagccgccagtgcgtggtggacaaggacaagcggaaccagtgccgctactgccggctgaagaagtgcttccgcgccgggatgaagaaggaggccgtccagaacgagcgggaccgcatctccacccggcgcgcggcctacgaggacagctccctgcccagcatcaacgccctcctgcaggccgaggtgctgtcccggcagatcaccagccccgtgtccggcatcaacggggacatccgcgccaagaagatcgcgagcatcgccgacgtctgcgagtccatgaaggagcagctcctggtgctggtggagtgggccaagtacatcccggccttctgcgagctccccctggacgaccaggtcgccctgctccgggcgcacgccggcgagcacctcctgctgggggccaccaagcgcagcatggtgttcaaggacgtgctgctgctcggcaacgactacatcgtcccccggcactgccccgagctggccgagatgagccgcgtgtccatccggatcctggacgagctcgtgctgccgttccaggagctgcagatcgacgacaacgagtacgcctacctcaaggcgatcatcttcttcgaccccgacgccaagggcctgagcgaccccgggaagatcaagcgcctgcgcgcccaggtccaggtgtccctcgaggactacatcaacgaccggcagtacgacagccgcggccggttcggggagctgctgctcctgctgcccacgctccagtccatcacctggcagatgatcgagcagatccagttcatcaagctgttcggcatggccaagatcgacaacctgctccaggagatgctgctgggcgggagcccgtccgacgcgccccacgcccaccaccccctccacccccacctgatgcaggagcacatgggcaccaacgtgatcgtcgccaacaccatgccgacgcacctgagcaacgggcagatgtgcgagtggccccgcccccggggccaggccgccacccccgagaccccgcagccctccccgcccgggggcagcggctccgagccctacaagctgctccccggggcggtggccaccatcgtgcgccccctgagcgccatcccccagccgacgatcaccaagcaggaggtcatctgaggactagtccctgttcccagagcccacttttttttctttttttgaaataaaatagcctgtctttcagatctaaaaaaaaaaaaaaaaaaaaaaaaaaaaaaaaaaaaaaaaaaaaaaaaaaaaaaaaaaaaaaaaaaaaaaaaaaaaaaaaaaaaaaaaaaaaaaaaaaaa

SEQ ID NO: 4317 - RNA, 1673 nt, synthetic construct
  misc_feature 1..1673: note = mRNA a-1 (A100) (opt1) from Homo sapiens__NP_000448.3__HNF4A(1-474)(S142A_S143A_S167A_S313A_ S378A_T429A_T432A_S436A_K458R)
  source 1..1673: mol_type = other RNA
aggagagtcccgcagtcggcgtccagcggctctgcttgttcgtgtgtgtgtcgttgcaggccttattcaagcttaccatgcgcctgagcaagaccctcgtggacatggacatggccgactactccgccgcgctggaccccgcctacaccacgctggagttcgagaacgtccaggtgctcaccatgggcaacgacaccagcccgtccgaggggaccaacctgaacgcccccaacagcctgggcgtgtccgccctctgcgccatctgcggggaccgggcgacgggcaagcactacggggccagctcctgcgacggctgcaagggcttcttccgccggagcgtccgcaagaaccacatgtactcctgccggttcagccgccagtgcgtggtggacaaggacaagcggaaccagtgccgctactgccggctgaagaagtgcttccgcgccgggatgaagaaggaggccgtccagaacgagcgggaccgcatctccacccggcgcgcggcctacgaggacagctccctgcccagcatcaacgccctcctgcaggccgaggtgctgtcccggcagatcaccgcccccgtgagcggcatcaacggggacatccgcgcgaagaagatcgcctccatcgccgacgtctgcgagagcatgaaggagcagctcctggtgctggtggagtgggccaagtacatcccggccttctgcgagctccccctggacgaccaggtcgcgctgctccgggcccacgccggcgagcacctcctgctgggggccaccaagcgctccatggtgttcaaggacgtgctgctgctcggcaacgactacatcgtcccccggcactgccccgagctggccgagatgagccgcgtgagcatccggatcctggacgagctcgtgctgccgttccaggagctgcagatcgacgacaacgagtacgcgtacctcaaggccatcatcttcttcgaccccgacgccaagggcctgtccgaccccgggaagatcaagcgcctgcgcgcccaggtccaggtgagcctcgaggactacatcaacgaccggcagtacgactcccgcggccggttcggggagctgctgctcctgctgcccacgctccagagcatcacctggcagatgatcgagcagatccagttcatcaagctgttcggcatggccaagatcgacaacctgctccaggagatgctgctgggcggggcgccgtccgacgcgccccacgcccaccaccccctccacccccacctgatgcaggagcacatgggcaccaacgtgatcgtcgccaacaccatgccgacgcacctgagcaacgggcagatgtgcgagtggccccgcccccggggccaggccgccgcccccgaggccccgcagcccgccccgcccgggggctccggcagcgagccctacaagctgctccccggggcggtggccaccatcgtgcgccccctgtccgccatcccccagccgaccatcaccaagcaggaggtcatctgaggactagtccctgttcccagagcccacttttttttctttttttgaaataaaatagcctgtctttcagatctaaaaaaaaaaaaaaaaaaaaaaaaaaaaaaaaaaaaaaaaaaaaaaaaaaaaaaaaaaaaaaaaaaaaaaaaaaaaaaaaaaaaaaaaaaaaaaaaaaaa

SEQ ID NO: 4318 - RNA, 1673 nt, synthetic construct
  misc_feature 1..1673: note = mRNA a-1 (A100) (opt1) from Homo sapiens__NP_000448.3__HNF4A(1-474)(S142A_S143A_S148A_S167A_ S313A_S378A_T429A_T432A_S436A_K458R)
  source 1..1673: mol_type = other RNA
aggagagtcccgcagtcggcgtccagcggctctgcttgttcgtgtgtgtgtcgttgcaggccttattcaagcttaccatgcgcctgagcaagaccctcgtggacatggacatggccgactactccgccgcgctggaccccgcctacaccacgctggagttcgagaacgtccaggtgctcaccatgggcaacgacaccagcccgtccgaggggaccaacctgaacgcccccaacagcctgggcgtgtccgccctctgcgccatctgcggggaccgggcgacgggcaagcactacggggccagctcctgcgacggctgcaagggcttcttccgccggagcgtccgcaagaaccacatgtactcctgccggttcagccgccagtgcgtggtggacaaggacaagcggaaccagtgccgctactgccggctgaagaagtgcttccgcgccgggatgaagaaggaggccgtccagaacgagcgggaccgcatctccacccggcgcgcggcctacgaggacagcgccctgccctccatcaacgccctcctgcaggccgaggtgctgagccggcagatcaccgcgcccgtgtccggcatcaacggggacatccgcgccaagaagatcgccagcatcgccgacgtctgcgagtccatgaaggagcagctcctggtgctggtggagtgggccaagtacatcccggcgttctgcgagctccccctggacgaccaggtcgccctgctccgggcccacgccggcgagcacctcctgctgggggccaccaagcgcagcatggtgttcaaggacgtgctgctgctcggcaacgactacatcgtcccccggcactgccccgagctggcggagatgtcccgcgtgagcatccggatcctggacgagctcgtgctgccgttccaggagctgcagatcgacgacaacgagtacgcctacctcaaggccatcatcttcttcgaccccgacgccaagggcctgagcgaccccgggaagatcaagcgcctgcgcgcccaggtccaggtgtccctcgaggactacatcaacgaccggcagtacgacagccgcggccggttcggggagctgctgctcctgctgcccacgctccagtccatcacctggcagatgatcgagcagatccagttcatcaagctgttcggcatggcgaagatcgacaacctgctccaggagatgctgctgggcggggccccgagcgacgcgccccacgcccaccaccccctccacccccacctgatgcaggagcacatgggcaccaacgtgatcgtcgccaacaccatgccgacgcacctgtccaacgggcagatgtgcgagtggccccgcccccggggccaggccgccgcccccgaggccccgcagcccgcgccgcccgggggcagcggctccgagccctacaagctgctccccggggccgtggccaccatcgtgcgccccctgagcgccatcccccagccgaccatcaccaagcaggaggtcatctgaggactagtccctgttcccagagcccacttttttttctttttttgaaataaaatagcctgtctttcagatctaaaaaaaaaaaaaaaaaaaaaaaaaaaaaaaaaaaaaaaaaaaaaaaaaaaaaaaaaaaaaaaaaaaaaaaaaaaaaaaaaaaaaaaaaaaaaaaaaaaa

SEQ ID NO: 4319 - RNA, 1673 nt, synthetic construct
  misc_feature 1..1673: note = mRNA a-1 (A100) (opt1) from Homo sapiens__NP_000448.3__HNF4A(1-474)(K106R_K108R_K126R_K127R_ S142A_S143A_S148A_S167A_S313A_S378A_T429A_T432A_S436A_K458R )
  source 1..1673: mol_type = other RNA
aggagagtcccgcagtcggcgtccagcggctctgcttgttcgtgtgtgtgtcgttgcaggccttattcaagcttaccatgcgcctgagcaagaccctcgtggacatggacatggccgactactccgccgcgctggaccccgcctacaccacgctggagttcgagaacgtccaggtgctcaccatgggcaacgacaccagcccgtccgaggggaccaacctgaacgcccccaacagcctgggcgtgtccgccctctgcgccatctgcggggaccgggcgacgggcaagcactacggggccagctcctgcgacggctgcaagggcttcttccgccggagcgtccgcaagaaccacatgtactcctgccggttcagccgccagtgcgtggtggaccgggaccgccggaaccagtgccgctactgccggctgaagaagtgcttccgcgccgggatgcggcgcgaggccgtccagaacgagcgggaccgcatctccacccggcgcgcggcctacgaggacagcgccctgccctccatcaacgccctcctgcaggccgaggtgctgagccggcagatcaccgcgcccgtgtccggcatcaacggggacatccgcgccaagaagatcgccagcatcgccgacgtctgcgagtccatgaaggagcagctcctggtgctggtggagtgggccaagtacatcccggcgttctgcgagctccccctggacgaccaggtcgccctgctccgggcccacgccggcgagcacctcctgctgggggccaccaagcgcagcatggtgttcaaggacgtgctgctgctcggcaacgactacatcgtcccccgccactgccccgagctggcggagatgtcccgggtgagcatccgcatcctggacgagctcgtgctgccgttccaggagctgcagatcgacgacaacgagtacgcctacctcaaggccatcatcttcttcgaccccgacgccaagggcctgagcgaccccgggaagatcaagcggctgcgcgcccaggtccaggtgtccctcgaggactacatcaacgaccggcagtacgacagccgcggccggttcggggagctgctgctcctgctgcccacgctccagtccatcacctggcagatgatcgagcagatccagttcatcaagctgttcggcatggcgaagatcgacaacctgctccaggagatgctgctgggcggggccccgagcgacgcgccccacgcccaccaccccctccacccccacctgatgcaggagcacatgggcaccaacgtgatcgtcgccaacaccatgccgacgcacctgtccaacgggcagatgtgcgagtggccccgcccccggggccaggccgccgcccccgaggccccgcagcccgcgccgcccgggggcagcggctccgagccctacaagctgctccccggggccgtggccaccatcgtgcgccccctgagcgccatcccccagccgaccatcaccaagcaggaggtcatctgaggactagtccctgttcccagagcccacttttttttctttttttgaaataaaatagcctgtctttcagatctaaaaaaaaaaaaaaaaaaaaaaaaaaaaaaaaaaaaaaaaaaaaaaaaaaaaaaaaaaaaaaaaaaaaaaaaaaaaaaaaaaaaaaaaaaaaaaaaaaaa

SEQ ID NO: 4320 - RNA, 1673 nt, synthetic construct
  misc_feature 1..1673: note = mRNA a-1 (A100) (opt1) from Homo sapiens__NP_000448.3__HNF4A(1-474)(S142A_S143A_S148A_T166A_ S167A_S313A_S378A_T429A_T432A_S436A_K458R)
  source 1..1673: mol_type = other RNA
aggagagtcccgcagtcggcgtccagcggctctgcttgttcgtgtgtgtgtcgttgcaggccttattcaagcttaccatgcgcctgagcaagaccctcgtggacatggacatggccgactactccgccgcgctggaccccgcctacaccacgctggagttcgagaacgtccaggtgctcaccatgggcaacgacaccagcccgtccgaggggaccaacctgaacgcccccaacagcctgggcgtgtccgccctctgcgccatctgcggggaccgggcgacgggcaagcactacggggccagctcctgcgacggctgcaagggcttcttccgccggagcgtccgcaagaaccacatgtactcctgccggttcagccgccagtgcgtggtggacaaggacaagcggaaccagtgccgctactgccggctgaagaagtgcttccgcgccgggatgaagaaggaggccgtccagaacgagcgggaccgcatctccacccggcgcgcggcctacgaggacagcgccctgccctccatcaacgccctcctgcaggccgaggtgctgagccggcagatcgcggcccccgtgtccggcatcaacggggacatccgcgccaagaagatcgccagcatcgccgacgtctgcgagtccatgaaggagcagctcctggtgctggtggagtgggcgaagtacatcccggccttctgcgagctccccctggacgaccaggtcgccctgctccgggcccacgccggcgagcacctcctgctgggggcgaccaagcgcagcatggtgttcaaggacgtgctgctgctcggcaacgactacatcgtcccccggcactgccccgagctggccgagatgtcccgcgtgagcatccggatcctggacgagctcgtgctgccgttccaggagctgcagatcgacgacaacgagtacgcctacctcaaggccatcatcttcttcgaccccgacgccaagggcctgagcgaccccgggaagatcaagcgcctgcgcgcgcaggtccaggtgtccctcgaggactacatcaacgaccggcagtacgacagccgcggccggttcggggagctgctgctcctgctgcccaccctccagtccatcacgtggcagatgatcgagcagatccagttcatcaagctgttcggcatggccaagatcgacaacctgctccaggagatgctgctgggcggggccccgagcgacgcgccccacgcccaccaccccctccacccccacctgatgcaggagcacatgggcaccaacgtgatcgtcgccaacaccatgccgacccacctgtccaacgggcagatgtgcgagtggccccgcccccggggccaggccgccgcccccgaggcgccgcagcccgccccgcccgggggcagcggctccgagccctacaagctgctccccggggccgtggccacgatcgtgcgccccctgagcgccatcccccagccgaccatcaccaagcaggaggtcatctgaggactagtccctgttcccagagcccacttttttttctttttttgaaataaaatagcctgtctttcagatctaaaaaaaaaaaaaaaaaaaaaaaaaaaaaaaaaaaaaaaaaaaaaaaaaaaaaaaaaaaaaaaaaaaaaaaaaaaaaaaaaaaaaaaaaaaaaaaaaaaa

SEQ ID NO: 4321 - RNA, 1673 nt, synthetic construct
  misc_feature 1..1673: note = mRNA a-1 (A100) (opt1) from Homo sapiens__NP_000448.3__HNF4A(1-474)(S87A_S142A_S143A_S148A_T 166A_S167A_S313A_S378A_T429A_T432A_S436A_K458R)
  source 1..1673: mol_type = other RNA
aggagagtcccgcagtcggcgtccagcggctctgcttgttcgtgtgtgtgtcgttgcaggccttattcaagcttaccatgcgcctgagcaagaccctcgtggacatggacatggccgactactccgccgcgctggaccccgcctacaccacgctggagttcgagaacgtccaggtgctcaccatgggcaacgacaccagcccgtccgaggggaccaacctgaacgcccccaacagcctgggcgtgtccgccctctgcgccatctgcggggaccgggcgacgggcaagcactacggggccagctcctgcgacggctgcaagggcttcttccgccgggccgtccgcaagaaccacatgtacagctgccggttctcccgccagtgcgtggtggacaaggacaagcggaaccagtgccgctactgccggctgaagaagtgcttccgcgccgggatgaagaaggaggcggtccagaacgagcgggaccgcatcagcacccggcgcgccgcctacgaggactccgccctgcccagcatcaacgccctcctgcaggcggaggtgctgtcccggcagatcgccgcccccgtgagcggcatcaacggggacatccgcgccaagaagatcgcctccatcgcggacgtctgcgagagcatgaaggagcagctcctggtgctggtggagtgggccaagtacatcccggccttctgcgagctccccctggacgaccaggtcgccctgctccgggcccacgcgggcgagcacctcctgctgggggccaccaagcgctccatggtgttcaaggacgtgctgctgctcggcaacgactacatcgtcccccggcactgccccgagctggccgagatgagccgcgtgtccatccggatcctggacgagctcgtgctgccgttccaggagctgcagatcgacgacaacgagtacgcctacctcaaggccatcatcttcttcgaccccgacgcgaagggcctgagcgaccccgggaagatcaagcgcctgcgcgcccaggtccaggtgagcctcgaggactacatcaacgaccggcagtacgactcccgcggccggttcggggagctgctgctcctgctgcccaccctccagagcatcacgtggcagatgatcgagcagatccagttcatcaagctgttcggcatggccaagatcgacaacctgctccaggagatgctgctgggcggggccccgtccgacgcgccccacgcccaccaccccctccacccccacctgatgcaggagcacatgggcaccaacgtgatcgtcgccaacaccatgccgacccacctgagcaacgggcagatgtgcgagtggccccgcccccggggccaggccgccgcgcccgaggccccgcagcccgccccgcccgggggctccggcagcgagccctacaagctgctccccggggccgtggccacgatcgtgcgccccctgtccgcgatcccccagccgaccatcaccaagcaggaggtcatctgaggactagtccctgttcccagagcccacttttttttctttttttgaaataaaatagcctgtctttcagatctaaaaaaaaaaaaaaaaaaaaaaaaaaaaaaaaaaaaaaaaaaaaaaaaaaaaaaaaaaaaaaaaaaaaaaaaaaaaaaaaaaaaaaaaaaaaaaaaaaaa

SEQ ID NO: 4322 - RNA, 1673 nt, synthetic construct
  misc_feature 1..1673: note = mRNA a-1 (A100) (opt1) from Homo sapiens__NP_000448.3__HNF4A(1-474)(S87A_K106R_K108R_K126R_K 127R_S142A_S143A_S148A_T166A_S167A_S313A_S378A_T429A_T432A_ S436A_K458R)
  source 1..1673: mol_type = other RNA
aggagagtcccgcagtcggcgtccagcggctctgcttgttcgtgtgtgtgtcgttgcaggccttattcaagcttaccatgcgcctgagcaagaccctcgtggacatggacatggccgactactccgccgcgctggaccccgcctacaccacgctggagttcgagaacgtccaggtgctcaccatgggcaacgacaccagcccgtccgaggggaccaacctgaacgcccccaacagcctgggcgtgtccgccctctgcgccatctgcggggaccgggcgacgggcaagcactacggggccagctcctgcgacggctgcaagggcttcttccgccgggccgtccgcaagaaccacatgtacagctgccggttctcccgccagtgcgtggtggaccgggaccgccggaaccagtgccgctactgccggctgaagaagtgcttccgcgccgggatgcggcgcgaggcggtccagaacgagcgggaccgcatcagcacccggcgcgccgcctacgaggactccgccctgcccagcatcaacgccctcctgcaggcggaggtgctgtcccggcagatcgccgcccccgtgagcggcatcaacggggacatccgcgccaagaagatcgcctccatcgcggacgtctgcgagagcatgaaggagcagctcctggtgctggtggagtgggccaagtacatcccggccttctgcgagctccccctggacgaccaggtcgccctgctccgggcccacgcgggcgagcacctcctgctgggggccaccaagcgctccatggtgttcaaggacgtgctgctgctcggcaacgactacatcgtcccccgccactgccccgagctggccgagatgagccgggtgtccatccgcatcctggacgagctcgtgctgccgttccaggagctgcagatcgacgacaacgagtacgcctacctcaaggccatcatcttcttcgaccccgacgcgaagggcctgagcgaccccgggaagatcaagcggctgcgcgcccaggtccaggtgagcctcgaggactacatcaacgaccggcagtacgactcccgcggccggttcggggagctgctgctcctgctgcccaccctccagagcatcacgtggcagatgatcgagcagatccagttcatcaagctgttcggcatggccaagatcgacaacctgctccaggagatgctgctgggcggggccccgtccgacgcgccccacgcccaccaccccctccacccccacctgatgcaggagcacatgggcaccaacgtgatcgtcgccaacaccatgccgacccacctgagcaacgggcagatgtgcgagtggccccgcccccggggccaggccgccgcgcccgaggccccgcagcccgccccgcccgggggctccggcagcgagccctacaagctgctccccggggccgtggccacgatcgtgcgccccctgtccgcgatcccccagccgaccatcaccaagcaggaggtcatctgaggactagtccctgttcccagagcccacttttttttctttttttgaaataaaatagcctgtctttcagatctaaaaaaaaaaaaaaaaaaaaaaaaaaaaaaaaaaaaaaaaaaaaaaaaaaaaaaaaaaaaaaaaaaaaaaaaaaaaaaaaaaaaaaaaaaaaaaaaaaaa

SEQ ID NO: 4323 - RNA, 1673 nt, synthetic construct
  misc_feature 1..1673: note = mRNA a-1 (A100) (opt1) from Homo sapiens__NP_000448.3__HNF4A(1-474)(S87A_K106R_K108R_K126R_K 127R)
  source 1..1673: mol_type = other RNA
aggagagtcccgcagtcggcgtccagcggctctgcttgttcgtgtgtgtgtcgttgcaggccttattcaagcttaccatgcgcctgagcaagaccctcgtggacatggacatggccgactactccgccgcgctggaccccgcctacaccacgctggagttcgagaacgtccaggtgctcaccatgggcaacgacaccagcccgtccgaggggaccaacctgaacgcccccaacagcctgggcgtgtccgccctctgcgccatctgcggggaccgggcgacgggcaagcactacggggccagctcctgcgacggctgcaagggcttcttccgccgggccgtccgcaagaaccacatgtacagctgccggttctcccgccagtgcgtggtggaccgggaccgccggaaccagtgccgctactgccggctgaagaagtgcttccgcgccgggatgcggcgcgaggcggtccagaacgagcgggaccgcatcagcacccggcgctccagctacgaggactccagcctgccctccatcaacgccctcctgcaggccgaggtgctgagccggcagatcacctcccccgtgagcggcatcaacggggacatccgcgccaagaagatcgcctccatcgcggacgtctgcgagagcatgaaggagcagctcctggtgctggtggagtgggccaagtacatcccggccttctgcgagctccccctggacgaccaggtcgccctgctccgggcccacgcgggcgagcacctcctgctgggggccaccaagcgcagcatggtgttcaaggacgtgctgctgctcggcaacgactacatcgtcccccgccactgccccgagctggccgagatgtcccgggtgagcatccgcatcctggacgagctcgtgctgccgttccaggagctgcagatcgacgacaacgagtacgcctacctcaaggccatcatcttcttcgaccccgacgcgaagggcctgtccgaccccgggaagatcaagcggctgcgcagccaggtccaggtgtccctcgaggactacatcaacgaccggcagtacgacagccgcggccggttcggggagctgctgctcctgctgcccacgctccagtccatcacctggcagatgatcgagcagatccagttcatcaagctgttcggcatggccaagatcgacaacctgctccaggagatgctgctgggcgggagcccgtccgacgcgccccacgcccaccaccccctccacccccacctgatgcaggagcacatgggcaccaacgtgatcgtcgccaacaccatgccgacgcacctgagcaacgggcagatgtgcgagtggccccgcccccggggccaggccgccacccccgagaccccgcagccctccccgcccgggggcagcggctccgagccctacaagctgctccccggggccgtggccaccatcgtgaagcccctgagcgcgatcccccagccgacgatcaccaagcaggaggtcatctgaggactagtccctgttcccagagcccacttttttttctttttttgaaataaaatagcctgtctttcagatctaaaaaaaaaaaaaaaaaaaaaaaaaaaaaaaaaaaaaaaaaaaaaaaaaaaaaaaaaaaaaaaaaaaaaaaaaaaaaaaaaaaaaaaaaaaaaaaaaaaa

SEQ ID NO: 4324 - RNA, 1673 nt, synthetic construct
  misc_feature 1..1673: note = mRNA a-1 (A100) (opt1) from Homo sapiens__NP_000448.3__HNF4A(1-474)(S87A_K106R_K108R_K126R_K 127R_S142A_S143A_S148A_T166A_S167A_S313A_S378A_T429A_T432A_ S436A_K458R_S461A)
  source 1..1673: mol_type = other RNA
aggagagtcccgcagtcggcgtccagcggctctgcttgttcgtgtgtgtgtcgttgcaggccttattcaagcttaccatgcgcctgagcaagaccctcgtggacatggacatggccgactactccgccgcgctggaccccgcctacaccacgctggagttcgagaacgtccaggtgctcaccatgggcaacgacaccagcccgtccgaggggaccaacctgaacgcccccaacagcctgggcgtgtccgccctctgcgccatctgcggggaccgggcgacgggcaagcactacggggccagctcctgcgacggctgcaagggcttcttccgccgggccgtccgcaagaaccacatgtacagctgccggttctcccgccagtgcgtggtggaccgggaccgccggaaccagtgccgctactgccggctgaagaagtgcttccgcgccgggatgcggcgcgaggcggtccagaacgagcgggaccgcatcagcacccggcgcgccgcctacgaggactccgccctgcccagcatcaacgccctcctgcaggcggaggtgctgtcccggcagatcgccgcccccgtgagcggcatcaacggggacatccgcgccaagaagatcgcctccatcgcggacgtctgcgagagcatgaaggagcagctcctggtgctggtggagtgggccaagtacatcccggccttctgcgagctccccctggacgaccaggtcgccctgctccgggcccacgcgggcgagcacctcctgctgggggccaccaagcgctccatggtgttcaaggacgtgctgctgctcggcaacgactacatcgtcccccgccactgccccgagctggccgagatgagccgggtgtccatccgcatcctggacgagctcgtgctgccgttccaggagctgcagatcgacgacaacgagtacgcctacctcaaggccatcatcttcttcgaccccgacgcgaagggcctgagcgaccccgggaagatcaagcggctgcgcgcccaggtccaggtgagcctcgaggactacatcaacgaccggcagtacgactcccgcggccggttcggggagctgctgctcctgctgcccaccctccagagcatcacgtggcagatgatcgagcagatccagttcatcaagctgttcggcatggccaagatcgacaacctgctccaggagatgctgctgggcggggccccgtccgacgcgccccacgcccaccaccccctccacccccacctgatgcaggagcacatgggcaccaacgtgatcgtcgccaacaccatgccgacccacctgagcaacgggcagatgtgcgagtggccccgcccccggggccaggccgccgcgcccgaggccccgcagcccgccccgcccgggggctccggcagcgagccctacaagctgctccccggggccgtggccacgatcgtgcgccccctggcggccatcccccagccgaccatcaccaagcaggaggtcatctgaggactagtccctgttcccagagcccacttttttttctttttttgaaataaaatagcctgtctttcagatctaaaaaaaaaaaaaaaaaaaaaaaaaaaaaaaaaaaaaaaaaaaaaaaaaaaaaaaaaaaaaaaaaaaaaaaaaaaaaaaaaaaaaaaaaaaaaaaaaaaa

SEQ ID NO: 4325 - RNA, 1673 nt, synthetic construct
  misc_feature 1..1673: note = mRNA a-1 (A100) (opt1) from Homo sapiens__NP_000448.3__HNF4A(1-474)(S87A_K106R_K108R_K126R_K 127R_S142A_S143A_S148A_T166A_S167A_S313A_S378A_T429A_T432A_ S436A_K458R_S461E)
  source 1..1673: mol_type = other RNA
aggagagtcccgcagtcggcgtccagcggctctgcttgttcgtgtgtgtgtcgttgcaggccttattcaagcttaccatgcgcctgagcaagaccctcgtggacatggacatggccgactactccgccgcgctggaccccgcctacaccacgctggagttcgagaacgtccaggtgctcaccatgggcaacgacaccagcccgtccgaggggaccaacctgaacgcccccaacagcctgggcgtgtccgccctctgcgccatctgcggggaccgggcgacgggcaagcactacggggccagctcctgcgacggctgcaagggcttcttccgccgggccgtccgcaagaaccacatgtacagctgccggttctcccgccagtgcgtggtggaccgggaccgccggaaccagtgccgctactgccggctgaagaagtgcttccgcgccgggatgcggcgcgaggcggtccagaacgagcgggaccgcatcagcacccggcgcgccgcctacgaggactccgccctgcccagcatcaacgccctcctgcaggcggaggtgctgtcccggcagatcgccgcccccgtgagcggcatcaacggggacatccgcgccaagaagatcgcctccatcgcggacgtctgcgagagcatgaaggagcagctcctggtgctggtggagtgggccaagtacatcccggccttctgcgagctccccctggacgaccaggtcgccctgctccgggcccacgcgggcgagcacctcctgctgggggccaccaagcgctccatggtgttcaaggacgtgctgctgctcggcaacgactacatcgtcccccgccactgccccgagctggccgagatgagccgggtgtccatccgcatcctggacgagctcgtgctgccgttccaggagctgcagatcgacgacaacgagtacgcctacctcaaggccatcatcttcttcgaccccgacgcgaagggcctgagcgaccccgggaagatcaagcggctgcgcgcccaggtccaggtgagcctcgaggactacatcaacgaccggcagtacgactcccgcggccggttcggggagctgctgctcctgctgcccaccctccagagcatcacgtggcagatgatcgagcagatccagttcatcaagctgttcggcatggccaagatcgacaacctgctccaggagatgctgctgggcggggccccgtccgacgcgccccacgcccaccaccccctccacccccacctgatgcaggagcacatgggcaccaacgtgatcgtcgccaacaccatgccgacccacctgagcaacgggcagatgtgcgagtggccccgcccccggggccaggccgccgcgcccgaggccccgcagcccgccccgcccgggggctccggcagcgagccctacaagctgctccccggggccgtggccacgatcgtgcgccccctggaggcgatcccccagccgaccatcaccaagcaggaggtcatctgaggactagtccctgttcccagagcccacttttttttctttttttgaaataaaatagcctgtctttcagatctaaaaaaaaaaaaaaaaaaaaaaaaaaaaaaaaaaaaaaaaaaaaaaaaaaaaaaaaaaaaaaaaaaaaaaaaaaaaaaaaaaaaaaaaaaaaaaaaaaaa

SEQ ID NO: 4326 - RNA, 1673 nt, synthetic construct
  misc_feature 1..1673: note = mRNA a-1 (A100) (opt1) from Homo sapiens__NP_000448.3__HNF4A(1-474)(S87A_K106R_K108R_K126R_K 127R_S142A_S143A_S148E_T166A_S167E_S313A_S378E_T429E_T432E_ S436E_K458R_S461E)
  source 1..1673: mol_type = other RNA
aggagagtcccgcagtcggcgtccagcggctctgcttgttcgtgtgtgtgtcgttgcaggccttattcaagcttaccatgcgcctgagcaagaccctcgtggacatggacatggccgactactccgccgcgctggaccccgcctacaccacgctggagttcgagaacgtccaggtgctcaccatgggcaacgacaccagcccgtccgaggggaccaacctgaacgcccccaacagcctgggcgtgtccgccctctgcgccatctgcggggaccgggcgacgggcaagcactacggggccagctcctgcgacggctgcaagggcttcttccgccgggccgtccgcaagaaccacatgtacagctgccggttctcccgccagtgcgtggtggaccgggaccgccggaaccagtgccgctactgccggctgaagaagtgcttccgcgccgggatgcggcgcgaggcggtccagaacgagcgggaccgcatcagcacccggcgcgccgcctacgaggactccgagctgcccagcatcaacgccctcctgcaggccgaggtgctgtcccggcagatcgcggagcccgtgagcggcatcaacggggacatccgcgccaagaagatcgcctccatcgccgacgtctgcgagagcatgaaggagcagctcctggtgctggtggagtgggccaagtacatcccggcgttctgcgagctccccctggacgaccaggtcgccctgctccgggcccacgccggcgagcacctcctgctgggggccaccaagcgctccatggtgttcaaggacgtgctgctgctcggcaacgactacatcgtcccccgccactgccccgagctggcggagatgagccgggtgtccatccgcatcctggacgagctcgtgctgccgttccaggagctgcagatcgacgacaacgagtacgcctacctcaaggccatcatcttcttcgaccccgacgccaagggcctgagcgaccccgggaagatcaagcggctgcgcgcccaggtccaggtgagcctcgaggactacatcaacgaccggcagtacgactcccgcggccggttcggggagctgctgctcctgctgcccaccctccagagcatcacgtggcagatgatcgagcagatccagttcatcaagctgttcggcatggcgaagatcgacaacctgctccaggagatgctgctgggcggggagccgtccgacgcgccccacgcccaccaccccctccacccccacctgatgcaggagcacatgggcaccaacgtgatcgtcgccaacaccatgccgacccacctgagcaacgggcagatgtgcgagtggccccgcccccggggccaggccgccgagcccgaggagccgcagcccgagccgcccgggggctccggcagcgagccctacaagctgctccccggggccgtggccacgatcgtgcgccccctggaggccatcccccagccgaccatcaccaagcaggaggtcatctgaggactagtccctgttcccagagcccacttttttttctttttttgaaataaaatagcctgtctttcagatctaaaaaaaaaaaaaaaaaaaaaaaaaaaaaaaaaaaaaaaaaaaaaaaaaaaaaaaaaaaaaaaaaaaaaaaaaaaaaaaaaaaaaaaaaaaaaaaaaaaa

SEQ ID NO: 4327 - RNA, 1673 nt, synthetic construct
  misc_feature 1..1673: note = mRNA a-1 (A100) (opt1) from Homo sapiens__NP_000448.3__HNF4A(1-474)(S87A_K106R_K108R_K126R_K 127R_S142A_S143A_S148A_T166A_S167A_K179R_K180R_S313A_S378A_ T429A_T432A_S436A_K458R_S461E)
  source 1..1673: mol_type = other RNA
aggagagtcccgcagtcggcgtccagcggctctgcttgttcgtgtgtgtgtcgttgcaggccttattcaagcttaccatgcgcctgagcaagaccctcgtggacatggacatggccgactactccgccgcgctggaccccgcctacaccacgctggagttcgagaacgtccaggtgctcaccatgggcaacgacaccagcccgtccgaggggaccaacctgaacgcccccaacagcctgggcgtgtccgccctctgcgccatctgcggggaccgggcgacgggcaagcactacggggccagctcctgcgacggctgcaagggcttcttccgccgggccgtccgcaagaaccacatgtacagctgccggttctcccgccagtgcgtggtggaccgggaccgccggaaccagtgccgctactgccggctgaagaagtgcttccgcgccgggatgcggcgcgaggcggtccagaacgagcgggaccgcatcagcacccggcgcgccgcctacgaggactccgccctgcccagcatcaacgccctcctgcaggcggaggtgctgtcccggcagatcgccgcccccgtgagcggcatcaacggggacatccgcgcccggcgcatcgcctccatcgcggacgtctgcgagagcatgaaggagcagctcctggtgctggtggagtgggccaagtacatcccggccttctgcgagctccccctggacgaccaggtcgccctgctccgcgcccacgcgggcgagcacctcctgctgggggccaccaagcggtccatggtgttcaaggacgtgctgctgctcggcaacgactacatcgtcccccgccactgccccgagctggccgagatgagccgggtgtccatccgcatcctggacgagctcgtgctgccgttccaggagctgcagatcgacgacaacgagtacgcctacctcaaggccatcatcttcttcgaccccgacgcgaagggcctgagcgaccccgggaagatcaagcggctgcgcgcccaggtccaggtgagcctcgaggactacatcaacgaccggcagtacgactcccgcggccggttcggggagctgctgctcctgctgcccaccctccagagcatcacgtggcagatgatcgagcagatccagttcatcaagctgttcggcatggccaagatcgacaacctgctccaggagatgctgctgggcggggccccgtccgacgcgccccacgcccaccaccccctccacccccacctgatgcaggagcacatgggcaccaacgtgatcgtcgccaacaccatgccgacccacctgagcaacgggcagatgtgcgagtggccccgcccccggggccaggccgccgcgcccgaggccccgcagcccgccccgcccgggggctccggcagcgagccctacaagctgctccccggggccgtggccacgatcgtgcgccccctggaggcgatcccccagccgaccatcaccaagcaggaggtcatctgaggactagtccctgttcccagagcccacttttttttctttttttgaaataaaatagcctgtctttcagatctaaaaaaaaaaaaaaaaaaaaaaaaaaaaaaaaaaaaaaaaaaaaaaaaaaaaaaaaaaaaaaaaaaaaaaaaaaaaaaaaaaaaaaaaaaaaaaaaaaaa

SEQ ID NO: 4328 - RNA, 1673 nt, synthetic construct
  misc_feature 1..1673: note = mRNA a-1 (A100) (opt1) from Homo sapiens__NP_000448.3__HNF4A(1-474)(S87A_K106R_K108R_K126R_K 127R_S142A_S143A_S148A_T166A_S167A_K300R_K307R_K309R_S313A_ S378A_T429A_T432A_S436A_K458R_S461E)
  source 1..1673: mol_type = other RNA
aggagagtcccgcagtcggcgtccagcggctctgcttgttcgtgtgtgtgtcgttgcaggccttattcaagcttaccatgcgcctgagcaagaccctcgtggacatggacatggccgactactccgccgcgctggaccccgcctacaccacgctggagttcgagaacgtccaggtgctcaccatgggcaacgacaccagcccgtccgaggggaccaacctgaacgcccccaacagcctgggcgtgtccgccctctgcgccatctgcggggaccgggcgacgggcaagcactacggggccagctcctgcgacggctgcaagggcttcttccgccgggccgtccgcaagaaccacatgtacagctgccggttctcccgccagtgcgtggtggaccgggaccgccggaaccagtgccgctactgccggctgaagaagtgcttccgcgccgggatgcggcgcgaggcggtccagaacgagcgggaccgcatcagcacccggcgcgccgcctacgaggactccgccctgcccagcatcaacgccctcctgcaggcggaggtgctgtcccggcagatcgccgcccccgtgagcggcatcaacggggacatccgcgccaagaagatcgcctccatcgcggacgtctgcgagagcatgaaggagcagctcctggtgctggtggagtgggccaagtacatcccggccttctgcgagctccccctggacgaccaggtcgccctgctccgggcccacgcgggcgagcacctcctgctgggggccaccaagcgctccatggtgttcaaggacgtgctgctgctcggcaacgactacatcgtcccccgccactgccccgagctggccgagatgagccgggtgtccatccgcatcctggacgagctcgtgctgccgttccaggagctgcagatcgacgacaacgagtacgcctacctcaaggccatcatcttcttcgaccccgacgcgcggggcctgagcgaccccgggcgcatccggcgcctgcgggcccaggtccaggtgagcctcgaggactacatcaacgaccgccagtacgactcccggggccgcttcggggagctgctgctcctgctgcccaccctccagagcatcacgtggcagatgatcgagcagatccagttcatcaagctgttcggcatggccaagatcgacaacctgctccaggagatgctgctgggcggggccccgtccgacgcgccccacgcccaccaccccctccacccccacctgatgcaggagcacatgggcaccaacgtgatcgtcgccaacaccatgccgacccacctgagcaacgggcagatgtgcgagtggccccggccccgcggccaggccgccgcgcccgaggccccgcagcccgccccgcccgggggctccggcagcgagccctacaagctgctccccggggccgtggccacgatcgtgcggcccctggaggcgatcccccagccgaccatcaccaagcaggaggtcatctgaggactagtccctgttcccagagcccacttttttttctttttttgaaataaaatagcctgtctttcagatctaaaaaaaaaaaaaaaaaaaaaaaaaaaaaaaaaaaaaaaaaaaaaaaaaaaaaaaaaaaaaaaaaaaaaaaaaaaaaaaaaaaaaaaaaaaaaaaaaaaa

SEQ ID NO: 4329 - RNA, 1673 nt, synthetic construct
  misc_feature 1..1673: note = mRNA a-1 (A100) (opt1) from Homo sapiens__NP_000448.3__HNF4A(1-474)(S87A_K106R_K108R_K126R_K 127R_S142A_S143A_S148A_T166A_S167A_S313A_S378A_T429A_T432A_ S436A_K447R_K458R_S461E_K470R)
  source 1..1673: mol_type = other RNA
aggagagtcccgcagtcggcgtccagcggctctgcttgttcgtgtgtgtgtcgttgcaggccttattcaagcttaccatgcgcctgagcaagaccctcgtggacatggacatggccgactactccgccgcgctggaccccgcctacaccacgctggagttcgagaacgtccaggtgctcaccatgggcaacgacaccagcccgtccgaggggaccaacctgaacgcccccaacagcctgggcgtgtccgccctctgcgccatctgcggggaccgggcgacgggcaagcactacggggccagctcctgcgacggctgcaagggcttcttccgccgggccgtccgcaagaaccacatgtacagctgccggttctcccgccagtgcgtggtggaccgggaccgccggaaccagtgccgctactgccggctgaagaagtgcttccgcgccgggatgcggcgcgaggcggtccagaacgagcgggaccgcatcagcacccggcgcgccgcctacgaggactccgccctgcccagcatcaacgccctcctgcaggcggaggtgctgtcccggcagatcgccgcccccgtgagcggcatcaacggggacatccgcgccaagaagatcgcctccatcgcggacgtctgcgagagcatgaaggagcagctcctggtgctggtggagtgggccaagtacatcccggccttctgcgagctccccctggacgaccaggtcgccctgctccgggcccacgcgggcgagcacctcctgctgggggccaccaagcgctccatggtgttcaaggacgtgctgctgctcggcaacgactacatcgtcccccgccactgccccgagctggccgagatgagccgggtgtccatccgcatcctggacgagctcgtgctgccgttccaggagctgcagatcgacgacaacgagtacgcctacctcaaggccatcatcttcttcgaccccgacgcgaagggcctgagcgaccccgggaagatcaagcggctgcgcgcccaggtccaggtgagcctcgaggactacatcaacgaccggcagtacgactcccgcggccggttcggggagctgctgctcctgctgcccaccctccagagcatcacgtggcagatgatcgagcagatccagttcatcaagctgttcggcatggccaagatcgacaacctgctccaggagatgctgctgggcggggccccgtccgacgcgccccacgcccaccaccccctccacccccacctgatgcaggagcacatgggcaccaacgtgatcgtcgccaacaccatgccgacccacctgagcaacgggcagatgtgcgagtggccccgcccccggggccaggccgccgcgcccgaggccccgcagcccgccccgcccgggggctccggcagcgagccctaccgcctgctccccggggccgtggccacgatcgtgcggcccctggaggcgatcccccagccgaccatcacccgccaggaggtcatctgaggactagtccctgttcccagagcccacttttttttctttttttgaaataaaatagcctgtctttcagatctaaaaaaaaaaaaaaaaaaaaaaaaaaaaaaaaaaaaaaaaaaaaaaaaaaaaaaaaaaaaaaaaaaaaaaaaaaaaaaaaaaaaaaaaaaaaaaaaaaaa

SEQ ID NO: 4330 - RNA, 1673 nt, synthetic construct
  misc_feature 1..1673: note = mRNA a-1 (A100) (opt1) from Homo sapiens__NP_000448.3__HNF4A(1-474)(S87A_K106R_K108R_K126R_K 127R_S142A_S143A_S148A_T166A_S167A_K179R_K180R_K234R_K300R_ K307R_K309R_S313A_S378A_T429A_T432A_S436A_K447R_K458R_S461E _K470R)
  source 1..1673: mol_type = other RNA
aggagagtcccgcagtcggcgtccagcggctctgcttgttcgtgtgtgtgtcgttgcaggccttattcaagcttaccatgcgcctgagcaagaccctcgtggacatggacatggccgactactccgccgcgctggaccccgcctacaccacgctggagttcgagaacgtccaggtgctcaccatgggcaacgacaccagcccgtccgaggggaccaacctgaacgcccccaacagcctgggcgtgtccgccctctgcgccatctgcggggaccgggcgacgggcaagcactacggggccagctcctgcgacggctgcaagggcttcttccgccgggccgtccgcaagaaccacatgtacagctgccggttctcccgccagtgcgtggtggaccgggaccgccggaaccagtgccgctactgccggctgaagaagtgcttccgcgccgggatgcggcgcgaggcggtccagaacgagcgggaccgcatcagcacccggcgcgccgcctacgaggactccgccctgcccagcatcaacgccctcctgcaggcggaggtgctgtcccggcagatcgccgcccccgtgagcggcatcaacggggacatccgcgcccggcgcatcgcctccatcgcggacgtctgcgagagcatgaaggagcagctcctggtgctggtggagtgggccaagtacatcccggccttctgcgagctccccctggacgaccaggtcgccctgctccgcgcccacgcgggcgagcacctcctgctgggggccacccggcgctccatggtgttcaaggacgtgctgctgctcggcaacgactacatcgtcccccggcactgccccgagctggccgagatgagccgcgtgtccatccggatcctggacgagctcgtgctgccgttccaggagctgcagatcgacgacaacgagtacgcctacctcaaggccatcatcttcttcgaccccgacgcgcgcggcctgagcgaccccgggcggatccgccggctgcgcgcccaggtccaggtgagcctcgaggactacatcaacgaccggcagtacgactcccgcggccggttcggggagctgctgctcctgctgcccaccctccagagcatcacgtggcagatgatcgagcagatccagttcatcaagctgttcggcatggccaagatcgacaacctgctccaggagatgctgctgggcggggccccgtccgacgcgccccacgcccaccaccccctccacccccacctgatgcaggagcacatgggcaccaacgtgatcgtcgccaacaccatgccgacccacctgagcaacgggcagatgtgcgagtggccccgcccccggggccaggccgccgcgcccgaggccccgcagcccgccccgcccgggggctccggcagcgagccctaccgcctgctccccggggccgtggccacgatcgtgcggcccctggaggcgatcccccagccgaccatcacccgccaggaggtcatctgaggactagtccctgttcccagagcccacttttttttctttttttgaaataaaatagcctgtctttcagatctaaaaaaaaaaaaaaaaaaaaaaaaaaaaaaaaaaaaaaaaaaaaaaaaaaaaaaaaaaaaaaaaaaaaaaaaaaaaaaaaaaaaaaaaaaaaaaaaaaaa

SEQ ID NO: 4331 - RNA, 1673 nt, synthetic construct
  misc_feature 1..1673: note = mRNA a-1 (A100) (opt1) from Homo sapiens__NP_000448.3__HNF4A(1-474)(S87A_S95A_S99A_K106R_K10 8R_K126R_K127R_S142A_S143A_S148A_T166A_S167A_S313A_S378A_T4 29A_T432A_S436A_K458R_S461E)
  source 1..1673: mol_type = other RNA
aggagagtcccgcagtcggcgtccagcggctctgcttgttcgtgtgtgtgtcgttgcaggccttattcaagcttaccatgcgcctgagcaagaccctcgtggacatggacatggccgactactccgccgcgctggaccccgcctacaccacgctggagttcgagaacgtccaggtgctcaccatgggcaacgacaccagcccgtccgaggggaccaacctgaacgcccccaacagcctgggcgtgtccgccctctgcgccatctgcggggaccgggcgacgggcaagcactacggggccagctcctgcgacggctgcaagggcttcttccgccgggccgtccgcaagaaccacatgtacgcctgccggttcgcgcgccagtgcgtggtggaccgggaccgccggaaccagtgccgctactgccggctgaagaagtgcttccgcgccgggatgcggcgcgaggccgtccagaacgagcgggaccgcatcagcacccggcgcgccgcctacgaggactccgcgctgcccagcatcaacgccctcctgcaggccgaggtgctgtcccggcagatcgccgcccccgtgagcggcatcaacggggacatccgcgcgaagaagatcgcctccatcgccgacgtctgcgagagcatgaaggagcagctcctggtgctggtggagtgggccaagtacatcccggccttctgcgagctccccctggacgaccaggtcgcgctgctccgggcccacgccggcgagcacctcctgctgggggccaccaagcgctccatggtgttcaaggacgtgctgctgctcggcaacgactacatcgtcccccgccactgccccgagctggccgagatgagccgggtgtccatccgcatcctggacgagctcgtgctgccgttccaggagctgcagatcgacgacaacgagtacgcgtacctcaaggccatcatcttcttcgaccccgacgccaagggcctgagcgaccccgggaagatcaagcggctgcgcgcccaggtccaggtgtccctcgaggactacatcaacgaccggcagtacgacagccgcggccggttcggggagctgctgctcctgctgcccaccctccagagcatcacgtggcagatgatcgagcagatccagttcatcaagctgttcggcatggcgaagatcgacaacctgctccaggagatgctgctgggcggggccccgtccgacgcgccccacgcccaccaccccctccacccccacctgatgcaggagcacatgggcaccaacgtgatcgtcgccaacaccatgccgacccacctgagcaacgggcagatgtgcgagtggccccgcccccggggccaggccgccgcccccgaggccccgcagcccgccccgcccgggggctccggcagcgagccctacaagctgctccccggggcggtggccacgatcgtgcgccccctggaggccatcccccagccgaccatcaccaagcaggaggtcatctgaggactagtccctgttcccagagcccacttttttttctttttttgaaataaaatagcctgtctttcagatctaaaaaaaaaaaaaaaaaaaaaaaaaaaaaaaaaaaaaaaaaaaaaaaaaaaaaaaaaaaaaaaaaaaaaaaaaaaaaaaaaaaaaaaaaaaaaaaaaaaa

SEQ ID NO: 4332 - RNA, 1673 nt, synthetic construct
  misc_feature 1..1673: note = mRNA a-1 (A100) (opt1) from Homo sapiens__NP_000448.3__HNF4A(1-474)(S87A_K106R_K108R_K126R_K 127R_S138A_T139A_S142A_S143A_S148A_T166A_S167A_S313A_S378A_ T429A_T432A_S436A_K458R_S461E)
  source 1..1673: mol_type = other RNA
aggagagtcccgcagtcggcgtccagcggctctgcttgttcgtgtgtgtgtcgttgcaggccttattcaagcttaccatgcgcctgagcaagaccctcgtggacatggacatggccgactactccgccgcgctggaccccgcctacaccacgctggagttcgagaacgtccaggtgctcaccatgggcaacgacaccagcccgtccgaggggaccaacctgaacgcccccaacagcctgggcgtgtccgccctctgcgccatctgcggggaccgggcgacgggcaagcactacggggccagctcctgcgacggctgcaagggcttcttccgccgggccgtccgcaagaaccacatgtacagctgccggttctcccgccagtgcgtggtggaccgggaccgccggaaccagtgccgctactgccggctgaagaagtgcttccgcgccgggatgcggcgcgaggcggtccagaacgagcgggaccgcatcgccgcccggcgcgccgcctacgaggacagcgcgctgccctccatcaacgccctcctgcaggccgaggtgctgagccggcagatcgccgcccccgtgtccggcatcaacggggacatccgcgcgaagaagatcgccagcatcgccgacgtctgcgagtccatgaaggagcagctcctggtgctggtggagtgggccaagtacatcccggccttctgcgagctccccctggacgaccaggtcgcgctgctccgggcccacgccggcgagcacctcctgctgggggccaccaagcgcagcatggtgttcaaggacgtgctgctgctcggcaacgactacatcgtcccccgccactgccccgagctggccgagatgtcccgggtgagcatccgcatcctggacgagctcgtgctgccgttccaggagctgcagatcgacgacaacgagtacgcgtacctcaaggccatcatcttcttcgaccccgacgccaagggcctgtccgaccccgggaagatcaagcggctgcgcgcccaggtccaggtgagcctcgaggactacatcaacgaccggcagtacgacagccgcggccggttcggggagctgctgctcctgctgcccaccctccagtccatcacctggcagatgatcgagcagatccagttcatcaagctgttcggcatggcgaagatcgacaacctgctccaggagatgctgctgggcggggccccgagcgacgcgccccacgcccaccaccccctccacccccacctgatgcaggagcacatgggcacgaacgtgatcgtcgccaacaccatgccgacccacctgtccaacgggcagatgtgcgagtggccccgcccccggggccaggccgccgcccccgaggccccgcagcccgccccgcccgggggcagcggctccgagccctacaagctgctccccggggcggtggccaccatcgtgcgccccctggaggccatcccccagccgacgatcaccaagcaggaggtcatctgaggactagtccctgttcccagagcccacttttttttctttttttgaaataaaatagcctgtctttcagatctaaaaaaaaaaaaaaaaaaaaaaaaaaaaaaaaaaaaaaaaaaaaaaaaaaaaaaaaaaaaaaaaaaaaaaaaaaaaaaaaaaaaaaaaaaaaaaaaaaaa

SEQ ID NO: 4333 - RNA, 1673 nt, synthetic construct
  misc_feature 1..1673: note = mRNA a-1 (A100) (opt1) from Homo sapiens__NP_000448.3__HNF4A(1-474)(S87A_S95A_S99A_K106R_K10 8R_K126R_K127R_S138A_T139A_S142A_S143A_S148A_T166A_S167A_S3 13A_S378A_T429A_T432A_S436A_K458R_S461E)
  source 1..1673: mol_type = other RNA
aggagagtcccgcagtcggcgtccagcggctctgcttgttcgtgtgtgtgtcgttgcaggccttattcaagcttaccatgcgcctgagcaagaccctcgtggacatggacatggccgactactccgccgcgctggaccccgcctacaccacgctggagttcgagaacgtccaggtgctcaccatgggcaacgacaccagcccgtccgaggggaccaacctgaacgcccccaacagcctgggcgtgtccgccctctgcgccatctgcggggaccgggcgacgggcaagcactacggggccagctcctgcgacggctgcaagggcttcttccgccgggccgtccgcaagaaccacatgtacgcctgccggttcgcgcgccagtgcgtggtggaccgggaccgccggaaccagtgccgctactgccggctgaagaagtgcttccgcgccgggatgcggcgcgaggccgtccagaacgagcgggaccgcatcgccgcccggcgcgcggcctacgaggacagcgccctgccctccatcaacgccctcctgcaggccgaggtgctgagccggcagatcgcggcccccgtgtccggcatcaacggggacatccgcgccaagaagatcgccagcatcgccgacgtctgcgagtccatgaaggagcagctcctggtgctggtggagtgggcgaagtacatcccggccttctgcgagctccccctggacgaccaggtcgccctgctccgggcccacgccggcgagcacctcctgctgggggcgaccaagcgcagcatggtgttcaaggacgtgctgctgctcggcaacgactacatcgtcccccgccactgccccgagctggccgagatgtcccgggtgagcatccgcatcctggacgagctcgtgctgccgttccaggagctgcagatcgacgacaacgagtacgcctacctcaaggccatcatcttcttcgaccccgacgcgaagggcctgtccgaccccgggaagatcaagcggctgcgcgcccaggtccaggtgagcctcgaggactacatcaacgaccggcagtacgactcccgcggccggttcggggagctgctgctcctgctgcccaccctccagagcatcacctggcagatgatcgagcagatccagttcatcaagctgttcggcatggccaagatcgacaacctgctccaggagatgctgctgggcggggccccgagcgacgcgccccacgcccaccaccccctccacccccacctgatgcaggagcacatgggcacgaacgtgatcgtcgccaacaccatgccgacccacctgtccaacgggcagatgtgcgagtggccccgcccccggggccaggccgccgcccccgaggcgccgcagcccgccccgcccgggggcagcggctccgagccctacaagctgctccccggggccgtggccaccatcgtgcgccccctggaggccatcccccagccgacgatcaccaagcaggaggtcatctgaggactagtccctgttcccagagcccacttttttttctttttttgaaataaaatagcctgtctttcagatctaaaaaaaaaaaaaaaaaaaaaaaaaaaaaaaaaaaaaaaaaaaaaaaaaaaaaaaaaaaaaaaaaaaaaaaaaaaaaaaaaaaaaaaaaaaaaaaaaaaa

SEQ ID NO: 4334 - RNA, 1673 nt, synthetic construct
  misc_feature 1..1673: note = mRNA a-1 (A100) (opt2) from Homo sapiens__NP_000448.3__HNF4A(1-474)
  source 1..1673: mol_type = other RNA
aggagagtcccgcagtcggcgtccagcggctctgcttgttcgtgtgtgtgtcgttgcaggccttattcaagcttaccatgcgcctctccaagaccctcgtcgacatggacatggccgactactccgccgccctcgaccccgcctacaccaccctcgagttcgagaacgtccaggtcctcaccatgggcaacgacacctccccctccgagggcaccaacctcaacgcccccaactccctcggcgtctccgccctctgcgccatctgcggcgaccgcgccaccggcaagcactacggcgcctcctcctgcgacggctgcaagggcttcttccgccgctccgtccgcaagaaccacatgtactcctgccgcttctcccgccagtgcgtcgtcgacaaggacaagcgcaaccagtgccgctactgccgcctcaagaagtgcttccgcgccggcatgaagaaggaggccgtccagaacgagcgcgaccgcatctccacccgccgctcctcctacgaggactcctccctcccctccatcaacgccctcctccaggccgaggtcctctcccgccagatcacctcccccgtctccggcatcaacggcgacatccgcgccaagaagatcgcctccatcgccgacgtctgcgagtccatgaaggagcagctcctcgtcctcgtcgagtgggccaagtacatccccgccttctgcgagctccccctcgacgaccaggtcgccctcctccgcgcccacgccggcgagcacctcctcctcggcgccaccaagcgctccatggtcttcaaggacgtcctcctcctcggcaacgactacatcgtcccccgccactgccccgagctcgccgagatgtcccgcgtctccatccgcatcctcgacgagctcgtcctccccttccaggagctccagatcgacgacaacgagtacgcctacctcaaggccatcatcttcttcgaccccgacgccaagggcctctccgaccccggcaagatcaagcgcctccgctcccaggtccaggtctccctcgaggactacatcaacgaccgccagtacgactcgcgcgggcgcttcggcgagctcctcctcctcctccccaccctccagtccatcacctggcagatgatcgagcagatccagttcatcaagctgttcggcatggccaagatcgacaacctcctccaggagatgctcctcggcggctccccctccgacgccccccacgcccaccaccccctccacccccacctcatgcaggagcacatgggcaccaacgtcatcgtcgccaacaccatgcccacccacctctccaacggccagatgtgcgagtggccccgcccgcgcggccaggccgccacccccgagaccccccagccctccccccccggcggctccggctccgagccctacaagctcctccccggcgccgtcgccaccatcgtcaagcccctctccgccatcccccagcccaccatcaccaagcaggaggtcatctgaggactagtccctgttcccagagcccacttttttttctttttttgaaataaaatagcctgtctttcagatctaaaaaaaaaaaaaaaaaaaaaaaaaaaaaaaaaaaaaaaaaaaaaaaaaaaaaaaaaaaaaaaaaaaaaaaaaaaaaaaaaaaaaaaaaaaaaaaaaaaa

SEQ ID NO: 4335 - RNA, 1673 nt, synthetic construct
  misc_feature 1..1673: note = mRNA a-1 (A100) (opt2) from Homo sapiens__NP_000448.3__HNF4A(1-474)(S313A)
  source 1..1673: mol_type = other RNA
aggagagtcccgcagtcggcgtccagcggctctgcttgttcgtgtgtgtgtcgttgcaggccttattcaagcttaccatgcgcctctccaagaccctcgtcgacatggacatggccgactactccgccgccctcgaccccgcctacaccaccctcgagttcgagaacgtccaggtcctcaccatgggcaacgacacctccccctccgagggcaccaacctcaacgcccccaactccctcggcgtctccgccctctgcgccatctgcggcgaccgcgccaccggcaagcactacggcgcctcctcctgcgacggctgcaagggcttcttccgccgctccgtccgcaagaaccacatgtactcctgccgcttctcccgccagtgcgtcgtcgacaaggacaagcgcaaccagtgccgctactgccgcctcaagaagtgcttccgcgccggcatgaagaaggaggccgtccagaacgagcgcgaccgcatctccacccgccgctcctcctacgaggactcctccctcccctccatcaacgccctcctccaggccgaggtcctctcccgccagatcacctcccccgtctccggcatcaacggcgacatccgcgccaagaagatcgcctccatcgccgacgtctgcgagtccatgaaggagcagctcctcgtcctcgtcgagtgggccaagtacatccccgccttctgcgagctccccctcgacgaccaggtcgccctcctccgcgcccacgccggcgagcacctcctcctcggcgccaccaagcgctccatggtcttcaaggacgtcctcctcctcggcaacgactacatcgtcccccgccactgccccgagctcgccgagatgtcccgcgtctccatccgcatcctcgacgagctcgtcctccccttccaggagctccagatcgacgacaacgagtacgcctacctcaaggccatcatcttcttcgaccccgacgccaagggcctctccgaccccggcaagatcaagcgcctccgcgcccaggtccaggtctccctcgaggactacatcaacgaccgccagtacgactcccgcggccgcttcggcgagctcctcctcctcctccccaccctccagtccatcacctggcagatgatcgagcagatccagttcatcaagctcttcggcatggccaagatcgacaacctcctccaggagatgctcctcggcggctccccctccgacgccccccacgcccaccaccccctccacccccacctcatgcaggagcacatgggcaccaacgtcatcgtcgccaacaccatgcccacccacctctccaacggccagatgtgcgagtggccccgcccccgcggccaggccgccacccccgagaccccccagccctccccccccggcggctccggctccgagccctacaagctcctccccggcgccgtcgccaccatcgtcaagcccctctccgccatcccccagcccaccatcaccaagcaggaggtcatctgaggactagtccctgttcccagagcccacttttttttctttttttgaaataaaatagcctgtctttcagatctaaaaaaaaaaaaaaaaaaaaaaaaaaaaaaaaaaaaaaaaaaaaaaaaaaaaaaaaaaaaaaaaaaaaaaaaaaaaaaaaaaaaaaaaaaaaaaaaaaaa

SEQ ID NO: 4336 - RNA, 1673 nt, synthetic construct
  misc_feature 1..1673: note = mRNA a-1 (A100) (opt2) from Homo sapiens__NP_000448.3__HNF4A(1-474)(S313E)
  source 1..1673: mol_type = other RNA
aggagagtcccgcagtcggcgtccagcggctctgcttgttcgtgtgtgtgtcgttgcaggccttattcaagcttaccatgcgcctctccaagaccctcgtcgacatggacatggccgactactccgccgccctcgaccccgcctacaccaccctcgagttcgagaacgtccaggtcctcaccatgggcaacgacacctccccctccgagggcaccaacctcaacgcccccaactccctcggcgtctccgccctctgcgccatctgcggcgaccgcgccaccggcaagcactacggcgcctcctcctgcgacggctgcaagggcttcttccgccgctccgtccgcaagaaccacatgtactcctgccgcttctcccgccagtgcgtcgtcgacaaggacaagcgcaaccagtgccgctactgccgcctcaagaagtgcttccgcgccggcatgaagaaggaggccgtccagaacgagcgcgaccgcatctccacccgccgctcctcctacgaggactcctccctcccctccatcaacgccctcctccaggccgaggtcctctcccgccagatcacctcccccgtctccggcatcaacggcgacatccgcgccaagaagatcgcctccatcgccgacgtctgcgagtccatgaaggagcagctcctcgtcctcgtcgagtgggccaagtacatccccgccttctgcgagctccccctcgacgaccaggtcgccctcctccgcgcccacgccggcgagcacctcctcctcggcgccaccaagcgctccatggtcttcaaggacgtcctcctcctcggcaacgactacatcgtcccccgccactgccccgagctcgccgagatgtcccgcgtctccatccgcatcctcgacgagctcgtcctccccttccaggagctccagatcgacgacaacgagtacgcctacctcaaggccatcatcttcttcgaccccgacgccaagggcctctccgaccccggcaagatcaagcgcctccgcgagcaggtccaggtctccctcgaggactacatcaacgaccgccagtacgactcccgcggccgcttcggcgagctcctcctcctcctccccaccctccagtccatcacctggcagatgatcgagcagatccagttcatcaagctcttcggcatggccaagatcgacaacctcctccaggagatgctcctcggcggctccccctccgacgccccccacgcccaccaccccctccacccccacctcatgcaggagcacatgggcaccaacgtcatcgtcgccaacaccatgcccacccacctctccaacggccagatgtgcgagtggccccgcccccgcggccaggccgccacccccgagaccccccagccctccccccccggcggctccggctccgagccctacaagctcctccccggcgccgtcgccaccatcgtcaagcccctctccgccatcccccagcccaccatcaccaagcaggaggtcatctgaggactagtccctgttcccagagcccacttttttttctttttttgaaataaaatagcctgtctttcagatctaaaaaaaaaaaaaaaaaaaaaaaaaaaaaaaaaaaaaaaaaaaaaaaaaaaaaaaaaaaaaaaaaaaaaaaaaaaaaaaaaaaaaaaaaaaaaaaaaaaa

SEQ ID NO: 4337 - RNA, 1673 nt, synthetic construct
  misc_feature 1..1673: note = mRNA a-1 (A100) (opt2) from Homo sapiens__NP_000448.3__HNF4A(1-474)(S142A_S143A)
  source 1..1673: mol_type = other RNA
aggagagtcccgcagtcggcgtccagcggctctgcttgttcgtgtgtgtgtcgttgcaggccttattcaagcttaccatgcgcctctccaagaccctcgtcgacatggacatggccgactactccgccgccctcgaccccgcctacaccaccctcgagttcgagaacgtccaggtcctcaccatgggcaacgacacctccccctccgagggcaccaacctcaacgcccccaactccctcggcgtctccgccctctgcgccatctgcggcgaccgcgccaccggcaagcactacggcgcctcctcctgcgacggctgcaagggcttcttccgccgctccgtccgcaagaaccacatgtactcctgccgcttctcccgccagtgcgtcgtcgacaaggacaagcgcaaccagtgccgctactgccgcctcaagaagtgcttccgcgccggcatgaagaaggaggccgtccagaacgagcgcgaccgcatctccacccgccgcgccgcctacgaggactcctccctcccctccatcaacgccctcctccaggccgaggtcctctcccgccagatcacctcccccgtctccggcatcaacggcgacatccgcgccaagaagatcgcctccatcgccgacgtctgcgagtccatgaaggagcagctcctcgtcctcgtcgagtgggccaagtacatccccgccttctgcgagctccccctcgacgaccaggtcgccctcctccgcgcccacgccggcgagcacctcctcctcggcgccaccaagcgctccatggtcttcaaggacgtcctcctcctcggcaacgactacatcgtcccccgccactgccccgagctcgccgagatgtcccgcgtctccatccgcatcctcgacgagctcgtcctccccttccaggagctccagatcgacgacaacgagtacgcctacctcaaggccatcatcttcttcgaccccgacgccaagggcctctccgaccccggcaagatcaagcgcctccgctcccaggtccaggtctccctcgaggactacatcaacgaccgccagtacgactcccgcggccgcttcggcgagctcctcctcctcctccccaccctccagtccatcacctggcagatgatcgagcagatccagttcatcaagctcttcggcatggccaagatcgacaacctcctccaggagatgctcctcggcggctccccctccgacgccccccacgcccaccaccccctccacccccacctcatgcaggagcacatgggcaccaacgtcatcgtcgccaacaccatgcccacccacctctccaacggccagatgtgcgagtggccccgcccccgcggccaggccgccacccccgagaccccccagccctccccccccggcggctccggctccgagccctacaagctcctccccggcgccgtcgccaccatcgtcaagcccctctccgccatcccccagcccaccatcaccaagcaggaggtcatctgaggactagtccctgttcccagagcccacttttttttctttttttgaaataaaatagcctgtctttcagatctaaaaaaaaaaaaaaaaaaaaaaaaaaaaaaaaaaaaaaaaaaaaaaaaaaaaaaaaaaaaaaaaaaaaaaaaaaaaaaaaaaaaaaaaaaaaaaaaaaaa

SEQ ID NO: 4338 - RNA, 1673 nt, synthetic construct
  misc_feature 1..1673: note = mRNA a-1 (A100) (opt2) from Homo sapiens__NP_000448.3__HNF4A(1-474)(S142E_S143E)
  source 1..1673: mol_type = other RNA
aggagagtcccgcagtcggcgtccagcggctctgcttgttcgtgtgtgtgtcgttgcaggccttattcaagcttaccatgcgcctctccaagaccctcgtcgacatggacatggccgactactccgccgccctcgaccccgcctacaccaccctcgagttcgagaacgtccaggtcctcaccatgggcaacgacacctccccctccgagggcaccaacctcaacgcccccaactccctcggcgtctccgccctctgcgccatctgcggcgaccgcgccaccggcaagcactacggcgcctcctcctgcgacggctgcaagggcttcttccgccgctccgtccgcaagaaccacatgtactcctgccgcttctcccgccagtgcgtcgtcgacaaggacaagcgcaaccagtgccgctactgccgcctcaagaagtgcttccgcgccggcatgaagaaggaggccgtccagaacgagcgcgaccgcatctccacccgccgcgaggagtacgaggactcctccctcccctccatcaacgccctcctccaggccgaggtcctctcccgccagatcacctcccccgtctccggcatcaacggcgacatccgcgccaagaagatcgcctccatcgccgacgtctgcgagtccatgaaggagcagctcctcgtcctcgtcgagtgggccaagtacatccccgccttctgcgagctccccctcgacgaccaggtcgccctcctccgcgcccacgccggcgagcacctcctcctcggcgccaccaagcgctccatggtcttcaaggacgtcctcctcctcggcaacgactacatcgtcccccgccactgccccgagctcgccgagatgtcccgcgtctccatccgcatcctcgacgagctcgtcctccccttccaggagctccagatcgacgacaacgagtacgcctacctcaaggccatcatcttcttcgaccccgacgccaagggcctctccgaccccggcaagatcaagcgcctccgctcccaggtccaggtctccctcgaggactacatcaacgaccgccagtacgactcccgcggccgcttcggcgagctcctcctcctcctccccaccctccagtccatcacctggcagatgatcgagcagatccagttcatcaagctcttcggcatggccaagatcgacaacctcctccaggagatgctcctcggcggctccccctccgacgccccccacgcccaccaccccctccacccccacctcatgcaggagcacatgggcaccaacgtcatcgtcgccaacaccatgcccacccacctctccaacggccagatgtgcgagtggccccgcccccgcggccaggccgccacccccgagaccccccagccctccccccccggcggctccggctccgagccctacaagctcctccccggcgccgtcgccaccatcgtcaagcccctctccgccatcccccagcccaccatcaccaagcaggaggtcatctgaggactagtccctgttcccagagcccacttttttttctttttttgaaataaaatagcctgtctttcagatctaaaaaaaaaaaaaaaaaaaaaaaaaaaaaaaaaaaaaaaaaaaaaaaaaaaaaaaaaaaaaaaaaaaaaaaaaaaaaaaaaaaaaaaaaaaaaaaaaaaa

SEQ ID NO: 4339 - RNA, 1673 nt, synthetic construct
  misc_feature 1..1673: note = mRNA a-1 (A100) (opt2) from Homo sapiens__NP_000448.3__HNF4A(1-474)(S143A)
  source 1..1673: mol_type = other RNA
aggagagtcccgcagtcggcgtccagcggctctgcttgttcgtgtgtgtgtcgttgcaggccttattcaagcttaccatgcgcctctccaagaccctcgtcgacatggacatggccgactactccgccgccctcgaccccgcctacaccaccctcgagttcgagaacgtccaggtcctcaccatgggcaacgacacctccccctccgagggcaccaacctcaacgcccccaactccctcggcgtctccgccctctgcgccatctgcggcgaccgcgccaccggcaagcactacggcgcctcctcctgcgacggctgcaagggcttcttccgccgctccgtccgcaagaaccacatgtactcctgccgcttctcccgccagtgcgtcgtcgacaaggacaagcgcaaccagtgccgctactgccgcctcaagaagtgcttccgcgccggcatgaagaaggaggccgtccagaacgagcgcgaccgcatctccacccgccgctccgcctacgaggactcctccctcccctccatcaacgccctcctccaggccgaggtcctctcccgccagatcacctcccccgtctccggcatcaacggcgacatccgcgccaagaagatcgcctccatcgccgacgtctgcgagtccatgaaggagcagctcctcgtcctcgtcgagtgggccaagtacatccccgccttctgcgagctccccctcgacgaccaggtcgccctcctccgcgcccacgccggcgagcacctcctcctcggcgccaccaagcgctccatggtcttcaaggacgtcctcctcctcggcaacgactacatcgtcccccgccactgccccgagctcgccgagatgtcccgcgtctccatccgcatcctcgacgagctcgtcctccccttccaggagctccagatcgacgacaacgagtacgcctacctcaaggccatcatcttcttcgaccccgacgccaagggcctctccgaccccggcaagatcaagcgcctccgctcccaggtccaggtctccctcgaggactacatcaacgaccgccagtacgactcccgcggccgcttcggcgagctcctcctcctcctccccaccctccagtccatcacctggcagatgatcgagcagatccagttcatcaagctcttcggcatggccaagatcgacaacctcctccaggagatgctcctcggcggctccccctccgacgccccccacgcccaccaccccctccacccccacctcatgcaggagcacatgggcaccaacgtcatcgtcgccaacaccatgcccacccacctctccaacggccagatgtgcgagtggccccgcccccgcggccaggccgccacccccgagaccccccagccctccccccccggcggctccggctccgagccctacaagctcctccccggcgccgtcgccaccatcgtcaagcccctctccgccatcccccagcccaccatcaccaagcaggaggtcatctgaggactagtccctgttcccagagcccacttttttttctttttttgaaataaaatagcctgtctttcagatctaaaaaaaaaaaaaaaaaaaaaaaaaaaaaaaaaaaaaaaaaaaaaaaaaaaaaaaaaaaaaaaaaaaaaaaaaaaaaaaaaaaaaaaaaaaaaaaaaaaa

SEQ ID NO: 4340 - RNA, 1673 nt, synthetic construct
  misc_feature 1..1673: note = mRNA a-1 (A100) (opt2) from Homo sapiens__NP_000448.3__HNF4A(1-474)(T166A)
  source 1..1673: mol_type = other RNA
aggagagtcccgcagtcggcgtccagcggctctgcttgttcgtgtgtgtgtcgttgcaggccttattcaagcttaccatgcgcctctccaagaccctcgtcgacatggacatggccgactactccgccgccctcgaccccgcctacaccaccctcgagttcgagaacgtccaggtcctcaccatgggcaacgacacctccccctccgagggcaccaacctcaacgcccccaactccctcggcgtctccgccctctgcgccatctgcggcgaccgcgccaccggcaagcactacggcgcctcctcctgcgacggctgcaagggcttcttccgccgctccgtccgcaagaaccacatgtactcctgccgcttctcccgccagtgcgtcgtcgacaaggacaagcgcaaccagtgccgctactgccgcctcaagaagtgcttccgcgccggcatgaagaaggaggccgtccagaacgagcgcgaccgcatctccacccgccgctcctcctacgaggactcctccctcccctccatcaacgccctcctccaggccgaggtcctctcccgccagatcgcctcccccgtctccggcatcaacggcgacatccgcgccaagaagatcgcctccatcgccgacgtctgcgagtccatgaaggagcagctcctcgtcctcgtcgagtgggccaagtacatccccgccttctgcgagctccccctcgacgaccaggtcgccctcctccgcgcccacgccggcgagcacctcctcctcggcgccaccaagcgctccatggtcttcaaggacgtcctcctcctcggcaacgactacatcgtcccccgccactgccccgagctcgccgagatgtcccgcgtctccatccgcatcctcgacgagctcgtcctccccttccaggagctccagatcgacgacaacgagtacgcctacctcaaggccatcatcttcttcgaccccgacgccaagggcctctccgaccccggcaagatcaagcgcctccgctcccaggtccaggtctccctcgaggactacatcaacgaccgccagtacgactcccgcggccgcttcggcgagctcctcctcctcctccccaccctccagtccatcacctggcagatgatcgagcagatccagttcatcaagctcttcggcatggccaagatcgacaacctcctccaggagatgctcctcggcggctccccctccgacgccccccacgcccaccaccccctccacccccacctcatgcaggagcacatgggcaccaacgtcatcgtcgccaacaccatgcccacccacctctccaacggccagatgtgcgagtggccccgcccccgcggccaggccgccacccccgagaccccccagccctccccccccggcggctccggctccgagccctacaagctcctccccggcgccgtcgccaccatcgtcaagcccctctccgccatcccccagcccaccatcaccaagcaggaggtcatctgaggactagtccctgttcccagagcccacttttttttctttttttgaaataaaatagcctgtctttcagatctaaaaaaaaaaaaaaaaaaaaaaaaaaaaaaaaaaaaaaaaaaaaaaaaaaaaaaaaaaaaaaaaaaaaaaaaaaaaaaaaaaaaaaaaaaaaaaaaaaaa

SEQ ID NO: 4341 - RNA, 1673 nt, synthetic construct
  misc_feature 1..1673: note = mRNA a-1 (A100) (opt2) from Homo sapiens__NP_000448.3__HNF4A(1-474)(S167E)
  source 1..1673: mol_type = other RNA
aggagagtcccgcagtcggcgtccagcggctctgcttgttcgtgtgtgtgtcgttgcaggccttattcaagcttaccatgcgcctctccaagaccctcgtcgacatggacatggccgactactccgccgccctcgaccccgcctacaccaccctcgagttcgagaacgtccaggtcctcaccatgggcaacgacacctccccctccgagggcaccaacctcaacgcccccaactccctcggcgtctccgccctctgcgccatctgcggcgaccgcgccaccggcaagcactacggcgcctcctcctgcgacggctgcaagggcttcttccgccgctccgtccgcaagaaccacatgtactcctgccgcttctcccgccagtgcgtcgtcgacaaggacaagcgcaaccagtgccgctactgccgcctcaagaagtgcttccgcgccggcatgaagaaggaggccgtccagaacgagcgcgaccgcatctccacccgccgctcctcctacgaggactcctccctcccctccatcaacgccctcctccaggccgaggtcctctcccgccagatcaccgagcccgtctccggcatcaacggcgacatccgcgccaagaagatcgcctccatcgccgacgtctgcgagtccatgaaggagcagctcctcgtcctcgtcgagtgggccaagtacatccccgccttctgcgagctccccctcgacgaccaggtcgccctcctccgcgcccacgccggcgagcacctcctcctcggcgccaccaagcgctccatggtcttcaaggacgtcctcctcctcggcaacgactacatcgtcccccgccactgccccgagctcgccgagatgtcccgcgtctccatccgcatcctcgacgagctcgtcctccccttccaggagctccagatcgacgacaacgagtacgcctacctcaaggccatcatcttcttcgaccccgacgccaagggcctctccgaccccggcaagatcaagcgcctccgctcccaggtccaggtctccctcgaggactacatcaacgaccgccagtacgactcccgcggccgcttcggcgagctcctcctcctcctccccaccctccagtccatcacctggcagatgatcgagcagatccagttcatcaagctcttcggcatggccaagatcgacaacctcctccaggagatgctcctcggcggctccccctccgacgccccccacgcccaccaccccctccacccccacctcatgcaggagcacatgggcaccaacgtcatcgtcgccaacaccatgcccacccacctctccaacggccagatgtgcgagtggccccgcccccgcggccaggccgccacccccgagaccccccagccctccccccccggcggctccggctccgagccctacaagctcctccccggcgccgtcgccaccatcgtcaagcccctctccgccatcccccagcccaccatcaccaagcaggaggtcatctgaggactagtccctgttcccagagcccacttttttttctttttttgaaataaaatagcctgtctttcagatctaaaaaaaaaaaaaaaaaaaaaaaaaaaaaaaaaaaaaaaaaaaaaaaaaaaaaaaaaaaaaaaaaaaaaaaaaaaaaaaaaaaaaaaaaaaaaaaaaaaa

SEQ ID NO: 4342 - RNA, 1673 nt, synthetic construct
  misc_feature 1..1673: note = mRNA a-1 (A100) (opt2) from Homo sapiens__NP_000448.3__HNF4A(1-474)(S167A)
  source 1..1673: mol_type = other RNA
aggagagtcccgcagtcggcgtccagcggctctgcttgttcgtgtgtgtgtcgttgcaggccttattcaagcttaccatgcgcctctccaagaccctcgtcgacatggacatggccgactactccgccgccctcgaccccgcctacaccaccctcgagttcgagaacgtccaggtcctcaccatgggcaacgacacctccccctccgagggcaccaacctcaacgcccccaactccctcggcgtctccgccctctgcgccatctgcggcgaccgcgccaccggcaagcactacggcgcctcctcctgcgacggctgcaagggcttcttccgccgctccgtccgcaagaaccacatgtactcctgccgcttctcccgccagtgcgtcgtcgacaaggacaagcgcaaccagtgccgctactgccgcctcaagaagtgcttccgcgccggcatgaagaaggaggccgtccagaacgagcgcgaccgcatctccacccgccgctcctcctacgaggactcctccctcccctccatcaacgccctcctccaggccgaggtcctctcccgccagatcaccgcccccgtctccggcatcaacggcgacatccgcgccaagaagatcgcctccatcgccgacgtctgcgagtccatgaaggagcagctcctcgtcctcgtcgagtgggccaagtacatccccgccttctgcgagctccccctcgacgaccaggtcgccctcctccgcgcccacgccggcgagcacctcctcctcggcgccaccaagcgctccatggtcttcaaggacgtcctcctcctcggcaacgactacatcgtcccccgccactgccccgagctcgccgagatgtcccgcgtctccatccgcatcctcgacgagctcgtcctccccttccaggagctccagatcgacgacaacgagtacgcctacctcaaggccatcatcttcttcgaccccgacgccaagggcctctccgaccccggcaagatcaagcgcctccgctcccaggtccaggtctccctcgaggactacatcaacgaccgccagtacgactcccgcggccgcttcggcgagctcctcctcctcctccccaccctccagtccatcacctggcagatgatcgagcagatccagttcatcaagctcttcggcatggccaagatcgacaacctcctccaggagatgctcctcggcggctccccctccgacgccccccacgcccaccaccccctccacccccacctcatgcaggagcacatgggcaccaacgtcatcgtcgccaacaccatgcccacccacctctccaacggccagatgtgcgagtggccccgcccccgcggccaggccgccacccccgagaccccccagccctccccccccggcggctccggctccgagccctacaagctcctccccggcgccgtcgccaccatcgtcaagcccctctccgccatcccccagcccaccatcaccaagcaggaggtcatctgaggactagtccctgttcccagagcccacttttttttctttttttgaaataaaatagcctgtctttcagatctaaaaaaaaaaaaaaaaaaaaaaaaaaaaaaaaaaaaaaaaaaaaaaaaaaaaaaaaaaaaaaaaaaaaaaaaaaaaaaaaaaaaaaaaaaaaaaaaaaaa

SEQ ID NO: 4343 - RNA, 1673 nt, synthetic construct
  misc_feature 1..1673: note = mRNA a-1 (A100) (opt2) from Homo sapiens__NP_000448.3__HNF4A(1-474)(S167A_S378A_T429A_T432A_ S436A)
  source 1..1673: mol_type = other RNA
aggagagtcccgcagtcggcgtccagcggctctgcttgttcgtgtgtgtgtcgttgcaggccttattcaagcttaccatgcgcctctccaagaccctcgtcgacatggacatggccgactactccgccgccctcgaccccgcctacaccaccctcgagttcgagaacgtccaggtcctcaccatgggcaacgacacctccccctccgagggcaccaacctcaacgcccccaactccctcggcgtctccgccctctgcgccatctgcggcgaccgcgccaccggcaagcactacggcgcctcctcctgcgacggctgcaagggcttcttccgccgctccgtccgcaagaaccacatgtactcctgccgcttctcccgccagtgcgtcgtcgacaaggacaagcgcaaccagtgccgctactgccgcctcaagaagtgcttccgcgccggcatgaagaaggaggccgtccagaacgagcgcgaccgcatctccacccgccgctcctcctacgaggactcctccctcccctccatcaacgccctcctccaggccgaggtcctctcccgccagatcaccgcccccgtctccggcatcaacggcgacatccgcgccaagaagatcgcctccatcgccgacgtctgcgagtccatgaaggagcagctcctcgtcctcgtcgagtgggccaagtacatccccgccttctgcgagctccccctcgacgaccaggtcgccctcctccgcgcccacgccggcgagcacctcctcctcggcgccaccaagcgctccatggtcttcaaggacgtcctcctcctcggcaacgactacatcgtcccccgccactgccccgagctcgccgagatgtcccgcgtctccatccgcatcctcgacgagctcgtcctccccttccaggagctccagatcgacgacaacgagtacgcctacctcaaggccatcatcttcttcgaccccgacgccaagggcctctccgaccccggcaagatcaagcgcctccgctcccaggtccaggtctccctcgaggactacatcaacgaccgccagtacgactcccgcggccgcttcggcgagctcctcctcctcctccccaccctccagtccatcacctggcagatgatcgagcagatccagttcatcaagctcttcggcatggccaagatcgacaacctcctccaggagatgctcctcggcggcgccccctccgacgccccccacgcccaccaccccctccacccccacctcatgcaggagcacatgggcaccaacgtcatcgtcgccaacaccatgcccacccacctctccaacggccagatgtgcgagtggccccgcccccgcggccaggccgccgcccccgaggccccccagcccgccccccccggcggctccggctccgagccctacaagctcctccccggcgccgtcgccaccatcgtcaagcccctctccgccatcccccagcccaccatcaccaagcaggaggtcatctgaggactagtccctgttcccagagcccacttttttttctttttttgaaataaaatagcctgtctttcagatctaaaaaaaaaaaaaaaaaaaaaaaaaaaaaaaaaaaaaaaaaaaaaaaaaaaaaaaaaaaaaaaaaaaaaaaaaaaaaaaaaaaaaaaaaaaaaaaaaaaa

SEQ ID NO: 4344 - RNA, 1673 nt, synthetic construct
  misc_feature 1..1673: note = mRNA a-1 (A100) (opt2) from Homo sapiens__NP_000448.3__HNF4A(1-474)(S167E_S378E_T429E_T432E_ S436E)
  source 1..1673: mol_type = other RNA
aggagagtcccgcagtcggcgtccagcggctctgcttgttcgtgtgtgtgtcgttgcaggccttattcaagcttaccatgcgcctctccaagaccctcgtcgacatggacatggccgactactccgccgccctcgaccccgcctacaccaccctcgagttcgagaacgtccaggtcctcaccatgggcaacgacacctccccctccgagggcaccaacctcaacgcccccaactccctcggcgtctccgccctctgcgccatctgcggcgaccgcgccaccggcaagcactacggcgcctcctcctgcgacggctgcaagggcttcttccgccgctccgtccgcaagaaccacatgtactcctgccgcttctcccgccagtgcgtcgtcgacaaggacaagcgcaaccagtgccgctactgccgcctcaagaagtgcttccgcgccggcatgaagaaggaggccgtccagaacgagcgcgaccgcatctccacccgccgctcctcctacgaggactcctccctcccctccatcaacgccctcctccaggccgaggtcctctcccgccagatcaccgagcccgtctccggcatcaacggcgacatccgcgccaagaagatcgcctccatcgccgacgtctgcgagtccatgaaggagcagctcctcgtcctcgtcgagtgggccaagtacatccccgccttctgcgagctccccctcgacgaccaggtcgccctcctccgcgcccacgccggcgagcacctcctcctcggcgccaccaagcgctccatggtcttcaaggacgtcctcctcctcggcaacgactacatcgtcccccgccactgccccgagctcgccgagatgtcccgcgtctccatccgcatcctcgacgagctcgtcctccccttccaggagctccagatcgacgacaacgagtacgcctacctcaaggccatcatcttcttcgaccccgacgccaagggcctctccgaccccggcaagatcaagcgcctccgctcccaggtccaggtctccctcgaggactacatcaacgaccgccagtacgactcccgcggccgcttcggcgagctcctcctcctcctccccaccctccagtccatcacctggcagatgatcgagcagatccagttcatcaagctcttcggcatggccaagatcgacaacctcctccaggagatgctcctcggcggcgagccctccgacgccccccacgcccaccaccccctccacccccacctcatgcaggagcacatgggcaccaacgtcatcgtcgccaacaccatgcccacccacctctccaacggccagatgtgcgagtggccccgcccccgcggccaggccgccgagcccgaggagccccagcccgagccccccggcggctccggctccgagccctacaagctcctccccggcgccgtcgccaccatcgtcaagcccctctccgccatcccccagcccaccatcaccaagcaggaggtcatctgaggactagtccctgttcccagagcccacttttttttctttttttgaaataaaatagcctgtctttcagatctaaaaaaaaaaaaaaaaaaaaaaaaaaaaaaaaaaaaaaaaaaaaaaaaaaaaaaaaaaaaaaaaaaaaaaaaaaaaaaaaaaaaaaaaaaaaaaaaaaaa

SEQ ID NO: 4345 - RNA, 1673 nt, synthetic construct
  misc_feature 1..1673: note = mRNA a-1 (A100) (opt2) from Homo sapiens__NP_000448.3__HNF4A(1-474)(S87A)
  source 1..1673: mol_type = other RNA
aggagagtcccgcagtcggcgtccagcggctctgcttgttcgtgtgtgtgtcgttgcaggccttattcaagcttaccatgcgcctctccaagaccctcgtcgacatggacatggccgactactccgccgccctcgaccccgcctacaccaccctcgagttcgagaacgtccaggtcctcaccatgggcaacgacacctccccctccgagggcaccaacctcaacgcccccaactccctcggcgtctccgccctctgcgccatctgcggcgaccgcgccaccggcaagcactacggcgcctcctcctgcgacggctgcaagggcttcttccgccgcgccgtccgcaagaaccacatgtactcctgccgcttctcccgccagtgcgtcgtcgacaaggacaagcgcaaccagtgccgctactgccgcctcaagaagtgcttccgcgccggcatgaagaaggaggccgtccagaacgagcgcgaccgcatctccacccgccgctcctcctacgaggactcctccctcccctccatcaacgccctcctccaggccgaggtcctctcccgccagatcacctcccccgtctccggcatcaacggcgacatccgcgccaagaagatcgcctccatcgccgacgtctgcgagtccatgaaggagcagctcctcgtcctcgtcgagtgggccaagtacatccccgccttctgcgagctccccctcgacgaccaggtcgccctcctccgcgcccacgccggcgagcacctcctcctcggcgccaccaagcgctccatggtcttcaaggacgtcctcctcctcggcaacgactacatcgtcccccgccactgccccgagctcgccgagatgtcccgcgtctccatccgcatcctcgacgagctcgtcctccccttccaggagctccagatcgacgacaacgagtacgcctacctcaaggccatcatcttcttcgaccccgacgccaagggcctctccgaccccggcaagatcaagcgcctccgctcccaggtccaggtctccctcgaggactacatcaacgaccgccagtacgactcccgcggccgcttcggcgagctcctcctcctcctccccaccctccagtccatcacctggcagatgatcgagcagatccagttcatcaagctcttcggcatggccaagatcgacaacctcctccaggagatgctcctcggcggctccccctccgacgccccccacgcccaccaccccctccacccccacctcatgcaggagcacatgggcaccaacgtcatcgtcgccaacaccatgcccacccacctctccaacggccagatgtgcgagtggccccgcccccgcggccaggccgccacccccgagaccccccagccctccccccccggcggctccggctccgagccctacaagctcctccccggcgccgtcgccaccatcgtcaagcccctctccgccatcccccagcccaccatcaccaagcaggaggtcatctgaggactagtccctgttcccagagcccacttttttttctttttttgaaataaaatagcctgtctttcagatctaaaaaaaaaaaaaaaaaaaaaaaaaaaaaaaaaaaaaaaaaaaaaaaaaaaaaaaaaaaaaaaaaaaaaaaaaaaaaaaaaaaaaaaaaaaaaaaaaaaa

SEQ ID NO: 4346 - RNA, 1673 nt, synthetic construct
  misc_feature 1..1673: note = mRNA a-1 (A100) (opt2) from Homo sapiens__NP_000448.3__HNF4A(1-474)(S87E)
  source 1..1673: mol_type = other RNA
aggagagtcccgcagtcggcgtccagcggctctgcttgttcgtgtgtgtgtcgttgcaggccttattcaagcttaccatgcgcctctccaagaccctcgtcgacatggacatggccgactactccgccgccctcgaccccgcctacaccaccctcgagttcgagaacgtccaggtcctcaccatgggcaacgacacctccccctccgagggcaccaacctcaacgcccccaactccctcggcgtctccgccctctgcgccatctgcggcgaccgcgccaccggcaagcactacggcgcctcctcctgcgacggctgcaagggcttcttccgccgcgaggtccgcaagaaccacatgtactcctgccgcttctcccgccagtgcgtcgtcgacaaggacaagcgcaaccagtgccgctactgccgcctcaagaagtgcttccgcgccggcatgaagaaggaggccgtccagaacgagcgcgaccgcatctccacccgccgctcctcctacgaggactcctccctcccctccatcaacgccctcctccaggccgaggtcctctcccgccagatcacctcccccgtctccggcatcaacggcgacatccgcgccaagaagatcgcctccatcgccgacgtctgcgagtccatgaaggagcagctcctcgtcctcgtcgagtgggccaagtacatccccgccttctgcgagctccccctcgacgaccaggtcgccctcctccgcgcccacgccggcgagcacctcctcctcggcgccaccaagcgctccatggtcttcaaggacgtcctcctcctcggcaacgactacatcgtcccccgccactgccccgagctcgccgagatgtcccgcgtctccatccgcatcctcgacgagctcgtcctccccttccaggagctccagatcgacgacaacgagtacgcctacctcaaggccatcatcttcttcgaccccgacgccaagggcctctccgaccccggcaagatcaagcgcctccgctcccaggtccaggtctccctcgaggactacatcaacgaccgccagtacgactcccgcggccgcttcggcgagctcctcctcctcctccccaccctccagtccatcacctggcagatgatcgagcagatccagttcatcaagctcttcggcatggccaagatcgacaacctcctccaggagatgctcctcggcggctccccctccgacgccccccacgcccaccaccccctccacccccacctcatgcaggagcacatgggcaccaacgtcatcgtcgccaacaccatgcccacccacctctccaacggccagatgtgcgagtggccccgcccccgcggccaggccgccacccccgagaccccccagccctccccccccggcggctccggctccgagccctacaagctcctccccggcgccgtcgccaccatcgtcaagcccctctccgccatcccccagcccaccatcaccaagcaggaggtcatctgaggactagtccctgttcccagagcccacttttttttctttttttgaaataaaatagcctgtctttcagatctaaaaaaaaaaaaaaaaaaaaaaaaaaaaaaaaaaaaaaaaaaaaaaaaaaaaaaaaaaaaaaaaaaaaaaaaaaaaaaaaaaaaaaaaaaaaaaaaaaaa

SEQ ID NO: 4347 - RNA, 1673 nt, synthetic construct
  misc_feature 1..1673: note = mRNA a-1 (A100) (opt2) from Homo sapiens__NP_000448.3__HNF4A(1-474)(R2V)
  source 1..1673: mol_type = other RNA
aggagagtcccgcagtcggcgtccagcggctctgcttgttcgtgtgtgtgtcgttgcaggccttattcaagcttaccatggtcctctccaagaccctcgtcgacatggacatggccgactactccgccgccctcgaccccgcctacaccaccctcgagttcgagaacgtccaggtcctcaccatgggcaacgacacctccccctccgagggcaccaacctcaacgcccccaactccctcggcgtctccgccctctgcgccatctgcggcgaccgcgccaccggcaagcactacggcgcctcctcctgcgacggctgcaagggcttcttccgccgctccgtccgcaagaaccacatgtactcctgccgcttctcccgccagtgcgtcgtcgacaaggacaagcgcaaccagtgccgctactgccgcctcaagaagtgcttccgcgccggcatgaagaaggaggccgtccagaacgagcgcgaccgcatctccacccgccgctcctcctacgaggactcctccctcccctccatcaacgccctcctccaggccgaggtcctctcccgccagatcacctcccccgtctccggcatcaacggcgacatccgcgccaagaagatcgcctccatcgccgacgtctgcgagtccatgaaggagcagctcctcgtcctcgtcgagtgggccaagtacatccccgccttctgcgagctccccctcgacgaccaggtcgccctcctccgcgcccacgccggcgagcacctcctcctcggcgccaccaagcgctccatggtcttcaaggacgtcctcctcctcggcaacgactacatcgtcccccgccactgccccgagctcgccgagatgtcccgcgtctccatccgcatcctcgacgagctcgtcctccccttccaggagctccagatcgacgacaacgagtacgcctacctcaaggccatcatcttcttcgaccccgacgccaagggcctctccgaccccggcaagatcaagcgcctccgctcccaggtccaggtctccctcgaggactacatcaacgaccgccagtacgactcccgcggccgcttcggcgagctcctcctcctcctccccaccctccagtccatcacctggcagatgatcgagcagatccagttcatcaagctcttcggcatggccaagatcgacaacctcctccaggagatgctcctcggcggctccccctccgacgccccccacgcccaccaccccctccacccccacctcatgcaggagcacatgggcaccaacgtcatcgtcgccaacaccatgcccacccacctctccaacggccagatgtgcgagtggccccgcccccgcggccaggccgccacccccgagaccccccagccctccccccccggcggctccggctccgagccctacaagctcctccccggcgccgtcgccaccatcgtcaagcccctctccgccatcccccagcccaccatcaccaagcaggaggtcatctgaggactagtccctgttcccagagcccacttttttttctttttttgaaataaaatagcctgtctttcagatctaaaaaaaaaaaaaaaaaaaaaaaaaaaaaaaaaaaaaaaaaaaaaaaaaaaaaaaaaaaaaaaaaaaaaaaaaaaaaaaaaaaaaaaaaaaaaaaaaaaa

SEQ ID NO: 4348 - RNA, 1673 nt, synthetic construct
  misc_feature 1..1673: note = mRNA a-1 (A100) (opt2) from Homo sapiens__NP_000448.3__HNF4A(1-474)(R2V_K5V)
  source 1..1673: mol_type = other RNA
aggagagtcccgcagtcggcgtccagcggctctgcttgttcgtgtgtgtgtcgttgcaggccttattcaagcttaccatggtcctctccgtcaccctcgtcgacatggacatggccgactactccgccgccctcgaccccgcctacaccaccctcgagttcgagaacgtccaggtcctcaccatgggcaacgacacctccccctccgagggcaccaacctcaacgcccccaactccctcggcgtctccgccctctgcgccatctgcggcgaccgcgccaccggcaagcactacggcgcctcctcctgcgacggctgcaagggcttcttccgccgctccgtccgcaagaaccacatgtactcctgccgcttctcccgccagtgcgtcgtcgacaaggacaagcgcaaccagtgccgctactgccgcctcaagaagtgcttccgcgccggcatgaagaaggaggccgtccagaacgagcgcgaccgcatctccacccgccgctcctcctacgaggactcctccctcccctccatcaacgccctcctccaggccgaggtcctctcccgccagatcacctcccccgtctccggcatcaacggcgacatccgcgccaagaagatcgcctccatcgccgacgtctgcgagtccatgaaggagcagctcctcgtcctcgtcgagtgggccaagtacatccccgccttctgcgagctccccctcgacgaccaggtcgccctcctccgcgcccacgccggcgagcacctcctcctcggcgccaccaagcgctccatggtcttcaaggacgtcctcctcctcggcaacgactacatcgtcccccgccactgccccgagctcgccgagatgtcccgcgtctccatccgcatcctcgacgagctcgtcctccccttccaggagctccagatcgacgacaacgagtacgcctacctcaaggccatcatcttcttcgaccccgacgccaagggcctctccgaccccggcaagatcaagcgcctccgctcccaggtccaggtctccctcgaggactacatcaacgaccgccagtacgactcccgcggccgcttcggcgagctcctcctcctcctccccaccctccagtccatcacctggcagatgatcgagcagatccagttcatcaagctcttcggcatggccaagatcgacaacctcctccaggagatgctcctcggcggctccccctccgacgccccccacgcccaccaccccctccacccccacctcatgcaggagcacatgggcaccaacgtcatcgtcgccaacaccatgcccacccacctctccaacggccagatgtgcgagtggccccgcccccgcggccaggccgccacccccgagaccccccagccctccccccccggcggctccggctccgagccctacaagctcctccccggcgccgtcgccaccatcgtcaagcccctctccgccatcccccagcccaccatcaccaagcaggaggtcatctgaggactagtccctgttcccagagcccacttttttttctttttttgaaataaaatagcctgtctttcagatctaaaaaaaaaaaaaaaaaaaaaaaaaaaaaaaaaaaaaaaaaaaaaaaaaaaaaaaaaaaaaaaaaaaaaaaaaaaaaaaaaaaaaaaaaaaaaaaaaaaa

SEQ ID NO: 4349 - RNA, 1673 nt, synthetic construct
  misc_feature 1..1673: note = mRNA a-1 (A100) (opt2) from Homo sapiens__NP_000448.3__HNF4A(1-474)(K179R_K180R)
  source 1..1673: mol_type = other RNA
aggagagtcccgcagtcggcgtccagcggctctgcttgttcgtgtgtgtgtcgttgcaggccttattcaagcttaccatgcgcctctccaagaccctcgtcgacatggacatggccgactactccgccgccctcgaccccgcctacaccaccctcgagttcgagaacgtccaggtcctcaccatgggcaacgacacctccccctccgagggcaccaacctcaacgcccccaactccctcggcgtctccgccctctgcgccatctgcggcgaccgcgccaccggcaagcactacggcgcctcctcctgcgacggctgcaagggcttcttccgccgctccgtccgcaagaaccacatgtactcctgccgcttctcccgccagtgcgtcgtcgacaaggacaagcgcaaccagtgccgctactgccgcctcaagaagtgcttccgcgccggcatgaagaaggaggccgtccagaacgagcgcgaccgcatctccacccgccgctcctcctacgaggactcctccctcccctccatcaacgccctcctccaggccgaggtcctctcccgccagatcacctcccccgtctccggcatcaacggcgacatccgcgcccgccgcatcgcctccatcgccgacgtctgcgagtccatgaaggagcagctcctcgtcctcgtcgagtgggccaagtacatccccgccttctgcgagctccccctcgacgaccaggtcgccctcctccgcgcccacgccggcgagcacctcctcctcggcgccaccaagcgctccatggtcttcaaggacgtcctcctcctcggcaacgactacatcgtcccccgccactgccccgagctcgccgagatgtcccgcgtctccatccgcatcctcgacgagctcgtcctccccttccaggagctccagatcgacgacaacgagtacgcctacctcaaggccatcatcttcttcgaccccgacgccaagggcctctccgaccccggcaagatcaagcgcctccgctcccaggtccaggtctccctcgaggactacatcaacgaccgccagtacgactcccgcggccgcttcggcgagctcctcctcctcctccccaccctccagtccatcacctggcagatgatcgagcagatccagttcatcaagctcttcggcatggccaagatcgacaacctcctccaggagatgctcctcggcggctccccctccgacgccccccacgcccaccaccccctccacccccacctcatgcaggagcacatgggcaccaacgtcatcgtcgccaacaccatgcccacccacctctccaacggccagatgtgcgagtggccccgcccccgcggccaggccgccacccccgagaccccccagccctccccccccggcggctccggctccgagccctacaagctcctccccggcgccgtcgccaccatcgtcaagcccctctccgccatcccccagcccaccatcaccaagcaggaggtcatctgaggactagtccctgttcccagagcccacttttttttctttttttgaaataaaatagcctgtctttcagatctaaaaaaaaaaaaaaaaaaaaaaaaaaaaaaaaaaaaaaaaaaaaaaaaaaaaaaaaaaaaaaaaaaaaaaaaaaaaaaaaaaaaaaaaaaaaaaaaaaaa

SEQ ID NO: 4350 - RNA, 1673 nt, synthetic construct
  misc_feature 1..1673: note = mRNA a-1 (A100) (opt2) from Homo sapiens__NP_000448.3__HNF4A(1-474)(K234R)
  source 1..1673: mol_type = other RNA
aggagagtcccgcagtcggcgtccagcggctctgcttgttcgtgtgtgtgtcgttgcaggccttattcaagcttaccatgcgcctctccaagaccctcgtcgacatggacatggccgactactccgccgccctcgaccccgcctacaccaccctcgagttcgagaacgtccaggtcctcaccatgggcaacgacacctccccctccgagggcaccaacctcaacgcccccaactccctcggcgtctccgccctctgcgccatctgcggcgaccgcgccaccggcaagcactacggcgcctcctcctgcgacggctgcaagggcttcttccgccgctccgtccgcaagaaccacatgtactcctgccgcttctcccgccagtgcgtcgtcgacaaggacaagcgcaaccagtgccgctactgccgcctcaagaagtgcttccgcgccggcatgaagaaggaggccgtccagaacgagcgcgaccgcatctccacccgccgctcctcctacgaggactcctccctcccctccatcaacgccctcctccaggccgaggtcctctcccgccagatcacctcccccgtctccggcatcaacggcgacatccgcgccaagaagatcgcctccatcgccgacgtctgcgagtccatgaaggagcagctcctcgtcctcgtcgagtgggccaagtacatccccgccttctgcgagctccccctcgacgaccaggtcgccctcctccgcgcccacgccggcgagcacctcctcctcggcgccacccgccgctccatggtcttcaaggacgtcctcctcctcggcaacgactacatcgtcccccgccactgccccgagctcgccgagatgtcccgcgtctccatccgcatcctcgacgagctcgtcctccccttccaggagctccagatcgacgacaacgagtacgcctacctcaaggccatcatcttcttcgaccccgacgccaagggcctctccgaccccggcaagatcaagcgcctccgctcccaggtccaggtctccctcgaggactacatcaacgaccgccagtacgactcccgcggccgcttcggcgagctcctcctcctcctccccaccctccagtccatcacctggcagatgatcgagcagatccagttcatcaagctcttcggcatggccaagatcgacaacctcctccaggagatgctcctcggcggctccccctccgacgccccccacgcccaccaccccctccacccccacctcatgcaggagcacatgggcaccaacgtcatcgtcgccaacaccatgcccacccacctctccaacggccagatgtgcgagtggccccgcccccgcggccaggccgccacccccgagaccccccagccctccccccccggcggctccggctccgagccctacaagctcctccccggcgccgtcgccaccatcgtcaagcccctctccgccatcccccagcccaccatcaccaagcaggaggtcatctgaggactagtccctgttcccagagcccacttttttttctttttttgaaataaaatagcctgtctttcagatctaaaaaaaaaaaaaaaaaaaaaaaaaaaaaaaaaaaaaaaaaaaaaaaaaaaaaaaaaaaaaaaaaaaaaaaaaaaaaaaaaaaaaaaaaaaaaaaaaaaa

SEQ ID NO: 4351 - RNA, 1673 nt, synthetic construct
  misc_feature 1..1673: note = mRNA a-1 (A100) (opt2) from Homo sapiens__NP_000448.3__HNF4A(1-474)(K300R)
  source 1..1673: mol_type = other RNA
aggagagtcccgcagtcggcgtccagcggctctgcttgttcgtgtgtgtgtcgttgcaggccttattcaagcttaccatgcgcctctccaagaccctcgtcgacatggacatggccgactactccgccgccctcgaccccgcctacaccaccctcgagttcgagaacgtccaggtcctcaccatgggcaacgacacctccccctccgagggcaccaacctcaacgcccccaactccctcggcgtctccgccctctgcgccatctgcggcgaccgcgccaccggcaagcactacggcgcctcctcctgcgacggctgcaagggcttcttccgccgctccgtccgcaagaaccacatgtactcctgccgcttctcccgccagtgcgtcgtcgacaaggacaagcgcaaccagtgccgctactgccgcctcaagaagtgcttccgcgccggcatgaagaaggaggccgtccagaacgagcgcgaccgcatctccacccgccgctcctcctacgaggactcctccctcccctccatcaacgccctcctccaggccgaggtcctctcccgccagatcacctcccccgtctccggcatcaacggcgacatccgcgccaagaagatcgcctccatcgccgacgtctgcgagtccatgaaggagcagctcctcgtcctcgtcgagtgggccaagtacatccccgccttctgcgagctccccctcgacgaccaggtcgccctcctccgcgcccacgccggcgagcacctcctcctcggcgccaccaagcgctccatggtcttcaaggacgtcctcctcctcggcaacgactacatcgtcccccgccactgccccgagctcgccgagatgtcccgcgtctccatccgcatcctcgacgagctcgtcctccccttccaggagctccagatcgacgacaacgagtacgcctacctcaaggccatcatcttcttcgaccccgacgcccgcggcctctccgaccccggcaagatcaagcgcctccgctcccaggtccaggtctccctcgaggactacatcaacgaccgccagtacgactcccgcggccgcttcggcgagctcctcctcctcctccccaccctccagtccatcacctggcagatgatcgagcagatccagttcatcaagctcttcggcatggccaagatcgacaacctcctccaggagatgctcctcggcggctccccctccgacgccccccacgcccaccaccccctccacccccacctcatgcaggagcacatgggcaccaacgtcatcgtcgccaacaccatgcccacccacctctccaacggccagatgtgcgagtggccccgcccccgcggccaggccgccacccccgagaccccccagccctccccccccggcggctccggctccgagccctacaagctcctccccggcgccgtcgccaccatcgtcaagcccctctccgccatcccccagcccaccatcaccaagcaggaggtcatctgaggactagtccctgttcccagagcccacttttttttctttttttgaaataaaatagcctgtctttcagatctaaaaaaaaaaaaaaaaaaaaaaaaaaaaaaaaaaaaaaaaaaaaaaaaaaaaaaaaaaaaaaaaaaaaaaaaaaaaaaaaaaaaaaaaaaaaaaaaaaaa

SEQ ID NO: 4352 - RNA, 1673 nt, synthetic construct
  misc_feature 1..1673: note = mRNA a-1 (A100) (opt2) from Homo sapiens__NP_000448.3__HNF4A(1-474)(K300R_K307R_K309R)
  source 1..1673: mol_type = other RNA
aggagagtcccgcagtcggcgtccagcggctctgcttgttcgtgtgtgtgtcgttgcaggccttattcaagcttaccatgcgcctctccaagaccctcgtcgacatggacatggccgactactccgccgccctcgaccccgcctacaccaccctcgagttcgagaacgtccaggtcctcaccatgggcaacgacacctccccctccgagggcaccaacctcaacgcccccaactccctcggcgtctccgccctctgcgccatctgcggcgaccgcgccaccggcaagcactacggcgcctcctcctgcgacggctgcaagggcttcttccgccgctccgtccgcaagaaccacatgtactcctgccgcttctcccgccagtgcgtcgtcgacaaggacaagcgcaaccagtgccgctactgccgcctcaagaagtgcttccgcgccggcatgaagaaggaggccgtccagaacgagcgcgaccgcatctccacccgccgctcctcctacgaggactcctccctcccctccatcaacgccctcctccaggccgaggtcctctcccgccagatcacctcccccgtctccggcatcaacggcgacatccgcgccaagaagatcgcctccatcgccgacgtctgcgagtccatgaaggagcagctcctcgtcctcgtcgagtgggccaagtacatccccgccttctgcgagctccccctcgacgaccaggtcgccctcctccgcgcccacgccggcgagcacctcctcctcggcgccaccaagcgctccatggtcttcaaggacgtcctcctcctcggcaacgactacatcgtcccccgccactgccccgagctcgccgagatgtcccgcgtctccatccgcatcctcgacgagctcgtcctccccttccaggagctccagatcgacgacaacgagtacgcctacctcaaggccatcatcttcttcgaccccgacgcccgcggcctctccgaccccggccgcatccgccgcctccgctcccaggtccaggtctccctcgaggactacatcaacgaccgccagtacgactcccgcggccgcttcggcgagctcctcctcctcctccccaccctccagtccatcacctggcagatgatcgagcagatccagttcatcaagctcttcggcatggccaagatcgacaacctcctccaggagatgctcctcggcggctccccctccgacgccccccacgcccaccaccccctccacccccacctcatgcaggagcacatgggcaccaacgtcatcgtcgccaacaccatgcccacccacctctccaacggccagatgtgcgagtggccccgcccccgcggccaggccgccacccccgagaccccccagccctccccccccggcggctccggctccgagccctacaagctcctccccggcgccgtcgccaccatcgtcaagcccctctccgccatcccccagcccaccatcaccaagcaggaggtcatctgaggactagtccctgttcccagagcccacttttttttctttttttgaaataaaatagcctgtctttcagatctaaaaaaaaaaaaaaaaaaaaaaaaaaaaaaaaaaaaaaaaaaaaaaaaaaaaaaaaaaaaaaaaaaaaaaaaaaaaaaaaaaaaaaaaaaaaaaaaaaaa

SEQ ID NO: 4353 - RNA, 1673 nt, synthetic construct
  misc_feature 1..1673: note = mRNA a-1 (A100) (opt2) from Homo sapiens__NP_000448.3__HNF4A(1-474)(K447R_K470R)
  source 1..1673: mol_type = other RNA
aggagagtcccgcagtcggcgtccagcggctctgcttgttcgtgtgtgtgtcgttgcaggccttattcaagcttaccatgcgcctctccaagaccctcgtcgacatggacatggccgactactccgccgccctcgaccccgcctacaccaccctcgagttcgagaacgtccaggtcctcaccatgggcaacgacacctccccctccgagggcaccaacctcaacgcccccaactccctcggcgtctccgccctctgcgccatctgcggcgaccgcgccaccggcaagcactacggcgcctcctcctgcgacggctgcaagggcttcttccgccgctccgtccgcaagaaccacatgtactcctgccgcttctcccgccagtgcgtcgtcgacaaggacaagcgcaaccagtgccgctactgccgcctcaagaagtgcttccgcgccggcatgaagaaggaggccgtccagaacgagcgcgaccgcatctccacccgccgctcctcctacgaggactcctccctcccctccatcaacgccctcctccaggccgaggtcctctcccgccagatcacctcccccgtctccggcatcaacggcgacatccgcgccaagaagatcgcctccatcgccgacgtctgcgagtccatgaaggagcagctcctcgtcctcgtcgagtgggccaagtacatccccgccttctgcgagctccccctcgacgaccaggtcgccctcctccgcgcccacgccggcgagcacctcctcctcggcgccaccaagcgctccatggtcttcaaggacgtcctcctcctcggcaacgactacatcgtcccccgccactgccccgagctcgccgagatgtcccgcgtctccatccgcatcctcgacgagctcgtcctccccttccaggagctccagatcgacgacaacgagtacgcctacctcaaggccatcatcttcttcgaccccgacgccaagggcctctccgaccccggcaagatcaagcgcctccgctcccaggtccaggtctccctcgaggactacatcaacgaccgccagtacgactcccgcggccgcttcggcgagctcctcctcctcctccccaccctccagtccatcacctggcagatgatcgagcagatccagttcatcaagctcttcggcatggccaagatcgacaacctcctccaggagatgctcctcggcggctccccctccgacgccccccacgcccaccaccccctccacccccacctcatgcaggagcacatgggcaccaacgtcatcgtcgccaacaccatgcccacccacctctccaacggccagatgtgcgagtggccccgcccccgcggccaggccgccacccccgagaccccccagccctccccccccggcggctccggctccgagccctaccgcctcctccccggcgccgtcgccaccatcgtcaagcccctctccgccatcccccagcccaccatcacccgccaggaggtcatctgaggactagtccctgttcccagagcccacttttttttctttttttgaaataaaatagcctgtctttcagatctaaaaaaaaaaaaaaaaaaaaaaaaaaaaaaaaaaaaaaaaaaaaaaaaaaaaaaaaaaaaaaaaaaaaaaaaaaaaaaaaaaaaaaaaaaaaaaaaaaaa

SEQ ID NO: 4354 - RNA, 1673 nt, synthetic construct
  misc_feature 1..1673: note = mRNA a-1 (A100) (opt2) from Homo sapiens__NP_000448.3__HNF4A(1-474)(K458R)
  source 1..1673: mol_type = other RNA
aggagagtcccgcagtcggcgtccagcggctctgcttgttcgtgtgtgtgtcgttgcaggccttattcaagcttaccatgcgcctctccaagaccctcgtcgacatggacatggccgactactccgccgccctcgaccccgcctacaccaccctcgagttcgagaacgtccaggtcctcaccatgggcaacgacacctccccctccgagggcaccaacctcaacgcccccaactccctcggcgtctccgccctctgcgccatctgcggcgaccgcgccaccggcaagcactacggcgcctcctcctgcgacggctgcaagggcttcttccgccgctccgtccgcaagaaccacatgtactcctgccgcttctcccgccagtgcgtcgtcgacaaggacaagcgcaaccagtgccgctactgccgcctcaagaagtgcttccgcgccggcatgaagaaggaggccgtccagaacgagcgcgaccgcatctccacccgccgctcctcctacgaggactcctccctcccctccatcaacgccctcctccaggccgaggtcctctcccgccagatcacctcccccgtctccggcatcaacggcgacatccgcgccaagaagatcgcctccatcgccgacgtctgcgagtccatgaaggagcagctcctcgtcctcgtcgagtgggccaagtacatccccgccttctgcgagctccccctcgacgaccaggtcgccctcctccgcgcccacgccggcgagcacctcctcctcggcgccaccaagcgctccatggtcttcaaggacgtcctcctcctcggcaacgactacatcgtcccccgccactgccccgagctcgccgagatgtcccgcgtctccatccgcatcctcgacgagctcgtcctccccttccaggagctccagatcgacgacaacgagtacgcctacctcaaggccatcatcttcttcgaccccgacgccaagggcctctccgaccccggcaagatcaagcgcctccgctcccaggtccaggtctccctcgaggactacatcaacgaccgccagtacgactcccgcggccgcttcggcgagctcctcctcctcctccccaccctccagtccatcacctggcagatgatcgagcagatccagttcatcaagctcttcggcatggccaagatcgacaacctcctccaggagatgctcctcggcggctccccctccgacgccccccacgcccaccaccccctccacccccacctcatgcaggagcacatgggcaccaacgtcatcgtcgccaacaccatgcccacccacctctccaacggccagatgtgcgagtggccccgcccccgcggccaggccgccacccccgagaccccccagccctccccccccggcggctccggctccgagccctacaagctcctccccggcgccgtcgccaccatcgtccgccccctctccgccatcccccagcccaccatcaccaagcaggaggtcatctgaggactagtccctgttcccagagcccacttttttttctttttttgaaataaaatagcctgtctttcagatctaaaaaaaaaaaaaaaaaaaaaaaaaaaaaaaaaaaaaaaaaaaaaaaaaaaaaaaaaaaaaaaaaaaaaaaaaaaaaaaaaaaaaaaaaaaaaaaaaaaa

SEQ ID NO: 4355 - RNA, 1673 nt, synthetic construct
  misc_feature 1..1673: note = mRNA a-1 (A100) (opt2) from Homo sapiens__NP_000448.3__HNF4A(1-474)(K106R_K108R_K126R_K127R)
  source 1..1673: mol_type = other RNA
aggagagtcccgcagtcggcgtccagcggctctgcttgttcgtgtgtgtgtcgttgcaggccttattcaagcttaccatgcgcctctccaagaccctcgtcgacatggacatggccgactactccgccgccctcgaccccgcctacaccaccctcgagttcgagaacgtccaggtcctcaccatgggcaacgacacctccccctccgagggcaccaacctcaacgcccccaactccctcggcgtctccgccctctgcgccatctgcggcgaccgcgccaccggcaagcactacggcgcctcctcctgcgacggctgcaagggcttcttccgccgctccgtccgcaagaaccacatgtactcctgccgcttctcccgccagtgcgtcgtcgaccgcgaccgccgcaaccagtgccgctactgccgcctcaagaagtgcttccgcgccggcatgcgccgcgaggccgtccagaacgagcgcgaccgcatctccacccgccgctcctcctacgaggactcctccctcccctccatcaacgccctcctccaggccgaggtcctctcccgccagatcacctcccccgtctccggcatcaacggcgacatccgcgccaagaagatcgcctccatcgccgacgtctgcgagtccatgaaggagcagctcctcgtcctcgtcgagtgggccaagtacatccccgccttctgcgagctccccctcgacgaccaggtcgccctcctccgcgcccacgccggcgagcacctcctcctcggcgccaccaagcgctccatggtcttcaaggacgtcctcctcctcggcaacgactacatcgtcccccgccactgccccgagctcgccgagatgtcccgcgtctccatccgcatcctcgacgagctcgtcctccccttccaggagctccagatcgacgacaacgagtacgcctacctcaaggccatcatcttcttcgaccccgacgccaagggcctctccgaccccggcaagatcaagcgcctccgctcccaggtccaggtctccctcgaggactacatcaacgaccgccagtacgactcccgcggccgcttcggcgagctcctcctcctcctccccaccctccagtccatcacctggcagatgatcgagcagatccagttcatcaagctcttcggcatggccaagatcgacaacctcctccaggagatgctcctcggcggctccccctccgacgccccccacgcccaccaccccctccacccccacctcatgcaggagcacatgggcaccaacgtcatcgtcgccaacaccatgcccacccacctctccaacggccagatgtgcgagtggccccgcccccgcggccaggccgccacccccgagaccccccagccctccccccccggcggctccggctccgagccctacaagctcctccccggcgccgtcgccaccatcgtcaagcccctctccgccatcccccagcccaccatcaccaagcaggaggtcatctgaggactagtccctgttcccagagcccacttttttttctttttttgaaataaaatagcctgtctttcagatctaaaaaaaaaaaaaaaaaaaaaaaaaaaaaaaaaaaaaaaaaaaaaaaaaaaaaaaaaaaaaaaaaaaaaaaaaaaaaaaaaaaaaaaaaaaaaaaaaaaa

SEQ ID NO: 4356 - RNA, 1673 nt, synthetic construct
  misc_feature 1..1673: note = mRNA a-1 (A100) (opt2) from Homo sapiens__NP_000448.3__HNF4A(1-474)(E285Q)
  source 1..1673: mol_type = other RNA
aggagagtcccgcagtcggcgtccagcggctctgcttgttcgtgtgtgtgtcgttgcaggccttattcaagcttaccatgcgcctctccaagaccctcgtcgacatggacatggccgactactccgccgccctcgaccccgcctacaccaccctcgagttcgagaacgtccaggtcctcaccatgggcaacgacacctccccctccgagggcaccaacctcaacgcccccaactccctcggcgtctccgccctctgcgccatctgcggcgaccgcgccaccggcaagcactacggcgcctcctcctgcgacggctgcaagggcttcttccgccgctccgtccgcaagaaccacatgtactcctgccgcttctcccgccagtgcgtcgtcgacaaggacaagcgcaaccagtgccgctactgccgcctcaagaagtgcttccgcgccggcatgaagaaggaggccgtccagaacgagcgcgaccgcatctccacccgccgctcctcctacgaggactcctccctcccctccatcaacgccctcctccaggccgaggtcctctcccgccagatcacctcccccgtctccggcatcaacggcgacatccgcgccaagaagatcgcctccatcgccgacgtctgcgagtccatgaaggagcagctcctcgtcctcgtcgagtgggccaagtacatccccgccttctgcgagctccccctcgacgaccaggtcgccctcctccgcgcccacgccggcgagcacctcctcctcggcgccaccaagcgctccatggtcttcaaggacgtcctcctcctcggcaacgactacatcgtcccccgccactgccccgagctcgccgagatgtcccgcgtctccatccgcatcctcgacgagctcgtcctccccttccaggagctccagatcgacgacaaccagtacgcctacctcaaggccatcatcttcttcgaccccgacgccaagggcctctccgaccccggcaagatcaagcgcctccgctcccaggtccaggtctccctcgaggactacatcaacgaccgccagtacgactcccgcggccgcttcggcgagctcctcctcctcctccccaccctccagtccatcacctggcagatgatcgagcagatccagttcatcaagctcttcggcatggccaagatcgacaacctcctccaggagatgctcctcggcggctccccctccgacgccccccacgcccaccaccccctccacccccacctcatgcaggagcacatgggcaccaacgtcatcgtcgccaacaccatgcccacccacctctccaacggccagatgtgcgagtggccccgcccccgcggccaggccgccacccccgagaccccccagccctccccccccggcggctccggctccgagccctacaagctcctccccggcgccgtcgccaccatcgtcaagcccctctccgccatcccccagcccaccatcaccaagcaggaggtcatctgaggactagtccctgttcccagagcccacttttttttctttttttgaaataaaatagcctgtctttcagatctaaaaaaaaaaaaaaaaaaaaaaaaaaaaaaaaaaaaaaaaaaaaaaaaaaaaaaaaaaaaaaaaaaaaaaaaaaaaaaaaaaaaaaaaaaaaaaaaaaaa

SEQ ID NO: 4357 - RNA, 1673 nt, synthetic construct
  misc_feature 1..1673: note = mRNA a-1 (A100) (opt2) from Homo sapiens__NP_000448.3__HNF4A(1-474)(T166E)
  source 1..1673: mol_type = other RNA
aggagagtcccgcagtcggcgtccagcggctctgcttgttcgtgtgtgtgtcgttgcaggccttattcaagcttaccatgcgcctctccaagaccctcgtcgacatggacatggccgactactccgccgccctcgaccccgcctacaccaccctcgagttcgagaacgtccaggtcctcaccatgggcaacgacacctccccctccgagggcaccaacctcaacgcccccaactccctcggcgtctccgccctctgcgccatctgcggcgaccgcgccaccggcaagcactacggcgcctcctcctgcgacggctgcaagggcttcttccgccgctccgtccgcaagaaccacatgtactcctgccgcttctcccgccagtgcgtcgtcgacaaggacaagcgcaaccagtgccgctactgccgcctcaagaagtgcttccgcgccggcatgaagaaggaggccgtccagaacgagcgcgaccgcatctccacccgccgctcctcctacgaggactcctccctcccctccatcaacgccctcctccaggccgaggtcctctcccgccagatcgagtcccccgtctccggcatcaacggcgacatccgcgccaagaagatcgcctccatcgccgacgtctgcgagtccatgaaggagcagctcctcgtcctcgtcgagtgggccaagtacatccccgccttctgcgagctccccctcgacgaccaggtcgccctcctccgcgcccacgccggcgagcacctcctcctcggcgccaccaagcgctccatggtcttcaaggacgtcctcctcctcggcaacgactacatcgtcccccgccactgccccgagctcgccgagatgtcccgcgtctccatccgcatcctcgacgagctcgtcctccccttccaggagctccagatcgacgacaacgagtacgcctacctcaaggccatcatcttcttcgaccccgacgccaagggcctctccgaccccggcaagatcaagcgcctccgctcccaggtccaggtctccctcgaggactacatcaacgaccgccagtacgactcccgcggccgcttcggcgagctcctcctcctcctccccaccctccagtccatcacctggcagatgatcgagcagatccagttcatcaagctcttcggcatggccaagatcgacaacctcctccaggagatgctcctcggcggctccccctccgacgccccccacgcccaccaccccctccacccccacctcatgcaggagcacatgggcaccaacgtcatcgtcgccaacaccatgcccacccacctctccaacggccagatgtgcgagtggccccgcccccgcggccaggccgccacccccgagaccccccagccctccccccccggcggctccggctccgagccctacaagctcctccccggcgccgtcgccaccatcgtcaagcccctctccgccatcccccagcccaccatcaccaagcaggaggtcatctgaggactagtccctgttcccagagcccacttttttttctttttttgaaataaaatagcctgtctttcagatctaaaaaaaaaaaaaaaaaaaaaaaaaaaaaaaaaaaaaaaaaaaaaaaaaaaaaaaaaaaaaaaaaaaaaaaaaaaaaaaaaaaaaaaaaaaaaaaaaaaa

SEQ ID NO: 4358 - RNA, 1673 nt, synthetic construct
  misc_feature 1..1673: note = mRNA a-1 (A100) (opt2) from Homo sapiens__NP_000448.3__HNF4A(1-474)(S148A)
  source 1..1673: mol_type = other RNA
aggagagtcccgcagtcggcgtccagcggctctgcttgttcgtgtgtgtgtcgttgcaggccttattcaagcttaccatgcgcctctccaagaccctcgtcgacatggacatggccgactactccgccgccctcgaccccgcctacaccaccctcgagttcgagaacgtccaggtcctcaccatgggcaacgacacctccccctccgagggcaccaacctcaacgcccccaactccctcggcgtctccgccctctgcgccatctgcggcgaccgcgccaccggcaagcactacggcgcctcctcctgcgacggctgcaagggcttcttccgccgctccgtccgcaagaaccacatgtactcctgccgcttctcccgccagtgcgtcgtcgacaaggacaagcgcaaccagtgccgctactgccgcctcaagaagtgcttccgcgccggcatgaagaaggaggccgtccagaacgagcgcgaccgcatctccacccgccgctcctcctacgaggactccgccctcccctccatcaacgccctcctccaggccgaggtcctctcccgccagatcacctcccccgtctccggcatcaacggcgacatccgcgccaagaagatcgcctccatcgccgacgtctgcgagtccatgaaggagcagctcctcgtcctcgtcgagtgggccaagtacatccccgccttctgcgagctccccctcgacgaccaggtcgccctcctccgcgcccacgccggcgagcacctcctcctcggcgccaccaagcgctccatggtcttcaaggacgtcctcctcctcggcaacgactacatcgtcccccgccactgccccgagctcgccgagatgtcccgcgtctccatccgcatcctcgacgagctcgtcctccccttccaggagctccagatcgacgacaacgagtacgcctacctcaaggccatcatcttcttcgaccccgacgccaagggcctctccgaccccggcaagatcaagcgcctccgctcccaggtccaggtctccctcgaggactacatcaacgaccgccagtacgactcccgcggccgcttcggcgagctcctcctcctcctccccaccctccagtccatcacctggcagatgatcgagcagatccagttcatcaagctcttcggcatggccaagatcgacaacctcctccaggagatgctcctcggcggctccccctccgacgccccccacgcccaccaccccctccacccccacctcatgcaggagcacatgggcaccaacgtcatcgtcgccaacaccatgcccacccacctctccaacggccagatgtgcgagtggccccgcccccgcggccaggccgccacccccgagaccccccagccctccccccccggcggctccggctccgagccctacaagctcctccccggcgccgtcgccaccatcgtcaagcccctctccgccatcccccagcccaccatcaccaagcaggaggtcatctgaggactagtccctgttcccagagcccacttttttttctttttttgaaataaaatagcctgtctttcagatctaaaaaaaaaaaaaaaaaaaaaaaaaaaaaaaaaaaaaaaaaaaaaaaaaaaaaaaaaaaaaaaaaaaaaaaaaaaaaaaaaaaaaaaaaaaaaaaaaaaa

SEQ ID NO: 4359 - RNA, 1673 nt, synthetic construct
  misc_feature 1..1673: note = mRNA a-1 (A100) (opt2) from Homo sapiens__NP_000448.3__HNF4A(1-474)(S148E)
  source 1..1673: mol_type = other RNA
aggagagtcccgcagtcggcgtccagcggctctgcttgttcgtgtgtgtgtcgttgcaggccttattcaagcttaccatgcgcctctccaagaccctcgtcgacatggacatggccgactactccgccgccctcgaccccgcctacaccaccctcgagttcgagaacgtccaggtcctcaccatgggcaacgacacctccccctccgagggcaccaacctcaacgcccccaactccctcggcgtctccgccctctgcgccatctgcggcgaccgcgccaccggcaagcactacggcgcctcctcctgcgacggctgcaagggcttcttccgccgctccgtccgcaagaaccacatgtactcctgccgcttctcccgccagtgcgtcgtcgacaaggacaagcgcaaccagtgccgctactgccgcctcaagaagtgcttccgcgccggcatgaagaaggaggccgtccagaacgagcgcgaccgcatctccacccgccgctcctcctacgaggactccgagctcccctccatcaacgccctcctccaggccgaggtcctctcccgccagatcacctcccccgtctccggcatcaacggcgacatccgcgccaagaagatcgcctccatcgccgacgtctgcgagtccatgaaggagcagctcctcgtcctcgtcgagtgggccaagtacatccccgccttctgcgagctccccctcgacgaccaggtcgccctcctccgcgcccacgccggcgagcacctcctcctcggcgccaccaagcgctccatggtcttcaaggacgtcctcctcctcggcaacgactacatcgtcccccgccactgccccgagctcgccgagatgtcccgcgtctccatccgcatcctcgacgagctcgtcctccccttccaggagctccagatcgacgacaacgagtacgcctacctcaaggccatcatcttcttcgaccccgacgccaagggcctctccgaccccggcaagatcaagcgcctccgctcccaggtccaggtctccctcgaggactacatcaacgaccgccagtacgactcccgcggccgcttcggcgagctcctcctcctcctccccaccctccagtccatcacctggcagatgatcgagcagatccagttcatcaagctcttcggcatggccaagatcgacaacctcctccaggagatgctcctcggcggctccccctccgacgccccccacgcccaccaccccctccacccccacctcatgcaggagcacatgggcaccaacgtcatcgtcgccaacaccatgcccacccacctctccaacggccagatgtgcgagtggccccgcccccgcggccaggccgccacccccgagaccccccagccctccccccccggcggctccggctccgagccctacaagctcctccccggcgccgtcgccaccatcgtcaagcccctctccgccatcccccagcccaccatcaccaagcaggaggtcatctgaggactagtccctgttcccagagcccacttttttttctttttttgaaataaaatagcctgtctttcagatctaaaaaaaaaaaaaaaaaaaaaaaaaaaaaaaaaaaaaaaaaaaaaaaaaaaaaaaaaaaaaaaaaaaaaaaaaaaaaaaaaaaaaaaaaaaaaaaaaaaa

SEQ ID NO: 4360 - RNA, 1673 nt, synthetic construct
  misc_feature 1..1673: note = mRNA a-1 (A100) (opt2) from Homo sapiens__NP_000448.3__HNF4A(1-474)(S183A)
  source 1..1673: mol_type = other RNA
aggagagtcccgcagtcggcgtccagcggctctgcttgttcgtgtgtgtgtcgttgcaggccttattcaagcttaccatgcgcctctccaagaccctcgtcgacatggacatggccgactactccgccgccctcgaccccgcctacaccaccctcgagttcgagaacgtccaggtcctcaccatgggcaacgacacctccccctccgagggcaccaacctcaacgcccccaactccctcggcgtctccgccctctgcgccatctgcggcgaccgcgccaccggcaagcactacggcgcctcctcctgcgacggctgcaagggcttcttccgccgctccgtccgcaagaaccacatgtactcctgccgcttctcccgccagtgcgtcgtcgacaaggacaagcgcaaccagtgccgctactgccgcctcaagaagtgcttccgcgccggcatgaagaaggaggccgtccagaacgagcgcgaccgcatctccacccgccgctcctcctacgaggactcctccctcccctccatcaacgccctcctccaggccgaggtcctctcccgccagatcacctcccccgtctccggcatcaacggcgacatccgcgccaagaagatcgccgccatcgccgacgtctgcgagtccatgaaggagcagctcctcgtcctcgtcgagtgggccaagtacatccccgccttctgcgagctccccctcgacgaccaggtcgccctcctccgcgcccacgccggcgagcacctcctcctcggcgccaccaagcgctccatggtcttcaaggacgtcctcctcctcggcaacgactacatcgtcccccgccactgccccgagctcgccgagatgtcccgcgtctccatccgcatcctcgacgagctcgtcctccccttccaggagctccagatcgacgacaacgagtacgcctacctcaaggccatcatcttcttcgaccccgacgccaagggcctctccgaccccggcaagatcaagcgcctccgctcccaggtccaggtctccctcgaggactacatcaacgaccgccagtacgactcccgcggccgcttcggcgagctcctcctcctcctccccaccctccagtccatcacctggcagatgatcgagcagatccagttcatcaagctcttcggcatggccaagatcgacaacctcctccaggagatgctcctcggcggctccccctccgacgccccccacgcccaccaccccctccacccccacctcatgcaggagcacatgggcaccaacgtcatcgtcgccaacaccatgcccacccacctctccaacggccagatgtgcgagtggccccgcccccgcggccaggccgccacccccgagaccccccagccctccccccccggcggctccggctccgagccctacaagctcctccccggcgccgtcgccaccatcgtcaagcccctctccgccatcccccagcccaccatcaccaagcaggaggtcatctgaggactagtccctgttcccagagcccacttttttttctttttttgaaataaaatagcctgtctttcagatctaaaaaaaaaaaaaaaaaaaaaaaaaaaaaaaaaaaaaaaaaaaaaaaaaaaaaaaaaaaaaaaaaaaaaaaaaaaaaaaaaaaaaaaaaaaaaaaaaaaa

SEQ ID NO: 4361 - RNA, 1673 nt, synthetic construct
  misc_feature 1..1673: note = mRNA a-1 (A100) (opt2) from Homo sapiens__NP_000448.3__HNF4A(1-474)(S183E)
  source 1..1673: mol_type = other RNA
aggagagtcccgcagtcggcgtccagcggctctgcttgttcgtgtgtgtgtcgttgcaggccttattcaagcttaccatgcgcctctccaagaccctcgtcgacatggacatggccgactactccgccgccctcgaccccgcctacaccaccctcgagttcgagaacgtccaggtcctcaccatgggcaacgacacctccccctccgagggcaccaacctcaacgcccccaactccctcggcgtctccgccctctgcgccatctgcggcgaccgcgccaccggcaagcactacggcgcctcctcctgcgacggctgcaagggcttcttccgccgctccgtccgcaagaaccacatgtactcctgccgcttctcccgccagtgcgtcgtcgacaaggacaagcgcaaccagtgccgctactgccgcctcaagaagtgcttccgcgccggcatgaagaaggaggccgtccagaacgagcgcgaccgcatctccacccgccgctcctcctacgaggactcctccctcccctccatcaacgccctcctccaggccgaggtcctctcccgccagatcacctcccccgtctccggcatcaacggcgacatccgcgccaagaagatcgccgagatcgccgacgtctgcgagtccatgaaggagcagctcctcgtcctcgtcgagtgggccaagtacatccccgccttctgcgagctccccctcgacgaccaggtcgccctcctccgcgcccacgccggcgagcacctcctcctcggcgccaccaagcgctccatggtcttcaaggacgtcctcctcctcggcaacgactacatcgtcccccgccactgccccgagctcgccgagatgtcccgcgtctccatccgcatcctcgacgagctcgtcctccccttccaggagctccagatcgacgacaacgagtacgcctacctcaaggccatcatcttcttcgaccccgacgccaagggcctctccgaccccggcaagatcaagcgcctccgctcccaggtccaggtctccctcgaggactacatcaacgaccgccagtacgactcccgcggccgcttcggcgagctcctcctcctcctccccaccctccagtccatcacctggcagatgatcgagcagatccagttcatcaagctcttcggcatggccaagatcgacaacctcctccaggagatgctcctcggcggctccccctccgacgccccccacgcccaccaccccctccacccccacctcatgcaggagcacatgggcaccaacgtcatcgtcgccaacaccatgcccacccacctctccaacggccagatgtgcgagtggccccgcccccgcggccaggccgccacccccgagaccccccagccctccccccccggcggctccggctccgagccctacaagctcctccccggcgccgtcgccaccatcgtcaagcccctctccgccatcccccagcccaccatcaccaagcaggaggtcatctgaggactagtccctgttcccagagcccacttttttttctttttttgaaataaaatagcctgtctttcagatctaaaaaaaaaaaaaaaaaaaaaaaaaaaaaaaaaaaaaaaaaaaaaaaaaaaaaaaaaaaaaaaaaaaaaaaaaaaaaaaaaaaaaaaaaaaaaaaaaaaa

SEQ ID NO: 4362 - RNA, 1673 nt, synthetic construct
  misc_feature 1..1673: note = mRNA a-1 (A100) (opt2) from Homo sapiens__NP_000448.3__HNF4A(1-474)(S461A)
  source 1..1673: mol_type = other RNA
aggagagtcccgcagtcggcgtccagcggctctgcttgttcgtgtgtgtgtcgttgcaggccttattcaagcttaccatgcgcctctccaagaccctcgtcgacatggacatggccgactactccgccgccctcgaccccgcctacaccaccctcgagttcgagaacgtccaggtcctcaccatgggcaacgacacctccccctccgagggcaccaacctcaacgcccccaactccctcggcgtctccgccctctgcgccatctgcggcgaccgcgccaccggcaagcactacggcgcctcctcctgcgacggctgcaagggcttcttccgccgctccgtccgcaagaaccacatgtactcctgccgcttctcccgccagtgcgtcgtcgacaaggacaagcgcaaccagtgccgctactgccgcctcaagaagtgcttccgcgccggcatgaagaaggaggccgtccagaacgagcgcgaccgcatctccacccgccgctcctcctacgaggactcctccctcccctccatcaacgccctcctccaggccgaggtcctctcccgccagatcacctcccccgtctccggcatcaacggcgacatccgcgccaagaagatcgcctccatcgccgacgtctgcgagtccatgaaggagcagctcctcgtcctcgtcgagtgggccaagtacatccccgccttctgcgagctccccctcgacgaccaggtcgccctcctccgcgcccacgccggcgagcacctcctcctcggcgccaccaagcgctccatggtcttcaaggacgtcctcctcctcggcaacgactacatcgtcccccgccactgccccgagctcgccgagatgtcccgcgtctccatccgcatcctcgacgagctcgtcctccccttccaggagctccagatcgacgacaacgagtacgcctacctcaaggccatcatcttcttcgaccccgacgccaagggcctctccgaccccggcaagatcaagcgcctccgctcccaggtccaggtctccctcgaggactacatcaacgaccgccagtacgactcccgcggccgcttcggcgagctcctcctcctcctccccaccctccagtccatcacctggcagatgatcgagcagatccagttcatcaagctcttcggcatggccaagatcgacaacctcctccaggagatgctcctcggcggctccccctccgacgccccccacgcccaccaccccctccacccccacctcatgcaggagcacatgggcaccaacgtcatcgtcgccaacaccatgcccacccacctctccaacggccagatgtgcgagtggccccgcccccgcggccaggccgccacccccgagaccccccagccctccccccccggcggctccggctccgagccctacaagctcctccccggcgccgtcgccaccatcgtcaagcccctcgccgccatcccccagcccaccatcaccaagcaggaggtcatctgaggactagtccctgttcccagagcccacttttttttctttttttgaaataaaatagcctgtctttcagatctaaaaaaaaaaaaaaaaaaaaaaaaaaaaaaaaaaaaaaaaaaaaaaaaaaaaaaaaaaaaaaaaaaaaaaaaaaaaaaaaaaaaaaaaaaaaaaaaaaaa

SEQ ID NO: 4363 - RNA, 1673 nt, synthetic construct
  misc_feature 1..1673: note = mRNA a-1 (A100) (opt2) from Homo sapiens__NP_000448.3__HNF4A(1-474)(S461E)
  source 1..1673: mol_type = other RNA
aggagagtcccgcagtcggcgtccagcggctctgcttgttcgtgtgtgtgtcgttgcaggccttattcaagcttaccatgcgcctctccaagaccctcgtcgacatggacatggccgactactccgccgccctcgaccccgcctacaccaccctcgagttcgagaacgtccaggtcctcaccatgggcaacgacacctccccctccgagggcaccaacctcaacgcccccaactccctcggcgtctccgccctctgcgccatctgcggcgaccgcgccaccggcaagcactacggcgcctcctcctgcgacggctgcaagggcttcttccgccgctccgtccgcaagaaccacatgtactcctgccgcttctcccgccagtgcgtcgtcgacaaggacaagcgcaaccagtgccgctactgccgcctcaagaagtgcttccgcgccggcatgaagaaggaggccgtccagaacgagcgcgaccgcatctccacccgccgctcctcctacgaggactcctccctcccctccatcaacgccctcctccaggccgaggtcctctcccgccagatcacctcccccgtctccggcatcaacggcgacatccgcgccaagaagatcgcctccatcgccgacgtctgcgagtccatgaaggagcagctcctcgtcctcgtcgagtgggccaagtacatccccgccttctgcgagctccccctcgacgaccaggtcgccctcctccgcgcccacgccggcgagcacctcctcctcggcgccaccaagcgctccatggtcttcaaggacgtcctcctcctcggcaacgactacatcgtcccccgccactgccccgagctcgccgagatgtcccgcgtctccatccgcatcctcgacgagctcgtcctccccttccaggagctccagatcgacgacaacgagtacgcctacctcaaggccatcatcttcttcgaccccgacgccaagggcctctccgaccccggcaagatcaagcgcctccgctcccaggtccaggtctccctcgaggactacatcaacgaccgccagtacgactcccgcggccgcttcggcgagctcctcctcctcctccccaccctccagtccatcacctggcagatgatcgagcagatccagttcatcaagctcttcggcatggccaagatcgacaacctcctccaggagatgctcctcggcggctccccctccgacgccccccacgcccaccaccccctccacccccacctcatgcaggagcacatgggcaccaacgtcatcgtcgccaacaccatgcccacccacctctccaacggccagatgtgcgagtggccccgcccccgcggccaggccgccacccccgagaccccccagccctccccccccggcggctccggctccgagccctacaagctcctccccggcgccgtcgccaccatcgtcaagcccctcgaggccatcccccagcccaccatcaccaagcaggaggtcatctgaggactagtccctgttcccagagcccacttttttttctttttttgaaataaaatagcctgtctttcagatctaaaaaaaaaaaaaaaaaaaaaaaaaaaaaaaaaaaaaaaaaaaaaaaaaaaaaaaaaaaaaaaaaaaaaaaaaaaaaaaaaaaaaaaaaaaaaaaaaaaa

SEQ ID NO: 4364 - RNA, 1673 nt, synthetic construct
  misc_feature 1..1673: note = mRNA a-1 (A100) (opt2) from Homo sapiens__NP_000448.3__HNF4A(1-474)(S142A_S143A_S313A)
  source 1..1673: mol_type = other RNA
aggagagtcccgcagtcggcgtccagcggctctgcttgttcgtgtgtgtgtcgttgcaggccttattcaagcttaccatgcgcctctccaagaccctcgtcgacatggacatggccgactactccgccgccctcgaccccgcctacaccaccctcgagttcgagaacgtccaggtcctcaccatgggcaacgacacctccccctccgagggcaccaacctcaacgcccccaactccctcggcgtctccgccctctgcgccatctgcggcgaccgcgccaccggcaagcactacggcgcctcctcctgcgacggctgcaagggcttcttccgccgctccgtccgcaagaaccacatgtactcctgccgcttctcccgccagtgcgtcgtcgacaaggacaagcgcaaccagtgccgctactgccgcctcaagaagtgcttccgcgccggcatgaagaaggaggccgtccagaacgagcgcgaccgcatctccacccgccgcgccgcctacgaggactcctccctcccctccatcaacgccctcctccaggccgaggtcctctcccgccagatcacctcccccgtctccggcatcaacggcgacatccgcgccaagaagatcgcctccatcgccgacgtctgcgagtccatgaaggagcagctcctcgtcctcgtcgagtgggccaagtacatccccgccttctgcgagctccccctcgacgaccaggtcgccctcctccgcgcccacgccggcgagcacctcctcctcggcgccaccaagcgctccatggtcttcaaggacgtcctcctcctcggcaacgactacatcgtcccccgccactgccccgagctcgccgagatgtcccgcgtctccatccgcatcctcgacgagctcgtcctccccttccaggagctccagatcgacgacaacgagtacgcctacctcaaggccatcatcttcttcgaccccgacgccaagggcctctccgaccccggcaagatcaagcgcctccgcgcccaggtccaggtctccctcgaggactacatcaacgaccgccagtacgactcccgcggccgcttcggcgagctcctcctcctcctccccaccctccagtccatcacctggcagatgatcgagcagatccagttcatcaagctcttcggcatggccaagatcgacaacctcctccaggagatgctcctcggcggctccccctccgacgccccccacgcccaccaccccctccacccccacctcatgcaggagcacatgggcaccaacgtcatcgtcgccaacaccatgcccacccacctctccaacggccagatgtgcgagtggccccgcccccgcggccaggccgccacccccgagaccccccagccctccccccccggcggctccggctccgagccctacaagctcctccccggcgccgtcgccaccatcgtcaagcccctctccgccatcccccagcccaccatcaccaagcaggaggtcatctgaggactagtccctgttcccagagcccacttttttttctttttttgaaataaaatagcctgtctttcagatctaaaaaaaaaaaaaaaaaaaaaaaaaaaaaaaaaaaaaaaaaaaaaaaaaaaaaaaaaaaaaaaaaaaaaaaaaaaaaaaaaaaaaaaaaaaaaaaaaaaa

SEQ ID NO: 4365 - RNA, 1673 nt, synthetic construct
  misc_feature 1..1673: note = mRNA a-1 (A100) (opt2) from Homo sapiens__NP_000448.3__HNF4A(1-474)(S142A_S143A_S313A_K458R)
  source 1..1673: mol_type = other RNA
aggagagtcccgcagtcggcgtccagcggctctgcttgttcgtgtgtgtgtcgttgcaggccttattcaagcttaccatgcgcctctccaagaccctcgtcgacatggacatggccgactactccgccgccctcgaccccgcctacaccaccctcgagttcgagaacgtccaggtcctcaccatgggcaacgacacctccccctccgagggcaccaacctcaacgcccccaactccctcggcgtctccgccctctgcgccatctgcggcgaccgcgccaccggcaagcactacggcgcctcctcctgcgacggctgcaagggcttcttccgccgctccgtccgcaagaaccacatgtactcctgccgcttctcccgccagtgcgtcgtcgacaaggacaagcgcaaccagtgccgctactgccgcctcaagaagtgcttccgcgccggcatgaagaaggaggccgtccagaacgagcgcgaccgcatctccacccgccgcgccgcctacgaggactcctccctcccctccatcaacgccctcctccaggccgaggtcctctcccgccagatcacctcccccgtctccggcatcaacggcgacatccgcgccaagaagatcgcctccatcgccgacgtctgcgagtccatgaaggagcagctcctcgtcctcgtcgagtgggccaagtacatccccgccttctgcgagctccccctcgacgaccaggtcgccctcctccgcgcccacgccggcgagcacctcctcctcggcgccaccaagcgctccatggtcttcaaggacgtcctcctcctcggcaacgactacatcgtcccccgccactgccccgagctcgccgagatgtcccgcgtctccatccgcatcctcgacgagctcgtcctccccttccaggagctccagatcgacgacaacgagtacgcctacctcaaggccatcatcttcttcgaccccgacgccaagggcctctccgaccccggcaagatcaagcgcctccgcgcccaggtccaggtctccctcgaggactacatcaacgaccgccagtacgactcccgcggccgcttcggcgagctcctcctcctcctccccaccctccagtccatcacctggcagatgatcgagcagatccagttcatcaagctcttcggcatggccaagatcgacaacctcctccaggagatgctcctcggcggctccccctccgacgccccccacgcccaccaccccctccacccccacctcatgcaggagcacatgggcaccaacgtcatcgtcgccaacaccatgcccacccacctctccaacggccagatgtgcgagtggccccgcccccgcggccaggccgccacccccgagaccccccagccctccccccccggcggctccggctccgagccctacaagctcctccccggcgccgtcgccaccatcgtccgccccctctccgccatcccccagcccaccatcaccaagcaggaggtcatctgaggactagtccctgttcccagagcccacttttttttctttttttgaaataaaatagcctgtctttcagatctaaaaaaaaaaaaaaaaaaaaaaaaaaaaaaaaaaaaaaaaaaaaaaaaaaaaaaaaaaaaaaaaaaaaaaaaaaaaaaaaaaaaaaaaaaaaaaaaaaaa

SEQ ID NO: 4366 - RNA, 1673 nt, synthetic construct
  misc_feature 1..1673: note = mRNA a-1 (A100) (opt2) from Homo sapiens__NP_000448.3__HNF4A(1-474)(S142A_S143A_S167A_S313A_ S378A_T429A_T432A_S436A_K458R)
  source 1..1673: mol_type = other RNA
aggagagtcccgcagtcggcgtccagcggctctgcttgttcgtgtgtgtgtcgttgcaggccttattcaagcttaccatgcgcctctccaagaccctcgtcgacatggacatggccgactactccgccgccctcgaccccgcctacaccaccctcgagttcgagaacgtccaggtcctcaccatgggcaacgacacctccccctccgagggcaccaacctcaacgcccccaactccctcggcgtctccgccctctgcgccatctgcggcgaccgcgccaccggcaagcactacggcgcctcctcctgcgacggctgcaagggcttcttccgccgctccgtccgcaagaaccacatgtactcctgccgcttctcccgccagtgcgtcgtcgacaaggacaagcgcaaccagtgccgctactgccgcctcaagaagtgcttccgcgccggcatgaagaaggaggccgtccagaacgagcgcgaccgcatctccacccgccgcgccgcctacgaggactcctccctcccctccatcaacgccctcctccaggccgaggtcctctcccgccagatcaccgcccccgtctccggcatcaacggcgacatccgcgccaagaagatcgcctccatcgccgacgtctgcgagtccatgaaggagcagctcctcgtcctcgtcgagtgggccaagtacatccccgccttctgcgagctccccctcgacgaccaggtcgccctcctccgcgcccacgccggcgagcacctcctcctcggcgccaccaagcgctccatggtcttcaaggacgtcctcctcctcggcaacgactacatcgtcccccgccactgccccgagctcgccgagatgtcccgcgtctccatccgcatcctcgacgagctcgtcctccccttccaggagctccagatcgacgacaacgagtacgcctacctcaaggccatcatcttcttcgaccccgacgccaagggcctctccgaccccggcaagatcaagcgcctccgcgcccaggtccaggtctccctcgaggactacatcaacgaccgccagtacgactcccgcggccgcttcggcgagctcctcctcctcctccccaccctccagtccatcacctggcagatgatcgagcagatccagttcatcaagctcttcggcatggccaagatcgacaacctcctccaggagatgctcctcggcggcgccccctccgacgccccccacgcccaccaccccctccacccccacctcatgcaggagcacatgggcaccaacgtcatcgtcgccaacaccatgcccacccacctctccaacggccagatgtgcgagtggccccgcccccgcggccaggccgccgcccccgaggccccccagcccgccccccccggcggctccggctccgagccctacaagctcctccccggcgccgtcgccaccatcgtccgccccctctccgccatcccccagcccaccatcaccaagcaggaggtcatctgaggactagtccctgttcccagagcccacttttttttctttttttgaaataaaatagcctgtctttcagatctaaaaaaaaaaaaaaaaaaaaaaaaaaaaaaaaaaaaaaaaaaaaaaaaaaaaaaaaaaaaaaaaaaaaaaaaaaaaaaaaaaaaaaaaaaaaaaaaaaaa

SEQ ID NO: 4367 - RNA, 1673 nt, synthetic construct
  misc_feature 1..1673: note = mRNA a-1 (A100) (opt2) from Homo sapiens__NP_000448.3__HNF4A(1-474)(S142A_S143A_S148A_S167A_ S313A_S378A_T429A_T432A_S436A_K458R)
  source 1..1673: mol_type = other RNA
aggagagtcccgcagtcggcgtccagcggctctgcttgttcgtgtgtgtgtcgttgcaggccttattcaagcttaccatgcgcctctccaagaccctcgtcgacatggacatggccgactactccgccgccctcgaccccgcctacaccaccctcgagttcgagaacgtccaggtcctcaccatgggcaacgacacctccccctccgagggcaccaacctcaacgcccccaactccctcggcgtctccgccctctgcgccatctgcggcgaccgcgccaccggcaagcactacggcgcctcctcctgcgacggctgcaagggcttcttccgccgctccgtccgcaagaaccacatgtactcctgccgcttctcccgccagtgcgtcgtcgacaaggacaagcgcaaccagtgccgctactgccgcctcaagaagtgcttccgcgccggcatgaagaaggaggccgtccagaacgagcgcgaccgcatctccacccgccgcgccgcctacgaggactccgccctcccctccatcaacgccctcctccaggccgaggtcctctcccgccagatcaccgcccccgtctccggcatcaacggcgacatccgcgccaagaagatcgcctccatcgccgacgtctgcgagtccatgaaggagcagctcctcgtcctcgtcgagtgggccaagtacatccccgccttctgcgagctccccctcgacgaccaggtcgccctcctccgcgcccacgccggcgagcacctcctcctcggcgccaccaagcgctccatggtcttcaaggacgtcctcctcctcggcaacgactacatcgtcccccgccactgccccgagctcgccgagatgtcccgcgtctccatccgcatcctcgacgagctcgtcctccccttccaggagctccagatcgacgacaacgagtacgcctacctcaaggccatcatcttcttcgaccccgacgccaagggcctctccgaccccggcaagatcaagcgcctccgcgcccaggtccaggtctccctcgaggactacatcaacgaccgccagtacgactcccgcggccgcttcggcgagctcctcctcctcctccccaccctccagtccatcacctggcagatgatcgagcagatccagttcatcaagctcttcggcatggccaagatcgacaacctcctccaggagatgctcctcggcggcgccccctccgacgccccccacgcccaccaccccctccacccccacctcatgcaggagcacatgggcaccaacgtcatcgtcgccaacaccatgcccacccacctctccaacggccagatgtgcgagtggccccgcccccgcggccaggccgccgcccccgaggccccccagcccgccccccccggcggctccggctccgagccctacaagctcctccccggcgccgtcgccaccatcgtccgccccctctccgccatcccccagcccaccatcaccaagcaggaggtcatctgaggactagtccctgttcccagagcccacttttttttctttttttgaaataaaatagcctgtctttcagatctaaaaaaaaaaaaaaaaaaaaaaaaaaaaaaaaaaaaaaaaaaaaaaaaaaaaaaaaaaaaaaaaaaaaaaaaaaaaaaaaaaaaaaaaaaaaaaaaaaaa

SEQ ID NO: 4368 - RNA, 1673 nt, synthetic construct
  misc_feature 1..1673: note = mRNA a-1 (A100) (opt2) from Homo sapiens__NP_000448.3__HNF4A(1-474)(K106R_K108R_K126R_K127R_ S142A_S143A_S148A_S167A_S313A_S378A_T429A_T432A_S436A_K458R )
  source 1..1673: mol_type = other RNA
aggagagtcccgcagtcggcgtccagcggctctgcttgttcgtgtgtgtgtcgttgcaggccttattcaagcttaccatgcgcctctccaagaccctcgtcgacatggacatggccgactactccgccgccctcgaccccgcctacaccaccctcgagttcgagaacgtccaggtcctcaccatgggcaacgacacctccccctccgagggcaccaacctcaacgcccccaactccctcggcgtctccgccctctgcgccatctgcggcgaccgcgccaccggcaagcactacggcgcctcctcctgcgacggctgcaagggcttcttccgccgctccgtccgcaagaaccacatgtactcctgccgcttctcccgccagtgcgtcgtcgaccgcgaccgccgcaaccagtgccgctactgccgcctcaagaagtgcttccgcgccggcatgcgccgcgaggccgtccagaacgagcgcgaccgcatctccacccgccgcgccgcctacgaggactccgccctcccctccatcaacgccctcctccaggccgaggtcctctcccgccagatcaccgcccccgtctccggcatcaacggcgacatccgcgccaagaagatcgcctccatcgccgacgtctgcgagtccatgaaggagcagctcctcgtcctcgtcgagtgggccaagtacatccccgccttctgcgagctccccctcgacgaccaggtcgccctcctccgcgcccacgccggcgagcacctcctcctcggcgccaccaagcgctccatggtcttcaaggacgtcctcctcctcggcaacgactacatcgtcccccgccactgccccgagctcgccgagatgtcccgcgtctccatccgcatcctcgacgagctcgtcctccccttccaggagctccagatcgacgacaacgagtacgcctacctcaaggccatcatcttcttcgaccccgacgccaagggcctctccgaccccggcaagatcaagcgcctccgcgcccaggtccaggtctccctcgaggactacatcaacgaccgccagtacgactcccgcggccgcttcggcgagctcctcctcctcctccccaccctccagtccatcacctggcagatgatcgagcagatccagttcatcaagctcttcggcatggccaagatcgacaacctcctccaggagatgctcctcggcggcgccccctccgacgccccccacgcccaccaccccctccacccccacctcatgcaggagcacatgggcaccaacgtcatcgtcgccaacaccatgcccacccacctctccaacggccagatgtgcgagtggccccgcccccgcggccaggccgccgcccccgaggccccccagcccgccccccccggcggctccggctccgagccctacaagctcctccccggcgccgtcgccaccatcgtccgccccctctccgccatcccccagcccaccatcaccaagcaggaggtcatctgaggactagtccctgttcccagagcccacttttttttctttttttgaaataaaatagcctgtctttcagatctaaaaaaaaaaaaaaaaaaaaaaaaaaaaaaaaaaaaaaaaaaaaaaaaaaaaaaaaaaaaaaaaaaaaaaaaaaaaaaaaaaaaaaaaaaaaaaaaaaaa

SEQ ID NO: 4369 - RNA, 1673 nt, synthetic construct
  misc_feature 1..1673: note = mRNA a-1 (A100) (opt2) from Homo sapiens__NP_000448.3__HNF4A(1-474)(S142A_S143A_S148A_T166A_ S167A_S313A_S378A_T429A_T432A_S436A_K458R)
  source 1..1673: mol_type = other RNA
aggagagtcccgcagtcggcgtccagcggctctgcttgttcgtgtgtgtgtcgttgcaggccttattcaagcttaccatgcgcctctccaagaccctcgtcgacatggacatggccgactactccgccgccctcgaccccgcctacaccaccctcgagttcgagaacgtccaggtcctcaccatgggcaacgacacctccccctccgagggcaccaacctcaacgcccccaactccctcggcgtctccgccctctgcgccatctgcggcgaccgcgccaccggcaagcactacggcgcctcctcctgcgacggctgcaagggcttcttccgccgctccgtccgcaagaaccacatgtactcctgccgcttctcccgccagtgcgtcgtcgacaaggacaagcgcaaccagtgccgctactgccgcctcaagaagtgcttccgcgccggcatgaagaaggaggccgtccagaacgagcgcgaccgcatctccacccgccgcgccgcctacgaggactccgccctcccctccatcaacgccctcctccaggccgaggtcctctcccgccagatcgccgcccccgtctccggcatcaacggcgacatccgcgccaagaagatcgcctccatcgccgacgtctgcgagtccatgaaggagcagctcctcgtcctcgtcgagtgggccaagtacatccccgccttctgcgagctccccctcgacgaccaggtcgccctcctccgcgcccacgccggcgagcacctcctcctcggcgccaccaagcgctccatggtcttcaaggacgtcctcctcctcggcaacgactacatcgtcccccgccactgccccgagctcgccgagatgtcccgcgtctccatccgcatcctcgacgagctcgtcctccccttccaggagctccagatcgacgacaacgagtacgcctacctcaaggccatcatcttcttcgaccccgacgccaagggcctctccgaccccggcaagatcaagcgcctccgcgcccaggtccaggtctccctcgaggactacatcaacgaccgccagtacgactcccgcggccgcttcggcgagctcctcctcctcctccccaccctccagtccatcacctggcagatgatcgagcagatccagttcatcaagctcttcggcatggccaagatcgacaacctcctccaggagatgctcctcggcggcgccccctccgacgccccccacgcccaccaccccctccacccccacctcatgcaggagcacatgggcaccaacgtcatcgtcgccaacaccatgcccacccacctctccaacggccagatgtgcgagtggccccgcccccgcggccaggccgccgcccccgaggccccccagcccgccccccccggcggctccggctccgagccctacaagctcctccccggcgccgtcgccaccatcgtccgccccctctccgccatcccccagcccaccatcaccaagcaggaggtcatctgaggactagtccctgttcccagagcccacttttttttctttttttgaaataaaatagcctgtctttcagatctaaaaaaaaaaaaaaaaaaaaaaaaaaaaaaaaaaaaaaaaaaaaaaaaaaaaaaaaaaaaaaaaaaaaaaaaaaaaaaaaaaaaaaaaaaaaaaaaaaaa

SEQ ID NO: 4370 - RNA, 1673 nt, synthetic construct
  misc_feature 1..1673: note = mRNA a-1 (A100) (opt2) from Homo sapiens__NP_000448.3__HNF4A(1-474)(S87A_S142A_S143A_S148A_T 166A_S167A_S313A_S378A_T429A_T432A_S436A_K458R)
  source 1..1673: mol_type = other RNA
aggagagtcccgcagtcggcgtccagcggctctgcttgttcgtgtgtgtgtcgttgcaggccttattcaagcttaccatgcgcctctccaagaccctcgtcgacatggacatggccgactactccgccgccctcgaccccgcctacaccaccctcgagttcgagaacgtccaggtcctcaccatgggcaacgacacctccccctccgagggcaccaacctcaacgcccccaactccctcggcgtctccgccctctgcgccatctgcggcgaccgcgccaccggcaagcactacggcgcctcctcctgcgacggctgcaagggcttcttccgccgcgccgtccgcaagaaccacatgtactcctgccgcttctcccgccagtgcgtcgtcgacaaggacaagcgcaaccagtgccgctactgccgcctcaagaagtgcttccgcgccggcatgaagaaggaggccgtccagaacgagcgcgaccgcatctccacccgccgcgccgcctacgaggactccgccctcccctccatcaacgccctcctccaggccgaggtcctctcccgccagatcgccgcccccgtctccggcatcaacggcgacatccgcgccaagaagatcgcctccatcgccgacgtctgcgagtccatgaaggagcagctcctcgtcctcgtcgagtgggccaagtacatccccgccttctgcgagctccccctcgacgaccaggtcgccctcctccgcgcccacgccggcgagcacctcctcctcggcgccaccaagcgctccatggtcttcaaggacgtcctcctcctcggcaacgactacatcgtcccccgccactgccccgagctcgccgagatgtcccgcgtctccatccgcatcctcgacgagctcgtcctccccttccaggagctccagatcgacgacaacgagtacgcctacctcaaggccatcatcttcttcgaccccgacgccaagggcctctccgaccccggcaagatcaagcgcctccgcgcccaggtccaggtctccctcgaggactacatcaacgaccgccagtacgactcccgcggccgcttcggcgagctcctcctcctcctccccaccctccagtccatcacctggcagatgatcgagcagatccagttcatcaagctcttcggcatggccaagatcgacaacctcctccaggagatgctcctcggcggcgccccctccgacgccccccacgcccaccaccccctccacccccacctcatgcaggagcacatgggcaccaacgtcatcgtcgccaacaccatgcccacccacctctccaacggccagatgtgcgagtggccccgcccccgcggccaggccgccgcccccgaggccccccagcccgccccccccggcggctccggctccgagccctacaagctcctccccggcgccgtcgccaccatcgtccgccccctctccgccatcccccagcccaccatcaccaagcaggaggtcatctgaggactagtccctgttcccagagcccacttttttttctttttttgaaataaaatagcctgtctttcagatctaaaaaaaaaaaaaaaaaaaaaaaaaaaaaaaaaaaaaaaaaaaaaaaaaaaaaaaaaaaaaaaaaaaaaaaaaaaaaaaaaaaaaaaaaaaaaaaaaaaa

SEQ ID NO: 4371 - RNA, 1673 nt, synthetic construct
  misc_feature 1..1673: note = mRNA a-1 (A100) (opt2) from Homo sapiens__NP_000448.3__HNF4A(1-474)(S87A_K106R_K108R_K126R_K 127R_S142A_S143A_S148A_T166A_S167A_S313A_S378A_T429A_T432A_ S436A_K458R)
  source 1..1673: mol_type = other RNA
aggagagtcccgcagtcggcgtccagcggctctgcttgttcgtgtgtgtgtcgttgcaggccttattcaagcttaccatgcgcctctccaagaccctcgtcgacatggacatggccgactactccgccgccctcgaccccgcctacaccaccctcgagttcgagaacgtccaggtcctcaccatgggcaacgacacctccccctccgagggcaccaacctcaacgcccccaactccctcggcgtctccgccctctgcgccatctgcggcgaccgcgccaccggcaagcactacggcgcctcctcctgcgacggctgcaagggcttcttccgccgcgccgtccgcaagaaccacatgtactcctgccgcttctcccgccagtgcgtcgtcgaccgcgaccgccgcaaccagtgccgctactgccgcctcaagaagtgcttccgcgccggcatgcgccgcgaggccgtccagaacgagcgcgaccgcatctccacccgccgcgccgcctacgaggactccgccctcccctccatcaacgccctcctccaggccgaggtcctctcccgccagatcgccgcccccgtctccggcatcaacggcgacatccgcgccaagaagatcgcctccatcgccgacgtctgcgagtccatgaaggagcagctcctcgtcctcgtcgagtgggccaagtacatccccgccttctgcgagctccccctcgacgaccaggtcgccctcctccgcgcccacgccggcgagcacctcctcctcggcgccaccaagcgctccatggtcttcaaggacgtcctcctcctcggcaacgactacatcgtcccccgccactgccccgagctcgccgagatgtcccgcgtctccatccgcatcctcgacgagctcgtcctccccttccaggagctccagatcgacgacaacgagtacgcctacctcaaggccatcatcttcttcgaccccgacgccaagggcctctccgaccccggcaagatcaagcgcctccgcgcccaggtccaggtctccctcgaggactacatcaacgaccgccagtacgactcccgcggccgcttcggcgagctcctcctcctcctccccaccctccagtccatcacctggcagatgatcgagcagatccagttcatcaagctcttcggcatggccaagatcgacaacctcctccaggagatgctcctcggcggcgccccctccgacgccccccacgcccaccaccccctccacccccacctcatgcaggagcacatgggcaccaacgtcatcgtcgccaacaccatgcccacccacctctccaacggccagatgtgcgagtggccccgcccccgcggccaggccgccgcccccgaggccccccagcccgccccccccggcggctccggctccgagccctacaagctcctccccggcgccgtcgccaccatcgtccgccccctctccgccatcccccagcccaccatcaccaagcaggaggtcatctgaggactagtccctgttcccagagcccacttttttttctttttttgaaataaaatagcctgtctttcagatctaaaaaaaaaaaaaaaaaaaaaaaaaaaaaaaaaaaaaaaaaaaaaaaaaaaaaaaaaaaaaaaaaaaaaaaaaaaaaaaaaaaaaaaaaaaaaaaaaaaa

SEQ ID NO: 4372 - RNA, 1673 nt, synthetic construct
  misc_feature 1..1673: note = mRNA a-1 (A100) (opt2) from Homo sapiens__NP_000448.3__HNF4A(1-474)(S87A_K106R_K108R_K126R_K 127R)
  source 1..1673: mol_type = other RNA
aggagagtcccgcagtcggcgtccagcggctctgcttgttcgtgtgtgtgtcgttgcaggccttattcaagcttaccatgcgcctctccaagaccctcgtcgacatggacatggccgactactccgccgccctcgaccccgcctacaccaccctcgagttcgagaacgtccaggtcctcaccatgggcaacgacacctccccctccgagggcaccaacctcaacgcccccaactccctcggcgtctccgccctctgcgccatctgcggcgaccgcgccaccggcaagcactacggcgcctcctcctgcgacggctgcaagggcttcttccgccgcgccgtccgcaagaaccacatgtactcctgccgcttctcccgccagtgcgtcgtcgaccgcgaccgccgcaaccagtgccgctactgccgcctcaagaagtgcttccgcgccggcatgcgccgcgaggccgtccagaacgagcgcgaccgcatctccacccgccgctcctcctacgaggactcctccctcccctccatcaacgccctcctccaggccgaggtcctctcccgccagatcacctcccccgtctccggcatcaacggcgacatccgcgccaagaagatcgcctccatcgccgacgtctgcgagtccatgaaggagcagctcctcgtcctcgtcgagtgggccaagtacatccccgccttctgcgagctccccctcgacgaccaggtcgccctcctccgcgcccacgccggcgagcacctcctcctcggcgccaccaagcgctccatggtcttcaaggacgtcctcctcctcggcaacgactacatcgtcccccgccactgccccgagctcgccgagatgtcccgcgtctccatccgcatcctcgacgagctcgtcctccccttccaggagctccagatcgacgacaacgagtacgcctacctcaaggccatcatcttcttcgaccccgacgccaagggcctctccgaccccggcaagatcaagcgcctccgctcccaggtccaggtctccctcgaggactacatcaacgaccgccagtacgactcccgcggccgcttcggcgagctcctcctcctcctccccaccctccagtccatcacctggcagatgatcgagcagatccagttcatcaagctcttcggcatggccaagatcgacaacctcctccaggagatgctcctcggcggctccccctccgacgccccccacgcccaccaccccctccacccccacctcatgcaggagcacatgggcaccaacgtcatcgtcgccaacaccatgcccacccacctctccaacggccagatgtgcgagtggccccgcccccgcggccaggccgccacccccgagaccccccagccctccccccccggcggctccggctccgagccctacaagctcctccccggcgccgtcgccaccatcgtcaagcccctctccgccatcccccagcccaccatcaccaagcaggaggtcatctgaggactagtccctgttcccagagcccacttttttttctttttttgaaataaaatagcctgtctttcagatctaaaaaaaaaaaaaaaaaaaaaaaaaaaaaaaaaaaaaaaaaaaaaaaaaaaaaaaaaaaaaaaaaaaaaaaaaaaaaaaaaaaaaaaaaaaaaaaaaaaa

SEQ ID NO: 4373 - RNA, 1673 nt, synthetic construct
  misc_feature 1..1673: note = mRNA a-1 (A100) (opt2) from Homo sapiens__NP_000448.3__HNF4A(1-474)(S87A_K106R_K108R_K126R_K 127R_S142A_S143A_S148A_T166A_S167A_S313A_S378A_T429A_T432A_ S436A_K458R_S461A)
  source 1..1673: mol_type = other RNA
aggagagtcccgcagtcggcgtccagcggctctgcttgttcgtgtgtgtgtcgttgcaggccttattcaagcttaccatgcgcctctccaagaccctcgtcgacatggacatggccgactactccgccgccctcgaccccgcctacaccaccctcgagttcgagaacgtccaggtcctcaccatgggcaacgacacctccccctccgagggcaccaacctcaacgcccccaactccctcggcgtctccgccctctgcgccatctgcggcgaccgcgccaccggcaagcactacggcgcctcctcctgcgacggctgcaagggcttcttccgccgcgccgtccgcaagaaccacatgtactcctgccgcttctcccgccagtgcgtcgtcgaccgcgaccgccgcaaccagtgccgctactgccgcctcaagaagtgcttccgcgccggcatgcgccgcgaggccgtccagaacgagcgcgaccgcatctccacccgccgcgccgcctacgaggactccgccctcccctccatcaacgccctcctccaggccgaggtcctctcccgccagatcgccgcccccgtctccggcatcaacggcgacatccgcgccaagaagatcgcctccatcgccgacgtctgcgagtccatgaaggagcagctcctcgtcctcgtcgagtgggccaagtacatccccgccttctgcgagctccccctcgacgaccaggtcgccctcctccgcgcccacgccggcgagcacctcctcctcggcgccaccaagcgctccatggtcttcaaggacgtcctcctcctcggcaacgactacatcgtcccccgccactgccccgagctcgccgagatgtcccgcgtctccatccgcatcctcgacgagctcgtcctccccttccaggagctccagatcgacgacaacgagtacgcctacctcaaggccatcatcttcttcgaccccgacgccaagggcctctccgaccccggcaagatcaagcgcctccgcgcccaggtccaggtctccctcgaggactacatcaacgaccgccagtacgactcccgcggccgcttcggcgagctcctcctcctcctccccaccctccagtccatcacctggcagatgatcgagcagatccagttcatcaagctcttcggcatggccaagatcgacaacctcctccaggagatgctcctcggcggcgccccctccgacgccccccacgcccaccaccccctccacccccacctcatgcaggagcacatgggcaccaacgtcatcgtcgccaacaccatgcccacccacctctccaacggccagatgtgcgagtggccccgcccccgcggccaggccgccgcccccgaggccccccagcccgccccccccggcggctccggctccgagccctacaagctcctccccggcgccgtcgccaccatcgtccgccccctcgccgccatcccccagcccaccatcaccaagcaggaggtcatctgaggactagtccctgttcccagagcccacttttttttctttttttgaaataaaatagcctgtctttcagatctaaaaaaaaaaaaaaaaaaaaaaaaaaaaaaaaaaaaaaaaaaaaaaaaaaaaaaaaaaaaaaaaaaaaaaaaaaaaaaaaaaaaaaaaaaaaaaaaaaaa

SEQ ID NO: 4374 - RNA, 1673 nt, synthetic construct
  misc_feature 1..1673: note = mRNA a-1 (A100) (opt2) from Homo sapiens__NP_000448.3__HNF4A(1-474)(S87A_K106R_K108R_K126R_K 127R_S142A_S143A_S148A_T166A_S167A_S313A_S378A_T429A_T432A_ S436A_K458R_S461E)
  source 1..1673: mol_type = other RNA
aggagagtcccgcagtcggcgtccagcggctctgcttgttcgtgtgtgtgtcgttgcaggccttattcaagcttaccatgcgcctctccaagaccctcgtcgacatggacatggccgactactccgccgccctcgaccccgcctacaccaccctcgagttcgagaacgtccaggtcctcaccatgggcaacgacacctccccctccgagggcaccaacctcaacgcccccaactccctcggcgtctccgccctctgcgccatctgcggcgaccgcgccaccggcaagcactacggcgcctcctcctgcgacggctgcaagggcttcttccgccgcgccgtccgcaagaaccacatgtactcctgccgcttctcccgccagtgcgtcgtcgaccgcgaccgccgcaaccagtgccgctactgccgcctcaagaagtgcttccgcgccggcatgcgccgcgaggccgtccagaacgagcgcgaccgcatctccacccgccgcgccgcctacgaggactccgccctcccctccatcaacgccctcctccaggccgaggtcctctcccgccagatcgccgcccccgtctccggcatcaacggcgacatccgcgccaagaagatcgcctccatcgccgacgtctgcgagtccatgaaggagcagctcctcgtcctcgtcgagtgggccaagtacatccccgccttctgcgagctccccctcgacgaccaggtcgccctcctccgcgcccacgccggcgagcacctcctcctcggcgccaccaagcgctccatggtcttcaaggacgtcctcctcctcggcaacgactacatcgtcccccgccactgccccgagctcgccgagatgtcccgcgtctccatccgcatcctcgacgagctcgtcctccccttccaggagctccagatcgacgacaacgagtacgcctacctcaaggccatcatcttcttcgaccccgacgccaagggcctctccgaccccggcaagatcaagcgcctccgcgcccaggtccaggtctccctcgaggactacatcaacgaccgccagtacgactcccgcggccgcttcggcgagctcctcctcctcctccccaccctccagtccatcacctggcagatgatcgagcagatccagttcatcaagctcttcggcatggccaagatcgacaacctcctccaggagatgctcctcggcggcgccccctccgacgccccccacgcccaccaccccctccacccccacctcatgcaggagcacatgggcaccaacgtcatcgtcgccaacaccatgcccacccacctctccaacggccagatgtgcgagtggccccgcccccgcggccaggccgccgcccccgaggccccccagcccgccccccccggcggctccggctccgagccctacaagctcctccccggcgccgtcgccaccatcgtccgccccctcgaggccatcccccagcccaccatcaccaagcaggaggtcatctgaggactagtccctgttcccagagcccacttttttttctttttttgaaataaaatagcctgtctttcagatctaaaaaaaaaaaaaaaaaaaaaaaaaaaaaaaaaaaaaaaaaaaaaaaaaaaaaaaaaaaaaaaaaaaaaaaaaaaaaaaaaaaaaaaaaaaaaaaaaaaa

SEQ ID NO: 4375 - RNA, 1673 nt, synthetic construct
  misc_feature 1..1673: note = mRNA a-1 (A100) (opt2) from Homo sapiens__NP_000448.3__HNF4A(1-474)(S87A_K106R_K108R_K126R_K 127R_S142A_S143A_S148E_T166A_S167E_S313A_S378E_T429E_T432E_ S436E_K458R_S461E)
  source 1..1673: mol_type = other RNA
aggagagtcccgcagtcggcgtccagcggctctgcttgttcgtgtgtgtgtcgttgcaggccttattcaagcttaccatgcgcctctccaagaccctcgtcgacatggacatggccgactactccgccgccctcgaccccgcctacaccaccctcgagttcgagaacgtccaggtcctcaccatgggcaacgacacctccccctccgagggcaccaacctcaacgcccccaactccctcggcgtctccgccctctgcgccatctgcggcgaccgcgccaccggcaagcactacggcgcctcctcctgcgacggctgcaagggcttcttccgccgcgccgtccgcaagaaccacatgtactcctgccgcttctcccgccagtgcgtcgtcgaccgcgaccgccgcaaccagtgccgctactgccgcctcaagaagtgcttccgcgccggcatgcgccgcgaggccgtccagaacgagcgcgaccgcatctccacccgccgcgccgcctacgaggactccgagctcccctccatcaacgccctcctccaggccgaggtcctctcccgccagatcgccgagcccgtctccggcatcaacggcgacatccgcgccaagaagatcgcctccatcgccgacgtctgcgagtccatgaaggagcagctcctcgtcctcgtcgagtgggccaagtacatccccgccttctgcgagctccccctcgacgaccaggtcgccctcctccgcgcccacgccggcgagcacctcctcctcggcgccaccaagcgctccatggtcttcaaggacgtcctcctcctcggcaacgactacatcgtcccccgccactgccccgagctcgccgagatgtcccgcgtctccatccgcatcctcgacgagctcgtcctccccttccaggagctccagatcgacgacaacgagtacgcctacctcaaggccatcatcttcttcgaccccgacgccaagggcctctccgaccccggcaagatcaagcgcctccgcgcccaggtccaggtctccctcgaggactacatcaacgaccgccagtacgactcccgcggccgcttcggcgagctcctcctcctcctccccaccctccagtccatcacctggcagatgatcgagcagatccagttcatcaagctcttcggcatggccaagatcgacaacctcctccaggagatgctcctcggcggcgagccctccgacgccccccacgcccaccaccccctccacccccacctcatgcaggagcacatgggcaccaacgtcatcgtcgccaacaccatgcccacccacctctccaacggccagatgtgcgagtggccccgcccccgcggccaggccgccgagcccgaggagccccagcccgagccccccggcggctccggctccgagccctacaagctcctccccggcgccgtcgccaccatcgtccgccccctcgaggccatcccccagcccaccatcaccaagcaggaggtcatctgaggactagtccctgttcccagagcccacttttttttctttttttgaaataaaatagcctgtctttcagatctaaaaaaaaaaaaaaaaaaaaaaaaaaaaaaaaaaaaaaaaaaaaaaaaaaaaaaaaaaaaaaaaaaaaaaaaaaaaaaaaaaaaaaaaaaaaaaaaaaaa

SEQ ID NO: 4376 - RNA, 1673 nt, synthetic construct
  misc_feature 1..1673: note = mRNA a-1 (A100) (opt2) from Homo sapiens__NP_000448.3__HNF4A(1-474)(S87A_K106R_K108R_K126R_K 127R_S142A_S143A_S148A_T166A_S167A_K179R_K180R_S313A_S378A_ T429A_T432A_S436A_K458R_S461E)
  source 1..1673: mol_type = other RNA
aggagagtcccgcagtcggcgtccagcggctctgcttgttcgtgtgtgtgtcgttgcaggccttattcaagcttaccatgcgcctctccaagaccctcgtcgacatggacatggccgactactccgccgccctcgaccccgcctacaccaccctcgagttcgagaacgtccaggtcctcaccatgggcaacgacacctccccctccgagggcaccaacctcaacgcccccaactccctcggcgtctccgccctctgcgccatctgcggcgaccgcgccaccggcaagcactacggcgcctcctcctgcgacggctgcaagggcttcttccgccgcgccgtccgcaagaaccacatgtactcctgccgcttctcccgccagtgcgtcgtcgaccgcgaccgccgcaaccagtgccgctactgccgcctcaagaagtgcttccgcgccggcatgcgccgcgaggccgtccagaacgagcgcgaccgcatctccacccgccgcgccgcctacgaggactccgccctcccctccatcaacgccctcctccaggccgaggtcctctcccgccagatcgccgcccccgtctccggcatcaacggcgacatccgcgcccgccgcatcgcctccatcgccgacgtctgcgagtccatgaaggagcagctcctcgtcctcgtcgagtgggccaagtacatccccgccttctgcgagctccccctcgacgaccaggtcgccctcctccgcgcccacgccggcgagcacctcctcctcggcgccaccaagcgctccatggtcttcaaggacgtcctcctcctcggcaacgactacatcgtcccccgccactgccccgagctcgccgagatgtcccgcgtctccatccgcatcctcgacgagctcgtcctccccttccaggagctccagatcgacgacaacgagtacgcctacctcaaggccatcatcttcttcgaccccgacgccaagggcctctccgaccccggcaagatcaagcgcctccgcgcccaggtccaggtctccctcgaggactacatcaacgaccgccagtacgactcccgcggccgcttcggcgagctcctcctcctcctccccaccctccagtccatcacctggcagatgatcgagcagatccagttcatcaagctcttcggcatggccaagatcgacaacctcctccaggagatgctcctcggcggcgccccctccgacgccccccacgcccaccaccccctccacccccacctcatgcaggagcacatgggcaccaacgtcatcgtcgccaacaccatgcccacccacctctccaacggccagatgtgcgagtggccccgcccccgcggccaggccgccgcccccgaggccccccagcccgccccccccggcggctccggctccgagccctacaagctcctccccggcgccgtcgccaccatcgtccgccccctcgaggccatcccccagcccaccatcaccaagcaggaggtcatctgaggactagtccctgttcccagagcccacttttttttctttttttgaaataaaatagcctgtctttcagatctaaaaaaaaaaaaaaaaaaaaaaaaaaaaaaaaaaaaaaaaaaaaaaaaaaaaaaaaaaaaaaaaaaaaaaaaaaaaaaaaaaaaaaaaaaaaaaaaaaaa

SEQ ID NO: 4377 - RNA, 1673 nt, synthetic construct
  misc_feature 1..1673: note = mRNA a-1 (A100) (opt2) from Homo sapiens__NP_000448.3__HNF4A(1-474)(S87A_K106R_K108R_K126R_K 127R_S142A_S143A_S148A_T166A_S167A_K300R_K307R_K309R_S313A_ S378A_T429A_T432A_S436A_K458R_S461E)
  source 1..1673: mol_type = other RNA
aggagagtcccgcagtcggcgtccagcggctctgcttgttcgtgtgtgtgtcgttgcaggccttattcaagcttaccatgcgcctctccaagaccctcgtcgacatggacatggccgactactccgccgccctcgaccccgcctacaccaccctcgagttcgagaacgtccaggtcctcaccatgggcaacgacacctccccctccgagggcaccaacctcaacgcccccaactccctcggcgtctccgccctctgcgccatctgcggcgaccgcgccaccggcaagcactacggcgcctcctcctgcgacggctgcaagggcttcttccgccgcgccgtccgcaagaaccacatgtactcctgccgcttctcccgccagtgcgtcgtcgaccgcgaccgccgcaaccagtgccgctactgccgcctcaagaagtgcttccgcgccggcatgcgccgcgaggccgtccagaacgagcgcgaccgcatctccacccgccgcgccgcctacgaggactccgccctcccctccatcaacgccctcctccaggccgaggtcctctcccgccagatcgccgcccccgtctccggcatcaacggcgacatccgcgccaagaagatcgcctccatcgccgacgtctgcgagtccatgaaggagcagctcctcgtcctcgtcgagtgggccaagtacatccccgccttctgcgagctccccctcgacgaccaggtcgccctcctccgcgcccacgccggcgagcacctcctcctcggcgccaccaagcgctccatggtcttcaaggacgtcctcctcctcggcaacgactacatcgtcccccgccactgccccgagctcgccgagatgtcccgcgtctccatccgcatcctcgacgagctcgtcctccccttccaggagctccagatcgacgacaacgagtacgcctacctcaaggccatcatcttcttcgaccccgacgcccgcggcctctccgaccccggccgcatccgccgcctccgcgcccaggtccaggtctccctcgaggactacatcaacgaccgccagtacgactcccgcggccgcttcggcgagctcctcctcctcctccccaccctccagtccatcacctggcagatgatcgagcagatccagttcatcaagctcttcggcatggccaagatcgacaacctcctccaggagatgctcctcggcggcgccccctccgacgccccccacgcccaccaccccctccacccccacctcatgcaggagcacatgggcaccaacgtcatcgtcgccaacaccatgcccacccacctctccaacggccagatgtgcgagtggccccgcccccgcggccaggccgccgcccccgaggccccccagcccgccccccccggcggctccggctccgagccctacaagctcctccccggcgccgtcgccaccatcgtccgccccctcgaggccatcccccagcccaccatcaccaagcaggaggtcatctgaggactagtccctgttcccagagcccacttttttttctttttttgaaataaaatagcctgtctttcagatctaaaaaaaaaaaaaaaaaaaaaaaaaaaaaaaaaaaaaaaaaaaaaaaaaaaaaaaaaaaaaaaaaaaaaaaaaaaaaaaaaaaaaaaaaaaaaaaaaaaa

SEQ ID NO: 4378 - RNA, 1673 nt, synthetic construct
  misc_feature 1..1673: note = mRNA a-1 (A100) (opt2) from Homo sapiens__NP_000448.3__HNF4A(1-474)(S87A_K106R_K108R_K126R_K 127R_S142A_S143A_S148A_T166A_S167A_S313A_S378A_T429A_T432A_ S436A_K447R_K458R_S461E_K470R)
  source 1..1673: mol_type = other RNA
aggagagtcccgcagtcggcgtccagcggctctgcttgttcgtgtgtgtgtcgttgcaggccttattcaagcttaccatgcgcctctccaagaccctcgtcgacatggacatggccgactactccgccgccctcgaccccgcctacaccaccctcgagttcgagaacgtccaggtcctcaccatgggcaacgacacctccccctccgagggcaccaacctcaacgcccccaactccctcggcgtctccgccctctgcgccatctgcggcgaccgcgccaccggcaagcactacggcgcctcctcctgcgacggctgcaagggcttcttccgccgcgccgtccgcaagaaccacatgtactcctgccgcttctcccgccagtgcgtcgtcgaccgcgaccgccgcaaccagtgccgctactgccgcctcaagaagtgcttccgcgccggcatgcgccgcgaggccgtccagaacgagcgcgaccgcatctccacccgccgcgccgcctacgaggactccgccctcccctccatcaacgccctcctccaggccgaggtcctctcccgccagatcgccgcccccgtctccggcatcaacggcgacatccgcgccaagaagatcgcctccatcgccgacgtctgcgagtccatgaaggagcagctcctcgtcctcgtcgagtgggccaagtacatccccgccttctgcgagctccccctcgacgaccaggtcgccctcctccgcgcccacgccggcgagcacctcctcctcggcgccaccaagcgctccatggtcttcaaggacgtcctcctcctcggcaacgactacatcgtcccccgccactgccccgagctcgccgagatgtcccgcgtctccatccgcatcctcgacgagctcgtcctccccttccaggagctccagatcgacgacaacgagtacgcctacctcaaggccatcatcttcttcgaccccgacgccaagggcctctccgaccccggcaagatcaagcgcctccgcgcccaggtccaggtctccctcgaggactacatcaacgaccgccagtacgactcccgcggccgcttcggcgagctcctcctcctcctccccaccctccagtccatcacctggcagatgatcgagcagatccagttcatcaagctcttcggcatggccaagatcgacaacctcctccaggagatgctcctcggcggcgccccctccgacgccccccacgcccaccaccccctccacccccacctcatgcaggagcacatgggcaccaacgtcatcgtcgccaacaccatgcccacccacctctccaacggccagatgtgcgagtggccccgcccccgcggccaggccgccgcccccgaggccccccagcccgccccccccggcggctccggctccgagccctaccgcctcctccccggcgccgtcgccaccatcgtccgccccctcgaggccatcccccagcccaccatcacccgccaggaggtcatctgaggactagtccctgttcccagagcccacttttttttctttttttgaaataaaatagcctgtctttcagatctaaaaaaaaaaaaaaaaaaaaaaaaaaaaaaaaaaaaaaaaaaaaaaaaaaaaaaaaaaaaaaaaaaaaaaaaaaaaaaaaaaaaaaaaaaaaaaaaaaaa

SEQ ID NO: 4379 - RNA, 1673 nt, synthetic construct
  misc_feature 1..1673: note = mRNA a-1 (A100) (opt2) from Homo sapiens__NP_000448.3__HNF4A(1-474)(S87A_K106R_K108R_K126R_K 127R_S142A_S143A_S148A_T166A_S167A_K179R_K180R_K234R_K300R_ K307R_K309R_S313A_S378A_T429A_T432A_S436A_K447R_K458R_S461E _K470R)
  source 1..1673: mol_type = other RNA
aggagagtcccgcagtcggcgtccagcggctctgcttgttcgtgtgtgtgtcgttgcaggccttattcaagcttaccatgcgcctctccaagaccctcgtcgacatggacatggccgactactccgccgccctcgaccccgcctacaccaccctcgagttcgagaacgtccaggtcctcaccatgggcaacgacacctccccctccgagggcaccaacctcaacgcccccaactccctcggcgtctccgccctctgcgccatctgcggcgaccgcgccaccggcaagcactacggcgcctcctcctgcgacggctgcaagggcttcttccgccgcgccgtccgcaagaaccacatgtactcctgccgcttctcccgccagtgcgtcgtcgaccgcgaccgccgcaaccagtgccgctactgccgcctcaagaagtgcttccgcgccggcatgcgccgcgaggccgtccagaacgagcgcgaccgcatctccacccgccgcgccgcctacgaggactccgccctcccctccatcaacgccctcctccaggccgaggtcctctcccgccagatcgccgcccccgtctccggcatcaacggcgacatccgcgcccgccgcatcgcctccatcgccgacgtctgcgagtccatgaaggagcagctcctcgtcctcgtcgagtgggccaagtacatccccgccttctgcgagctccccctcgacgaccaggtcgccctcctccgcgcccacgccggcgagcacctcctcctcggcgccacccgccgctccatggtcttcaaggacgtcctcctcctcggcaacgactacatcgtcccccgccactgccccgagctcgccgagatgtcccgcgtctccatccgcatcctcgacgagctcgtcctccccttccaggagctccagatcgacgacaacgagtacgcctacctcaaggccatcatcttcttcgaccccgacgcccgcggcctctccgaccccggccgcatccgccgcctccgcgcccaggtccaggtctccctcgaggactacatcaacgaccgccagtacgactcccgcggccgcttcggcgagctcctcctcctcctccccaccctccagtccatcacctggcagatgatcgagcagatccagttcatcaagctcttcggcatggccaagatcgacaacctcctccaggagatgctcctcggcggcgccccctccgacgccccccacgcccaccaccccctccacccccacctcatgcaggagcacatgggcaccaacgtcatcgtcgccaacaccatgcccacccacctctccaacggccagatgtgcgagtggccccgcccccgcggccaggccgccgcccccgaggccccccagcccgccccccccggcggctccggctccgagccctaccgcctcctccccggcgccgtcgccaccatcgtccgccccctcgaggccatcccccagcccaccatcacccgccaggaggtcatctgaggactagtccctgttcccagagcccacttttttttctttttttgaaataaaatagcctgtctttcagatctaaaaaaaaaaaaaaaaaaaaaaaaaaaaaaaaaaaaaaaaaaaaaaaaaaaaaaaaaaaaaaaaaaaaaaaaaaaaaaaaaaaaaaaaaaaaaaaaaaaa

SEQ ID NO: 4380 - RNA, 1673 nt, synthetic construct
  misc_feature 1..1673: note = mRNA a-1 (A100) (opt2) from Homo sapiens__NP_000448.3__HNF4A(1-474)(S87A_S95A_S99A_K106R_K10 8R_K126R_K127R_S142A_S143A_S148A_T166A_S167A_S313A_S378A_T4 29A_T432A_S436A_K458R_S461E)
  source 1..1673: mol_type = other RNA
aggagagtcccgcagtcggcgtccagcggctctgcttgttcgtgtgtgtgtcgttgcaggccttattcaagcttaccatgcgcctctccaagaccctcgtcgacatggacatggccgactactccgccgccctcgaccccgcctacaccaccctcgagttcgagaacgtccaggtcctcaccatgggcaacgacacctccccctccgagggcaccaacctcaacgcccccaactccctcggcgtctccgccctctgcgccatctgcggcgaccgcgccaccggcaagcactacggcgcctcctcctgcgacggctgcaagggcttcttccgccgcgccgtccgcaagaaccacatgtacgcctgccgcttcgcccgccagtgcgtcgtcgaccgcgaccgccgcaaccagtgccgctactgccgcctcaagaagtgcttccgcgccggcatgcgccgcgaggccgtccagaacgagcgcgaccgcatctccacccgccgcgccgcctacgaggactccgccctcccctccatcaacgccctcctccaggccgaggtcctctcccgccagatcgccgcccccgtctccggcatcaacggcgacatccgcgccaagaagatcgcctccatcgccgacgtctgcgagtccatgaaggagcagctcctcgtcctcgtcgagtgggccaagtacatccccgccttctgcgagctccccctcgacgaccaggtcgccctcctccgcgcccacgccggcgagcacctcctcctcggcgccaccaagcgctccatggtcttcaaggacgtcctcctcctcggcaacgactacatcgtcccccgccactgccccgagctcgccgagatgtcccgcgtctccatccgcatcctcgacgagctcgtcctccccttccaggagctccagatcgacgacaacgagtacgcctacctcaaggccatcatcttcttcgaccccgacgccaagggcctctccgaccccggcaagatcaagcgcctccgcgcccaggtccaggtctccctcgaggactacatcaacgaccgccagtacgactcccgcggccgcttcggcgagctcctcctcctcctccccaccctccagtccatcacctggcagatgatcgagcagatccagttcatcaagctcttcggcatggccaagatcgacaacctcctccaggagatgctcctcggcggcgccccctccgacgccccccacgcccaccaccccctccacccccacctcatgcaggagcacatgggcaccaacgtcatcgtcgccaacaccatgcccacccacctctccaacggccagatgtgcgagtggccccgcccccgcggccaggccgccgcccccgaggccccccagcccgccccccccggcggctccggctccgagccctacaagctcctccccggcgccgtcgccaccatcgtccgccccctcgaggccatcccccagcccaccatcaccaagcaggaggtcatctgaggactagtccctgttcccagagcccacttttttttctttttttgaaataaaatagcctgtctttcagatctaaaaaaaaaaaaaaaaaaaaaaaaaaaaaaaaaaaaaaaaaaaaaaaaaaaaaaaaaaaaaaaaaaaaaaaaaaaaaaaaaaaaaaaaaaaaaaaaaaaa

SEQ ID NO: 4381 - RNA, 1673 nt, synthetic construct
  misc_feature 1..1673: note = mRNA a-1 (A100) (opt2) from Homo sapiens__NP_000448.3__HNF4A(1-474)(S87A_K106R_K108R_K126R_K 127R_S138A_T139A_S142A_S143A_S148A_T166A_S167A_S313A_S378A_ T429A_T432A_S436A_K458R_S461E)
  source 1..1673: mol_type = other RNA
aggagagtcccgcagtcggcgtccagcggctctgcttgttcgtgtgtgtgtcgttgcaggccttattcaagcttaccatgcgcctctccaagaccctcgtcgacatggacatggccgactactccgccgccctcgaccccgcctacaccaccctcgagttcgagaacgtccaggtcctcaccatgggcaacgacacctccccctccgagggcaccaacctcaacgcccccaactccctcggcgtctccgccctctgcgccatctgcggcgaccgcgccaccggcaagcactacggcgcctcctcctgcgacggctgcaagggcttcttccgccgcgccgtccgcaagaaccacatgtactcctgccgcttctcccgccagtgcgtcgtcgaccgcgaccgccgcaaccagtgccgctactgccgcctcaagaagtgcttccgcgccggcatgcgccgcgaggccgtccagaacgagcgcgaccgcatcgccgcccgccgcgccgcctacgaggactccgccctcccctccatcaacgccctcctccaggccgaggtcctctcccgccagatcgccgcccccgtctccggcatcaacggcgacatccgcgccaagaagatcgcctccatcgccgacgtctgcgagtccatgaaggagcagctcctcgtcctcgtcgagtgggccaagtacatccccgccttctgcgagctccccctcgacgaccaggtcgccctcctccgcgcccacgccggcgagcacctcctcctcggcgccaccaagcgctccatggtcttcaaggacgtcctcctcctcggcaacgactacatcgtcccccgccactgccccgagctcgccgagatgtcccgcgtctccatccgcatcctcgacgagctcgtcctccccttccaggagctccagatcgacgacaacgagtacgcctacctcaaggccatcatcttcttcgaccccgacgccaagggcctctccgaccccggcaagatcaagcgcctccgcgcccaggtccaggtctccctcgaggactacatcaacgaccgccagtacgactcccgcggccgcttcggcgagctcctcctcctcctccccaccctccagtccatcacctggcagatgatcgagcagatccagttcatcaagctcttcggcatggccaagatcgacaacctcctccaggagatgctcctcggcggcgccccctccgacgccccccacgcccaccaccccctccacccccacctcatgcaggagcacatgggcaccaacgtcatcgtcgccaacaccatgcccacccacctctccaacggccagatgtgcgagtggccccgcccccgcggccaggccgccgcccccgaggccccccagcccgccccccccggcggctccggctccgagccctacaagctcctccccggcgccgtcgccaccatcgtccgccccctcgaggccatcccccagcccaccatcaccaagcaggaggtcatctgaggactagtccctgttcccagagcccacttttttttctttttttgaaataaaatagcctgtctttcagatctaaaaaaaaaaaaaaaaaaaaaaaaaaaaaaaaaaaaaaaaaaaaaaaaaaaaaaaaaaaaaaaaaaaaaaaaaaaaaaaaaaaaaaaaaaaaaaaaaaaa

SEQ ID NO: 4382 - RNA, 1673 nt, synthetic construct
  misc_feature 1..1673: note = mRNA a-1 (A100) (opt2) from Homo sapiens__NP_000448.3__HNF4A(1-474)(S87A_S95A_S99A_K106R_K10 8R_K126R_K127R_S138A_T139A_S142A_S143A_S148A_T166A_S167A_S3 13A_S378A_T429A_T432A_S436A_K458R_S461E)
  source 1..1673: mol_type = other RNA
aggagagtcccgcagtcggcgtccagcggctctgcttgttcgtgtgtgtgtcgttgcaggccttattcaagcttaccatgcgcctctccaagaccctcgtcgacatggacatggccgactactccgccgccctcgaccccgcctacaccaccctcgagttcgagaacgtccaggtcctcaccatgggcaacgacacctccccctccgagggcaccaacctcaacgcccccaactccctcggcgtctccgccctctgcgccatctgcggcgaccgcgccaccggcaagcactacggcgcctcctcctgcgacggctgcaagggcttcttccgccgcgccgtccgcaagaaccacatgtacgcctgccgcttcgcccgccagtgcgtcgtcgaccgcgaccgccgcaaccagtgccgctactgccgcctcaagaagtgcttccgcgccggcatgcgccgcgaggccgtccagaacgagcgcgaccgcatcgccgcccgccgcgccgcctacgaggactccgccctcccctccatcaacgccctcctccaggccgaggtcctctcccgccagatcgccgcccccgtctccggcatcaacggcgacatccgcgccaagaagatcgcctccatcgccgacgtctgcgagtccatgaaggagcagctcctcgtcctcgtcgagtgggccaagtacatccccgccttctgcgagctccccctcgacgaccaggtcgccctcctccgcgcccacgccggcgagcacctcctcctcggcgccaccaagcgctccatggtcttcaaggacgtcctcctcctcggcaacgactacatcgtcccccgccactgccccgagctcgccgagatgtcccgcgtctccatccgcatcctcgacgagctcgtcctccccttccaggagctccagatcgacgacaacgagtacgcctacctcaaggccatcatcttcttcgaccccgacgccaagggcctctccgaccccggcaagatcaagcgcctccgcgcccaggtccaggtctccctcgaggactacatcaacgaccgccagtacgactcccgcggccgcttcggcgagctcctcctcctcctccccaccctccagtccatcacctggcagatgatcgagcagatccagttcatcaagctcttcggcatggccaagatcgacaacctcctccaggagatgctcctcggcggcgccccctccgacgccccccacgcccaccaccccctccacccccacctcatgcaggagcacatgggcaccaacgtcatcgtcgccaacaccatgcccacccacctctccaacggccagatgtgcgagtggccccgcccccgcggccaggccgccgcccccgaggccccccagcccgccccccccggcggctccggctccgagccctacaagctcctccccggcgccgtcgccaccatcgtccgccccctcgaggccatcccccagcccaccatcaccaagcaggaggtcatctgaggactagtccctgttcccagagcccacttttttttctttttttgaaataaaatagcctgtctttcagatctaaaaaaaaaaaaaaaaaaaaaaaaaaaaaaaaaaaaaaaaaaaaaaaaaaaaaaaaaaaaaaaaaaaaaaaaaaaaaaaaaaaaaaaaaaaaaaaaaaaa

SEQ ID NO: 4383 - RNA, 1673 nt, synthetic construct
  misc_feature 1..1673: note = mRNA a-1 (A100) (opt3) from Homo sapiens__NP_000448.3__HNF4A(1-474)
  source 1..1673: mol_type = other RNA
aggagagtcccgcagtcggcgtccagcggctctgcttgttcgtgtgtgtgtcgttgcaggccttattcaagcttaccatgagactgagcaagaccctcgtggacatggatatggccgactactccgctgcacttgatcccgcctatacaactctggagttcgaaaacgtccaggttttgacgatgggcaatgacacctctccttcagaggggacaaacttaaatgcgccaaacagtctgggagtgagcgctctatgcgccatctgtggtgatagggcaactggcaaacactacggggcctcctcttgcgacggatgtaagggctttttccggcgctcggtacgtaaaaatcatatgtattcatgccgatttagcagacaatgtgtggtcgataaggacaaaaggaaccagtgccggtactgtcgcctcaagaagtgcttcagagctggtatgaaaaaggaagcagtgcagaatgagagggatcggattagtacccgccgatcctcttatgaagacagctccctgccgtcaataaacgcccttctgcaggctgaggttttgagtagacaaatcacaagccccgtgtctgggattaatggagatatcagggccaaaaagattgcgtccatcgcagacgtctgtgagtcaatgaaagaacagctcctggtgctggtagagtgggccaagtacatacctgctttttgcgaactcccattagatgaccaggttgccctgcttcgggcacacgctggcgagcatttgctgctaggcgccaccaagcgtagcatggtgttcaaagacgtcctcctgcttgggaacgattatatcgtgccccgccactgtcctgagctggcggaaatgagtagagtgtctattaggatcttggacgagctcgtcctgccatttcaggaattacaaattgatgacaatgagtacgcctacctgaaggcaatcatattctttgatcccgacgctaaaggactctccgatcctggtaagattaaacggcttcgaagccaggttcaggtgtcgctggaagactatatcaacgatcgccagtacgactctagaggcaggttcggggagttgctactgctcctgccaactcttcaatccattacatggcagatgatcgagcagatccaatttattaagctgttcggaatggccaaaatagataatttgctccaggaaatgctgttaggcggttcaccgagtgacgctccccatgcccaccaccctctgcatccacacctaatgcaggagcatatggggaccaacgtaatcgtggcaaatacgatgcccactcacctcagcaacggacagatgtgcgaatggcctcggccacgcggccaagccgctacccccgagacaccgcagccttctcccccaggcgggtccggaagcgaaccttataagctgcttcccggtgcggtcgcaactattgtgaagccattgtcagccatcccccagcctaccataacaaaacaggaggttatttgaggactagtccctgttcccagagcccacttttttttctttttttgaaataaaatagcctgtctttcagatctaaaaaaaaaaaaaaaaaaaaaaaaaaaaaaaaaaaaaaaaaaaaaaaaaaaaaaaaaaaaaaaaaaaaaaaaaaaaaaaaaaaaaaaaaaaaaaaaaaaa

SEQ ID NO: 4384 - RNA, 1673 nt, synthetic construct
  misc_feature 1..1673: note = mRNA a-1 (A100) (opt3) from Homo sapiens__NP_000448.3__HNF4A(1-474)(S313A)
  source 1..1673: mol_type = other RNA
aggagagtcccgcagtcggcgtccagcggctctgcttgttcgtgtgtgtgtcgttgcaggccttattcaagcttaccatgagactgagcaagaccctcgtggacatggatatggccgactactccgctgcacttgatcccgcctatacaactctggagttcgaaaacgtccaggttttgacgatgggcaatgacacctctccttcagaggggacaaacttaaatgcgccaaacagtctgggagtgagcgctctatgcgccatctgtggtgatagggcaactggcaaacactacggggcctcctcttgcgacggatgtaagggctttttccggcgctcggtacgtaaaaatcatatgtattcatgccgatttagcagacaatgtgtggtcgataaggacaaaaggaaccagtgccggtactgtcgcctcaagaagtgcttcagagctggtatgaaaaaggaagcagtgcagaatgagagggatcggattagtacccgccgatcctcttatgaagacagctccctgccgtcaataaacgcccttctgcaggctgaggttttgagtagacaaatcacaagccccgtgtctgggattaatggagatatcagggccaaaaagattgcgtccatcgcagacgtctgtgagtcaatgaaagaacagctcctggtgctggtagagtgggccaagtacatacctgctttttgcgaactcccattagatgaccaggttgccctgcttcgggcacacgctggcgagcatttgctgctaggcgccaccaagcgtagcatggtgttcaaagacgtcctcctgcttgggaacgattatatcgtgccccgccactgtcctgagctggcggaaatgagtagagtgtctattaggatcttggacgagctcgtcctgccatttcaggaattacaaattgatgacaatgagtacgcctacctgaaggcaatcatattctttgatcccgacgctaaaggactctccgatcctggtaagattaaacggcttcgagcccaggttcaggtgagcctggaagactatatcaacgatcgccagtacgactcgagaggcaggttcggggagttgctactgctcctgccaactcttcaatctattacatggcagatgatcgagcagatccaatttattaagctgttcggaatggctaaaatagataatttgctccaggaaatgctgttaggcggttccccgtcagacgcaccccatgcccaccaccctctgcatccacacctaatgcaggagcatatggggaccaacgtaatcgtggccaatacgatgcccactcacctcagtaacggacagatgtgcgaatggcctcggccacgcggccaagctgcgacccccgagacaccgcagcctagcccacccggcgggtccggatctgaaccttataagctgcttcccggtgcagtcgccactattgtgaagccattgagcgctatcccccagcctaccataacaaaacaggaggttatttgaggactagtccctgttcccagagcccacttttttttctttttttgaaataaaatagcctgtctttcagatctaaaaaaaaaaaaaaaaaaaaaaaaaaaaaaaaaaaaaaaaaaaaaaaaaaaaaaaaaaaaaaaaaaaaaaaaaaaaaaaaaaaaaaaaaaaaaaaaaaaa

SEQ ID NO: 4385 - RNA, 1673 nt, synthetic construct
  misc_feature 1..1673: note = mRNA a-1 (A100) (opt3) from Homo sapiens__NP_000448.3__HNF4A(1-474)(S313E)
  source 1..1673: mol_type = other RNA
aggagagtcccgcagtcggcgtccagcggctctgcttgttcgtgtgtgtgtcgttgcaggccttattcaagcttaccatgagactgagcaagaccctcgtggacatggatatggccgactactccgctgcacttgatcccgcctatacaactctggagttcgaaaacgtccaggttttgacgatgggcaatgacacctctccttcagaggggacaaacttaaatgcgccaaacagtctgggagtgagcgctctatgcgccatctgtggtgatagggcaactggcaaacactacggggcctcctcttgcgacggatgtaagggctttttccggcgctcggtacgtaaaaatcatatgtattcatgccgatttagcagacaatgtgtggtcgataaggacaaaaggaaccagtgccggtactgtcgcctcaagaagtgcttcagagctggtatgaaaaaggaagcagtgcagaatgagagggatcggattagtacccgccgatcctcttatgaagacagctccctgccgtcaataaacgcccttctgcaggctgaggttttgagtagacaaatcacaagccccgtgtctgggattaatggagatatcagggccaaaaagattgcgtccatcgcagacgtctgtgagtcaatgaaagaacagctcctggtgctggtagagtgggccaagtacatacctgctttttgcgaactcccattagatgaccaggttgccctgcttcgggcacacgctggcgagcatttgctgctaggcgccaccaagcgtagcatggtgttcaaagacgtcctcctgcttgggaacgattatatcgtgccccgccactgtcctgagctggcggaaatgagtagagtgtctattaggatcttggacgagctcgtcctgccatttcaggaattacaaattgatgacaatgagtacgcctacctgaaggcaatcatattctttgatcccgacgctaaaggactctccgatcctggtaagattaaacggcttcgagaacaggttcaggtgagcctggaggactatatcaacgatcgccagtacgactcgagaggcaggttcggggagttgctactgctcctgccaactcttcaatctattacatggcagatgatcgaacagatccaatttattaagctgttcggaatggccaaaatagataatttgctccaggagatgctgttaggcggttccccgtcagacgctccccatgcccaccaccctctgcatccacacctaatgcaggaacatatggggaccaacgtaatcgtggcaaatacgatgcccactcacctcagtaacggacagatgtgcgagtggcctcggccacgcggccaagccgctacccccgaaacaccgcagcctagcccacccggcgggtccggatctgagccttataagctgcttcccggtgcggtcgcaactattgtgaagccattgagcgccatcccccagcctaccataacaaaacaggaggttatttgaggactagtccctgttcccagagcccacttttttttctttttttgaaataaaatagcctgtctttcagatctaaaaaaaaaaaaaaaaaaaaaaaaaaaaaaaaaaaaaaaaaaaaaaaaaaaaaaaaaaaaaaaaaaaaaaaaaaaaaaaaaaaaaaaaaaaaaaaaaaaa

SEQ ID NO: 4386 - RNA, 1673 nt, synthetic construct
  misc_feature 1..1673: note = mRNA a-1 (A100) (opt3) from Homo sapiens__NP_000448.3__HNF4A(1-474)(S142A_S143A)
  source 1..1673: mol_type = other RNA
aggagagtcccgcagtcggcgtccagcggctctgcttgttcgtgtgtgtgtcgttgcaggccttattcaagcttaccatgagactgagcaagaccctcgtggacatggatatggccgactactccgctgcacttgatcccgcctatacaactctggagttcgaaaacgtccaggttttgacgatgggcaatgacacctctccttcagaggggacaaacttaaatgcgccaaacagtctgggagtgagcgctctatgcgccatctgtggtgatagggcaactggcaaacactacggggcctcctcttgcgacggatgtaagggctttttccggcgctcggtacgtaaaaatcatatgtattcatgccgatttagcagacaatgtgtggtcgataaggacaaaaggaaccagtgccggtactgtcgcctcaagaagtgcttcagagctggtatgaaaaaggaagcagtgcagaatgagagggatcggattagtacccgccgagccgcttatgaagactcctctctgccgagcataaacgcccttctgcaggcggaggttttgtccagacaaatcacatcacccgtgagtgggattaatggagatatcagggccaaaaagattgcaagcatcgctgacgtctgtgagtctatgaaagaacagctcctggtgctggtagagtgggccaagtacatacctgcattttgcgaactcccattagatgaccaggttgctctgcttcgggcccacgcgggcgagcatttgctgctaggcgccaccaagcgttccatggtgttcaaagacgtcctcctgcttgggaacgattatatcgtgccccgccactgtcctgagctggcagaaatgtcaagagtgagcattaggatcttggacgagctcgtcctgccatttcaggaattacaaattgatgacaatgagtacgcttacctgaaggccatcatattctttgatcccgacgctaaaggactcagtgatcctggtaagattaaacggcttcgatctcaggttcaggtgtccctggaagactatatcaacgatcgccagtacgacagcagaggcaggttcggggagttgctactgctcctgccaactcttcaatcgattacatggcagatgatcgagcagatccaatttattaagctgttcggaatggccaaaatagataatttgctccaggaaatgctgttaggcggttctccgtccgacgcaccccatgcccaccaccctctgcatccacacctaatgcaggagcatatggggaccaacgtaatcgtggctaatacgatgcccactcacctctcaaacggacagatgtgcgaatggcctcggccacgcggccaagcggcaacccccgagacaccgcagcctagtcccccaggcgggagcggatccgaaccttataagctgcttcccggtgccgtcgctactattgtgaagccattgtctgccatcccccagcctaccataacaaaacaggaggttatttgaggactagtccctgttcccagagcccacttttttttctttttttgaaataaaatagcctgtctttcagatctaaaaaaaaaaaaaaaaaaaaaaaaaaaaaaaaaaaaaaaaaaaaaaaaaaaaaaaaaaaaaaaaaaaaaaaaaaaaaaaaaaaaaaaaaaaaaaaaaaaa

SEQ ID NO: 4387 - RNA, 1673 nt, synthetic construct
  misc_feature 1..1673: note = mRNA a-1 (A100) (opt3) from Homo sapiens__NP_000448.3__HNF4A(1-474)(S142E_S143E)
  source 1..1673: mol_type = other RNA
aggagagtcccgcagtcggcgtccagcggctctgcttgttcgtgtgtgtgtcgttgcaggccttattcaagcttaccatgagactgagcaagaccctcgtggacatggatatggccgactactccgctgcacttgatcccgcctatacaactctggagttcgaaaacgtccaggttttgacgatgggcaatgacacctctccttcagaggggacaaacttaaatgcgccaaacagtctgggagtgagcgctctatgcgccatctgtggtgatagggcaactggcaaacactacggggcctcctcttgcgacggatgtaagggctttttccggcgctcggtacgtaaaaatcatatgtattcatgccgatttagcagacaatgtgtggtcgataaggacaaaaggaaccagtgccggtactgtcgcctcaagaagtgcttcagagctggtatgaaaaaggaagcagtgcagaatgagagggatcggattagtacccgccgagaagagtatgaggactcctctctgccgagcataaacgcccttctgcaggctgaagttttgtccagacaaatcacatcacccgtgagtgggattaatggagatatcagggccaaaaagattgcgagcatcgcagacgtctgtgagtctatgaaagaacagctcctggtgctggtagagtgggccaagtacatacctgctttttgcgagctcccattagatgaccaggttgccctgcttcgggcacacgctggcgaacatttgctgctaggcgccaccaagcgttccatggtgttcaaagacgtcctcctgcttgggaacgattatatcgtgccccgccactgtcctgagctggcggaaatgtcaagagtgagcattaggatcttggacgagctcgtcctgccatttcaggaattacaaattgatgacaatgagtacgcctacctgaaggcaatcatattctttgatcccgacgctaaaggactcagtgatcctggtaagattaaacggcttcgatctcaggttcaggtgtccctggaggactatatcaacgatcgccagtacgacagcagaggcaggttcggggaattgctactgctcctgccaactcttcaatcgattacatggcagatgatcgagcagatccaatttattaagctgttcggaatggccaaaatagataatttgctccaggaaatgctgttaggcggttctccgtccgacgctccccatgcccaccaccctctgcatccacacctaatgcaggagcatatggggaccaacgtaatcgtggcaaatacgatgcccactcacctctcaaacggacagatgtgcgaatggcctcggccacgcggccaagccgctacccccgagacaccgcagcctagtcccccaggcgggagcggatccgagccttataagctgcttcccggtgcggtcgcaactattgtgaagccattgtctgccatcccccagcctaccataacaaaacaggaagttatttgaggactagtccctgttcccagagcccacttttttttctttttttgaaataaaatagcctgtctttcagatctaaaaaaaaaaaaaaaaaaaaaaaaaaaaaaaaaaaaaaaaaaaaaaaaaaaaaaaaaaaaaaaaaaaaaaaaaaaaaaaaaaaaaaaaaaaaaaaaaaaa

SEQ ID NO: 4388 - RNA, 1673 nt, synthetic construct
  misc_feature 1..1673: note = mRNA a-1 (A100) (opt3) from Homo sapiens__NP_000448.3__HNF4A(1-474)(S143A)
  source 1..1673: mol_type = other RNA
aggagagtcccgcagtcggcgtccagcggctctgcttgttcgtgtgtgtgtcgttgcaggccttattcaagcttaccatgagactgagcaagaccctcgtggacatggatatggccgactactccgctgcacttgatcccgcctatacaactctggagttcgaaaacgtccaggttttgacgatgggcaatgacacctctccttcagaggggacaaacttaaatgcgccaaacagtctgggagtgagcgctctatgcgccatctgtggtgatagggcaactggcaaacactacggggcctcctcttgcgacggatgtaagggctttttccggcgctcggtacgtaaaaatcatatgtattcatgccgatttagcagacaatgtgtggtcgataaggacaaaaggaaccagtgccggtactgtcgcctcaagaagtgcttcagagctggtatgaaaaaggaagcagtgcagaatgagagggatcggattagtacccgccgatccgcctatgaagactctagcctgccgtccataaacgcccttctgcaggccgaggttttgtcaagacaaatcacaagtcccgtgagcgggattaatggagatatcagggcgaaaaagattgcatctatcgccgacgtctgtgagtccatgaaagaacagctcctggtgctggtagagtgggctaagtacatacctgccttttgcgaactcccattagatgaccaggttgcactgcttcgggctcacgccggcgagcatttgctgctaggcgcgaccaagcgttcaatggtgttcaaagacgtcctcctgcttgggaacgattatatcgtgccccgccactgtcctgagctggccgaaatgagcagagtgagtattaggatcttggacgagctcgtcctgccatttcaggaattacaaattgatgacaatgagtacgcatacctgaaggctatcatattctttgatcccgacgccaaaggactctctgatcctggtaagattaaacggcttcgatcccaggttcaggtgagcctggaagactatatcaacgatcgccagtacgactcgagaggcaggttcggggagttgctactgctcctgccaactcttcaatctattacatggcagatgatcgagcagatccaatttattaagctgttcggaatggctaaaatagataatttgctccaggaaatgctgttaggcggttccccgtcagacgctccccatgcacaccaccctctgcatccacacctaatgcaggagcatatggggaccaacgtaatcgtggccaatacgatgcccactcacctcagtaacggacagatgtgcgaatggcctcggccacgcggccaagctgcgacccccgagacaccgcagcctagcccacccggcgggtccggatctgaaccttataagctgcttcccggtgcagtcgccactattgtgaagccattgagcgctatcccccagcctaccataacaaaacaggaggttatttgaggactagtccctgttcccagagcccacttttttttctttttttgaaataaaatagcctgtctttcagatctaaaaaaaaaaaaaaaaaaaaaaaaaaaaaaaaaaaaaaaaaaaaaaaaaaaaaaaaaaaaaaaaaaaaaaaaaaaaaaaaaaaaaaaaaaaaaaaaaaaa

SEQ ID NO: 4389 - RNA, 1673 nt, synthetic construct
  misc_feature 1..1673: note = mRNA a-1 (A100) (opt3) from Homo sapiens__NP_000448.3__HNF4A(1-474)(T166A)
  source 1..1673: mol_type = other RNA
aggagagtcccgcagtcggcgtccagcggctctgcttgttcgtgtgtgtgtcgttgcaggccttattcaagcttaccatgagactgagcaagaccctcgtggacatggatatggccgactactccgctgcacttgatcccgcctatacaactctggagttcgaaaacgtccaggttttgacgatgggcaatgacacctctccttcagaggggacaaacttaaatgcgccaaacagtctgggagtgagcgctctatgcgccatctgtggtgatagggcaactggcaaacactacggggcctcctcttgcgacggatgtaagggctttttccggcgctcggtacgtaaaaatcatatgtattcatgccgatttagcagacaatgtgtggtcgataaggacaaaaggaaccagtgccggtactgtcgcctcaagaagtgcttcagagctggtatgaaaaaggaagcagtgcagaatgagagggatcggattagtacccgccgatcctcttatgaagacagctccctgccgtcaataaacgcccttctgcaggctgaggttttgagtagacaaatcgccagccccgtgtctgggattaatggagatatcagggcgaaaaagattgcatccatcgccgacgtctgtgagtcaatgaaagaacagctcctggtgctggtagagtgggctaagtacatacctgccttttgcgaactcccattagatgaccaggttgcactgcttcgggctcacgccggcgagcatttgctgctaggcgcgacaaagcgtagcatggtgttcaaagacgtcctcctgcttgggaacgattatatcgtgccccgccactgtcctgagctggccgaaatgagtagagtgtctattaggatcttggacgagctcgtcctgccatttcaggaattacaaattgatgacaatgagtacgcatacctgaaggctatcatattctttgatcccgacgccaaaggactctccgatcctggtaagattaaacggcttcgaagccaggttcaggtgtcgctggaagactatatcaacgatcgccagtacgactctagaggcaggttcggggagttgctactgctcctgccaacccttcaatccattacttggcagatgatcgagcagatccaatttattaagctgttcggaatggctaaaatagataatttgctccaggaaatgctgttaggcggttcaccgagtgacgcaccccatgcccaccaccctctgcatccacacctaatgcaggagcatatggggacaaacgtaatcgtggccaataccatgcccacgcacctcagcaacggacagatgtgcgaatggcctcggccacgcggccaagctgcgactcccgagaccccgcagccttctcccccaggcgggtccggaagcgaaccttataagctgcttcccggtgcagtcgccacaattgtgaagccattgtcagctatcccccagcctactataaccaaacaggaggttatttgaggactagtccctgttcccagagcccacttttttttctttttttgaaataaaatagcctgtctttcagatctaaaaaaaaaaaaaaaaaaaaaaaaaaaaaaaaaaaaaaaaaaaaaaaaaaaaaaaaaaaaaaaaaaaaaaaaaaaaaaaaaaaaaaaaaaaaaaaaaaaa

SEQ ID NO: 4390 - RNA, 1673 nt, synthetic construct
  misc_feature 1..1673: note = mRNA a-1 (A100) (opt3) from Homo sapiens__NP_000448.3__HNF4A(1-474)(S167E)
  source 1..1673: mol_type = other RNA
aggagagtcccgcagtcggcgtccagcggctctgcttgttcgtgtgtgtgtcgttgcaggccttattcaagcttaccatgagactgagcaagaccctcgtggacatggatatggccgactactccgctgcacttgatcccgcctatacaactctggagttcgaaaacgtccaggttttgacgatgggcaatgacacctctccttcagaggggacaaacttaaatgcgccaaacagtctgggagtgagcgctctatgcgccatctgtggtgatagggcaactggcaaacactacggggcctcctcttgcgacggatgtaagggctttttccggcgctcggtacgtaaaaatcatatgtattcatgccgatttagcagacaatgtgtggtcgataaggacaaaaggaaccagtgccggtactgtcgcctcaagaagtgcttcagagctggtatgaaaaaggaagcagtgcagaatgagagggatcggattagtacccgccgatcctcttatgaagacagctccctgccgtcaataaacgcccttctgcaggctgaggttttgagtagacaaatcacagagcccgtgagcgggattaatggagatatcagggccaaaaagattgcgtctatcgcagacgtctgtgaatccatgaaagagcagctcctggtgctggtagaatgggccaagtacatacctgctttttgcgagctcccattagatgaccaggttgccctgcttcgggcacacgctggcgagcatttgctgctaggcgccaccaagcgttcaatggtgttcaaagacgtcctcctgcttgggaacgattatatcgtgccccgccactgtcctgaactggcggagatgagcagagtgagtattaggatcttggacgaactcgtcctgccatttcaggagttacaaattgatgacaatgaatacgcctacctgaaggcaatcatattctttgatcccgacgctaaaggactctctgatcctggtaagattaaacggcttcgatcccaggttcaggtgagcctggaggactatatcaacgatcgccagtacgactcgagaggcaggttcggggagttgctactgctcctgccaactcttcaatctattacatggcagatgatcgaacagatccaatttattaagctgttcggaatggccaaaatagataatttgctccaggagatgctgttaggcggttccccgtcagacgctccccatgcccaccaccctctgcatccacacctaatgcaggaacatatggggaccaacgtaatcgtggcaaatacgatgcccactcacctcagtaacggacagatgtgcgagtggcctcggccacgcggccaagccgctacccccgaaacaccgcagcctagcccacccggcgggtccggatctgagccttataagctgcttcccggtgcggtcgcaactattgtgaagccattgagcgccatcccccagcctaccataacaaaacaggaggttatttgaggactagtccctgttcccagagcccacttttttttctttttttgaaataaaatagcctgtctttcagatctaaaaaaaaaaaaaaaaaaaaaaaaaaaaaaaaaaaaaaaaaaaaaaaaaaaaaaaaaaaaaaaaaaaaaaaaaaaaaaaaaaaaaaaaaaaaaaaaaaaa

SEQ ID NO: 4391 - RNA, 1673 nt, synthetic construct
  misc_feature 1..1673: note = mRNA a-1 (A100) (opt3) from Homo sapiens__NP_000448.3__HNF4A(1-474)(S167A)
  source 1..1673: mol_type = other RNA
aggagagtcccgcagtcggcgtccagcggctctgcttgttcgtgtgtgtgtcgttgcaggccttattcaagcttaccatgagactgagcaagaccctcgtggacatggatatggccgactactccgctgcacttgatcccgcctatacaactctggagttcgaaaacgtccaggttttgacgatgggcaatgacacctctccttcagaggggacaaacttaaatgcgccaaacagtctgggagtgagcgctctatgcgccatctgtggtgatagggcaactggcaaacactacggggcctcctcttgcgacggatgtaagggctttttccggcgctcggtacgtaaaaatcatatgtattcatgccgatttagcagacaatgtgtggtcgataaggacaaaaggaaccagtgccggtactgtcgcctcaagaagtgcttcagagctggtatgaaaaaggaagcagtgcagaatgagagggatcggattagtacccgccgatcctcttatgaagacagctccctgccgtcaataaacgcccttctgcaggctgaggttttgagtagacaaatcacagcccccgtgagcgggattaatggagatatcagggcgaaaaagattgcatctatcgccgacgtctgtgagtccatgaaagaacagctcctggtgctggtagagtgggctaagtacatacctgccttttgcgaactcccattagatgaccaggttgcactgcttcgggctcacgccggcgagcatttgctgctaggcgcgaccaagcgttcaatggtgttcaaagacgtcctcctgcttgggaacgattatatcgtgccccgccactgtcctgagctggccgaaatgagcagagtgagtattaggatcttggacgagctcgtcctgccatttcaggaattacaaattgatgacaatgagtacgcatacctgaaggctatcatattctttgatcccgacgccaaaggactctctgatcctggtaagattaaacggcttcgatcccaggttcaggtgagcctggaagactatatcaacgatcgccagtacgactcgagaggcaggttcggggagttgctactgctcctgccaactcttcaatctattacatggcagatgatcgagcagatccaatttattaagctgttcggaatggctaaaatagataatttgctccaggaaatgctgttaggcggttccccgtcagacgcaccccatgcccaccaccctctgcatccacacctaatgcaggagcatatggggaccaacgtaatcgtggccaatacgatgcccactcacctcagtaacggacagatgtgcgaatggcctcggccacgcggccaagctgcgacccccgagacaccgcagcctagcccacccggcgggtccggatctgaaccttataagctgcttcccggtgcagtcgccactattgtgaagccattgagcgctatcccccagcctaccataacaaaacaggaggttatttgaggactagtccctgttcccagagcccacttttttttctttttttgaaataaaatagcctgtctttcagatctaaaaaaaaaaaaaaaaaaaaaaaaaaaaaaaaaaaaaaaaaaaaaaaaaaaaaaaaaaaaaaaaaaaaaaaaaaaaaaaaaaaaaaaaaaaaaaaaaaaa

SEQ ID NO: 4392 - RNA, 1673 nt, synthetic construct
  misc_feature 1..1673: note = mRNA a-1 (A100) (opt3) from Homo sapiens__NP_000448.3__HNF4A(1-474)(S167A_S378A_T429A_T432A_ S436A)
  source 1..1673: mol_type = other RNA
aggagagtcccgcagtcggcgtccagcggctctgcttgttcgtgtgtgtgtcgttgcaggccttattcaagcttaccatgagactgagcaagaccctcgtggacatggatatggccgactactccgctgcacttgatcccgcctatacaactctggagttcgaaaacgtccaggttttgacgatgggcaatgacacctctccttcagaggggacaaacttaaatgcgccaaacagtctgggagtgagcgctctatgcgccatctgtggtgatagggcaactggcaaacactacggggcctcctcttgcgacggatgtaagggctttttccggcgctcggtacgtaaaaatcatatgtattcatgccgatttagcagacaatgtgtggtcgataaggacaaaaggaaccagtgccggtactgtcgcctcaagaagtgcttcagagctggtatgaaaaaggaagcagtgcagaatgagagggatcggattagtacccgccgatcctcttatgaagacagctccctgccgtcaataaacgcccttctgcaggctgaggttttgagtagacaaatcacagcccccgtgagcgggattaatggagatatcagggcgaaaaagattgcatctatcgccgacgtctgtgagtccatgaaagaacagctcctggtgctggtagagtgggctaagtacatacctgccttttgcgaactcccattagatgaccaggttgcactgcttcgggctcacgccggcgagcatttgctgctaggcgcgaccaagcgttcaatggtgttcaaagacgtcctcctgcttgggaacgattatatcgtgccccgccactgtcctgagctggccgaaatgagcagagtgagtattaggatcttggacgagctcgtcctgccatttcaggaattacaaattgatgacaatgagtacgcatacctgaaggctatcatattctttgatcccgacgccaaaggactctctgatcctggtaagattaaacggcttcgatcccaggttcaggtgagcctggaagactatatcaacgatcgccagtacgactcgagaggcaggttcggggagttgctactgctcctgccaactcttcaatctattacatggcagatgatcgagcagatccaatttattaagctgttcggaatggctaaaatagataatttgctccaggaaatgctgttaggcggtgccccgtccgacgcaccccatgcccaccaccctctgcatccacacctaatgcaggagcatatggggaccaacgtaatcgtggctaatacgatgcccactcacctctcaaacggacagatgtgcgaatggcctcggccacgcggccaagcggcagcccccgaggctccgcagcctgcacccccaggcgggagtggaagcgaaccttataagctgcttcccggtgccgtcgccaccattgtgaagccattgtccgctatcccccagcctacaataactaaacaggaggttatttgaggactagtccctgttcccagagcccacttttttttctttttttgaaataaaatagcctgtctttcagatctaaaaaaaaaaaaaaaaaaaaaaaaaaaaaaaaaaaaaaaaaaaaaaaaaaaaaaaaaaaaaaaaaaaaaaaaaaaaaaaaaaaaaaaaaaaaaaaaaaaa

SEQ ID NO: 4393 - RNA, 1673 nt, synthetic construct
  misc_feature 1..1673: note = mRNA a-1 (A100) (opt3) from Homo sapiens__NP_000448.3__HNF4A(1-474)(S167E_S378E_T429E_T432E_ S436E)
  source 1..1673: mol_type = other RNA
aggagagtcccgcagtcggcgtccagcggctctgcttgttcgtgtgtgtgtcgttgcaggccttattcaagcttaccatgagactgagcaagaccctcgtggacatggatatggccgactactccgctgcacttgatcccgcctatacaactctggagttcgaaaacgtccaggttttgacgatgggcaatgacacctctccttcagaggggacaaacttaaatgcgccaaacagtctgggagtgagcgctctatgcgccatctgtggtgatagggcaactggcaaacactacggggcctcctcttgcgacggatgtaagggctttttccggcgctcggtacgtaaaaatcatatgtattcatgccgatttagcagacaatgtgtggtcgataaggacaaaaggaaccagtgccggtactgtcgcctcaagaagtgcttcagagctggtatgaaaaaggaagcagtgcagaatgagagggatcggattagtacccgccgatcctcttatgaagacagctccctgccgtcaataaacgcccttctgcaggctgaggttttgagtagacaaatcacagagcccgtgagcgggattaatggagatatcagggccaaaaagattgcgtctatcgcagacgtctgtgaatccatgaaagagcagctcctggtgctggtagaatgggccaagtacatacctgctttttgcgagctcccattagatgaccaggttgccctgcttcgggcacacgctggcgagcatttgctgctaggcgccaccaagcgttcaatggtgttcaaagacgtcctcctgcttgggaacgattatatcgtgccccgccactgtcctgaactggcggagatgagcagagtgagtattaggatcttggacgaactcgtcctgccatttcaggagttacaaattgatgacaatgaatacgcctacctgaaggcaatcatattctttgatcccgacgctaaaggactctctgatcctggtaagattaaacggcttcgatcccaggttcaggtgagcctggaggactatatcaacgatcgccagtacgactcgagaggcaggttcggggagttgctactgctcctgccaactcttcaatctattacatggcagatgatcgaacagatccaatttattaagctgttcggaatggccaaaatagataatttgctccaggagatgctgttaggcggtgaaccgtccgacgctccccatgcccaccaccctctgcatccacacctaatgcaggagcatatggggaccaacgtaatcgtggcaaatacgatgcccactcacctctcaaacggacagatgtgcgaatggcctcggccacgcggccaagccgctgagcccgaggaaccgcagcctgagcccccaggcgggagtggaagcgaaccttataagctgcttcccggtgcggtcgcaaccattgtgaagccattgtccgccatcccccagcctacaataactaaacaggaggttatttgaggactagtccctgttcccagagcccacttttttttctttttttgaaataaaatagcctgtctttcagatctaaaaaaaaaaaaaaaaaaaaaaaaaaaaaaaaaaaaaaaaaaaaaaaaaaaaaaaaaaaaaaaaaaaaaaaaaaaaaaaaaaaaaaaaaaaaaaaaaaaa

SEQ ID NO: 4394 - RNA, 1673 nt, synthetic construct
  misc_feature 1..1673: note = mRNA a-1 (A100) (opt3) from Homo sapiens__NP_000448.3__HNF4A(1-474)(S87A)
  source 1..1673: mol_type = other RNA
aggagagtcccgcagtcggcgtccagcggctctgcttgttcgtgtgtgtgtcgttgcaggccttattcaagcttaccatgagactgagcaagaccctcgtggacatggatatggccgactactccgctgcacttgatcccgcctatacaactctggagttcgaaaacgtccaggttttgacgatgggcaatgacacctctccttcagaggggacaaacttaaatgcgccaaacagtctgggagtgagcgctctatgcgccatctgtggtgatagggcaactggcaaacactacggggcctcctcttgcgacggatgtaagggctttttccggcgcgctgtacgtaaaaatcatatgtattcgtgccgattttcaagacaatgtgtggtcgataaggacaaaaggaaccagtgccggtactgtcgcctcaagaagtgcttcagagcaggtatgaaaaaggaagccgtgcagaatgagagggatcggattagcacccgccgaagttcctatgaagactctagcctgccgtccataaacgcccttctgcaggccgaggttttgtcaagacaaatcacaagtcccgtgagcgggattaatggagatatcagggcgaaaaagattgcatctatcgccgacgtctgtgagtccatgaaagaacagctcctggtgctggtagagtgggctaagtacatacctgccttttgcgaactcccattagatgaccaggttgcactgcttcgggctcacgccggcgagcatttgctgctaggcgcgaccaagcgttcaatggtgttcaaagacgtcctcctgcttgggaacgattatatcgtgccccgccactgtcctgagctggccgaaatgagcagagtgagtattaggatcttggacgagctcgtcctgccatttcaggaattacaaattgatgacaatgagtacgcatacctgaaggctatcatattctttgatcccgacgccaaaggactctctgatcctggtaagattaaacggcttcgatcccaggttcaggtgagcctggaagactatatcaacgatcgccagtacgactcgagaggcaggttcggggagttgctactgctcctgccaactcttcaatctattacatggcagatgatcgagcagatccaatttattaagctgttcggaatggctaaaatagataatttgctccaggaaatgctgttaggcggttccccgtcagacgctccccatgcacaccaccctctgcatccacacctaatgcaggagcatatggggaccaacgtaatcgtggccaatacgatgcccactcacctcagtaacggacagatgtgcgaatggcctcggccacgcggccaagctgcgacccccgagacaccgcagcctagcccacccggcgggtccggatctgaaccttataagctgcttcccggtgcagtcgccactattgtgaagccattgagcgctatcccccagcctaccataacaaaacaggaggttatttgaggactagtccctgttcccagagcccacttttttttctttttttgaaataaaatagcctgtctttcagatctaaaaaaaaaaaaaaaaaaaaaaaaaaaaaaaaaaaaaaaaaaaaaaaaaaaaaaaaaaaaaaaaaaaaaaaaaaaaaaaaaaaaaaaaaaaaaaaaaaaa

SEQ ID NO: 4395 - RNA, 1673 nt, synthetic construct
  misc_feature 1..1673: note = mRNA a-1 (A100) (opt3) from Homo sapiens__NP_000448.3__HNF4A(1-474)(S87E)
  source 1..1673: mol_type = other RNA
aggagagtcccgcagtcggcgtccagcggctctgcttgttcgtgtgtgtgtcgttgcaggccttattcaagcttaccatgagactgagcaagaccctcgtggacatggatatggccgactactccgctgcacttgatcccgcctatacaactctggagttcgaaaacgtccaggttttgacgatgggcaatgacacctctccttcagaggggacaaacttaaatgcgccaaacagtctgggagtgagcgctctatgcgccatctgtggtgatagggcaactggcaaacactacggggcctcctcttgcgacggatgtaagggctttttccggcgcgaagtacgtaaaaatcatatgtattcgtgccgattttcaagacaatgtgtggtcgataaggacaaaaggaaccagtgccggtactgtcgcctcaagaagtgcttcagagctggtatgaaaaaggaggcagtgcagaatgaaagggatcggattagcacccgccgaagttcctatgaggactctagcctgccgtccataaacgcccttctgcaggctgaggttttgtcaagacaaatcacaagtcccgtgagcgggattaatggagatatcagggccaaaaagattgcgtctatcgcagacgtctgtgaatccatgaaagagcagctcctggtgctggtagaatgggccaagtacatacctgctttttgcgagctcccattagatgaccaggttgccctgcttcgggcacacgctggcgagcatttgctgctaggcgccaccaagcgttcaatggtgttcaaagacgtcctcctgcttgggaacgattatatcgtgccccgccactgtcctgaactggcggagatgagcagagtgagtattaggatcttggacgaactcgtcctgccatttcaggagttacaaattgatgacaatgaatacgcctacctgaaggcaatcatattctttgatcccgacgctaaaggactctctgatcctggtaagattaaacggcttcgatcccaggttcaggtgagcctggaggactatatcaacgatcgccagtacgactcgagaggcaggttcggggagttgctactgctcctgccaactcttcaatctattacatggcagatgatcgaacagatccaatttattaagctgttcggaatggccaaaatagataatttgctccaggagatgctgttaggcggttccccgtcagacgctccccatgcccaccaccctctgcatccacacctaatgcaggaacatatggggaccaacgtaatcgtggcaaatacgatgcccactcacctcagtaacggacagatgtgcgagtggcctcggccacgcggccaagccgctacccccgaaacaccgcagcctagcccacccggcgggtccggatctgagccttataagctgcttcccggtgcggtcgcaactattgtgaagccattgagcgccatcccccagcctaccataacaaaacaggaggttatttgaggactagtccctgttcccagagcccacttttttttctttttttgaaataaaatagcctgtctttcagatctaaaaaaaaaaaaaaaaaaaaaaaaaaaaaaaaaaaaaaaaaaaaaaaaaaaaaaaaaaaaaaaaaaaaaaaaaaaaaaaaaaaaaaaaaaaaaaaaaaaa

SEQ ID NO: 4396 - RNA, 1673 nt, synthetic construct
  misc_feature 1..1673: note = mRNA a-1 (A100) (opt3) from Homo sapiens__NP_000448.3__HNF4A(1-474)(R2V)
  source 1..1673: mol_type = other RNA
aggagagtcccgcagtcggcgtccagcggctctgcttgttcgtgtgtgtgtcgttgcaggccttattcaagcttaccatggtgctgagcaagaccctcgtcgacatggatatggccgactactccgctgcacttgatcccgcctatacaactctggagttcgaaaacgttcaggtgttgacgatgggcaatgacacctctccttcagaggggacaaacttaaatgcgccaaacagtctgggagtaagcgctctatgcgccatctgtggtgatagagcaactggcaaacactacggggcctcctcttgcgacggatgtaagggctttttcaggcggtcggtgcgcaaaaatcatatgtattcatgccgatttagccgtcaatgtgtcgtggataaggacaaaagaaaccagtgcaggtactgtcggctcaagaagtgcttccgcgctggtatgaaaaaggaagcagttcagaatgagagagataggattagtacccggcgctcctcttatgaagacagctccctgccgtcaataaacgcccttctgcaggctgaggtgttgagtcgacaaatcacaagccccgtctctgggattaatggagatatcagagccaaaaagattgcgtccatcgcagacgtgtgtgagtcaatgaaagaacagctcctggtactggttgagtgggccaagtacatacctgctttttgcgaactcccattagatgaccaggtggccctgcttagggcacacgctggcgagcatttgctgctaggcgccaccaagcggagcatggtcttcaaagacgtgctcctgcttgggaacgattatatcgtgccccgtcactgtcctgagctggcggaaatgagtcgcgtctctattagaatcttggacgagctcgttctgccatttcaggaattacaaattgatgacaatgagtacgcctacctgaaggcaatcatattctttgatcccgacgctaaaggactctccgatcctggtaagattaaaaggcttcggagccaggtgcaggtatcgctggaagactatatcaacgatcgacagtacgactctcgcggcagattcggggagttgctactgctcctgccaactcttcaatccattacatggcagatgatcgagcagatccaatttattaagctgttcggaatggccaaaatagataatttgctccaggaaatgctgttaggcggttcaccgagtgacgctccccatgcccaccaccctctgcatccacacctaatgcaggagcatatggggaccaacgtgatcgtcgcaaatacgatgcccactcacctcagcaacggacagatgtgcgaatggcctaggccacggggccaagccgctacccccgagacaccgcagccttctcccccaggcgggtccggaagcgaaccttataagctgcttcccggtgcggtggcaactattgttaagccattgtcagccatcccccagcctaccataacaaaacaggaggtgatttgaggactagtccctgttcccagagcccacttttttttctttttttgaaataaaatagcctgtctttcagatctaaaaaaaaaaaaaaaaaaaaaaaaaaaaaaaaaaaaaaaaaaaaaaaaaaaaaaaaaaaaaaaaaaaaaaaaaaaaaaaaaaaaaaaaaaaaaaaaaaaa

SEQ ID NO: 4397 - RNA, 1673 nt, synthetic construct
  misc_feature 1..1673: note = mRNA a-1 (A100) (opt3) from Homo sapiens__NP_000448.3__HNF4A(1-474)(R2V_K5V)
  source 1..1673: mol_type = other RNA
aggagagtcccgcagtcggcgtccagcggctctgcttgttcgtgtgtgtgtcgttgcaggccttattcaagcttaccatggtgctgagcgtcaccctcgttgacatggatatggccgactactccgctgcacttgatcccgcctatacaactctggagttcgaaaacgtgcaggtattgacgatgggcaatgacacctctccttcagaggggacaaacttaaatgcgccaaacagtctgggagtgagcgctctatgcgccatctgtggtgatagagcaactggcaagcactacggggcctcctcttgcgacggatgtaaaggctttttcaggcggtcggtccgcaagaatcatatgtattcatgccgatttagccgtcaatgtgtggttgataaagacaagagaaaccagtgcaggtactgtcggctcaaaaagtgcttccgcgctggtatgaagaaagaagcagtgcagaatgagagagataggattagtacccggcgctcctcttatgaagacagctccctgccgtcaataaacgcccttctgcaggctgaggtcttgagtcgacaaatcacaagccccgtgtctgggattaatggagatatcagagccaagaaaattgcgtccatcgcagacgtatgtgagtcaatgaaggaacagctcctggttctggtggagtgggccaaatacatacctgctttttgcgaactcccattagatgaccaggtcgccctgcttagggcacacgctggcgagcatttgctgctaggcgccaccaagcggagcatggtgttcaaggacgtgctcctgcttgggaacgattatatcgtcccccgtcactgtcctgagctggcggaaatgagtcgcgtttctattagaatcttggacgagctcgtgctgccatttcaggaattacaaattgatgacaatgagtacgcctacctgaaagcaatcatattctttgatcccgacgctaagggactctccgatcctggtaaaattaagaggcttcggagccaggtacaggtgtcgctggaagactatatcaacgatcgacagtacgactctcgcggcagattcggggagttgctactgctcctgccaactcttcaatccattacatggcagatgatcgagcagatccaatttattaaactgttcggaatggccaagatagataatttgctccaggaaatgctgttaggcggttcaccgagtgacgctccccatgcccaccaccctctgcatccacacctaatgcaggagcatatggggaccaacgtcatcgtggcaaatacgatgcccactcacctcagcaacggacagatgtgcgaatggcctaggccacggggccaagccgctacccccgagacaccgcagccttctcccccaggcgggtccggaagcgaaccttataaactgcttcccggtgcggttgcaactattgtgaagccattgtcagccatcccccagcctaccataacaaagcaggaggtcatttgaggactagtccctgttcccagagcccacttttttttctttttttgaaataaaatagcctgtctttcagatctaaaaaaaaaaaaaaaaaaaaaaaaaaaaaaaaaaaaaaaaaaaaaaaaaaaaaaaaaaaaaaaaaaaaaaaaaaaaaaaaaaaaaaaaaaaaaaaaaaaa

SEQ ID NO: 4398 - RNA, 1673 nt, synthetic construct
  misc_feature 1..1673: note = mRNA a-1 (A100) (opt3) from Homo sapiens__NP_000448.3__HNF4A(1-474)(K179R_K180R)
  source 1..1673: mol_type = other RNA
aggagagtcccgcagtcggcgtccagcggctctgcttgttcgtgtgtgtgtcgttgcaggccttattcaagcttaccatgagactgagcaagaccctcgtggacatggatatggccgactactccgctgcacttgatcccgcctatacaactctggagttcgaaaacgtccaggttttgacgatgggcaatgacacctctccttcagaggggacaaacttaaatgcgccaaacagtctgggagtgagcgctctatgcgccatctgtggtgatagggcaactggcaaacactacggggcctcctcttgcgacggatgtaagggctttttccggcgctcggtacgtaaaaatcatatgtattcatgccgatttagcagacaatgtgtggtcgataaggacaaaaggaaccagtgccggtactgtcgcctcaagaagtgcttcagagctggtatgaaaaaggaagcagtgcagaatgagagggatcggattagtacccgccgatcctcttatgaagacagctccctgccgtcaataaacgcccttctgcaggctgaggttttgagtagacaaatcacaagccccgtgtctgggattaatggagatatcagggcccggcgtattgcgtccatcgcagacgtctgtgagtcaatgaaagaacagctcctggtgctggtagagtgggccaagtacatacctgctttttgcgaactcccattagatgaccaggttgccctgcttcgcgcacacgctggcgagcatttgctgctaggcgccaccaaaagaagcatggtgttcaaggacgtcctcctgcttgggaacgattatatcgtgcccaggcactgtcctgagctggcggaaatgagtcgggtgtctattcgaatcttggacgagctcgtcctgccatttcaggaattacaaattgatgacaatgagtacgcctacctgaaggcaatcatattctttgatcccgacgctaaaggactctccgatcctggtaagattaaacgccttagaagccaggttcaggtgtcgctggaagactatatcaacgataggcagtacgactctcggggccgcttcggggagttgctactgctcctgccaactcttcaatccattacatggcagatgatcgagcagatccaatttattaagctgttcggaatggccaaaatagataatttgctccaggaaatgctgttaggcggttcaccgagtgacgctccccatgcccaccaccctctgcatccacacctaatgcaggagcatatggggaccaacgtaatcgtggcaaatacgatgcccactcacctcagcaacggacagatgtgcgaatggcctagaccaaggggccaagccgctacccccgagacaccgcagccttctcccccaggcgggtccggaagcgaaccttataagctgcttcccggtgcggtcgcaactattgtgaaaccattgtcagccatcccccagcctaccataacaaagcaggaggttatttgaggactagtccctgttcccagagcccacttttttttctttttttgaaataaaatagcctgtctttcagatctaaaaaaaaaaaaaaaaaaaaaaaaaaaaaaaaaaaaaaaaaaaaaaaaaaaaaaaaaaaaaaaaaaaaaaaaaaaaaaaaaaaaaaaaaaaaaaaaaaaa

SEQ ID NO: 4399 - RNA, 1673 nt, synthetic construct
  misc_feature 1..1673: note = mRNA a-1 (A100) (opt3) from Homo sapiens__NP_000448.3__HNF4A(1-474)(K234R)
  source 1..1673: mol_type = other RNA
aggagagtcccgcagtcggcgtccagcggctctgcttgttcgtgtgtgtgtcgttgcaggccttattcaagcttaccatgagactgagcaagaccctcgtggacatggatatggccgactactccgctgcacttgatcccgcctatacaactctggagttcgaaaacgtccaggttttgacgatgggcaatgacacctctccttcagaggggacaaacttaaatgcgccaaacagtctgggagtgagcgctctatgcgccatctgtggtgatagggcaactggcaaacactacggggcctcctcttgcgacggatgtaagggctttttccggcgctcggtacgtaaaaatcatatgtattcatgccgatttagcagacaatgtgtggtcgataaggacaaaaggaaccagtgccggtactgtcgcctcaagaagtgcttcagagctggtatgaaaaaggaagcagtgcagaatgagagggatcggattagtacccgccgatcctcttatgaagacagctccctgccgtcaataaacgcccttctgcaggctgaggttttgagtagacaaatcacaagccccgtgtctgggattaatggagatatcagggccaaaaagattgcgtccatcgcagacgtctgtgagtcaatgaaagaacagctcctggtgctggtagagtgggccaagtacatacctgctttttgcgaactcccattagatgaccaggttgccctgcttcgggcacacgctggcgagcatttgctgctaggcgccacccgtcgcagcatggtgttcaaggacgtcctcctgcttgggaacgattatatcgtgcccagacactgtcctgagctggcggaaatgagtagggtgtctattcggatcttggacgagctcgtcctgccatttcaggaattacaaattgatgacaatgagtacgcctacctgaaagcaatcatattctttgatcccgacgctaagggactctccgatcctggtaaaattaagcgacttcgcagccaggttcaggtgtcgctggaagactatatcaacgatagacagtacgactctaggggccggttcggggagttgctactgctcctgccaactcttcaatccattacatggcagatgatcgagcagatccaatttattaaactgttcggaatggccaagatagataatttgctccaggaaatgctgttaggcggttcaccgagtgacgctccccatgcccaccaccctctgcatccacacctaatgcaggagcatatggggaccaacgtaatcgtggcaaatacgatgcccactcacctcagcaacggacagatgtgcgaatggcctcgcccaagaggccaagccgctacccccgagacaccgcagccttctcccccaggcgggtccggaagcgaaccttataaactgcttcccggtgcggtcgcaactattgtgaagccattgtcagccatcccccagcctaccataacaaagcaggaggttatttgaggactagtccctgttcccagagcccacttttttttctttttttgaaataaaatagcctgtctttcagatctaaaaaaaaaaaaaaaaaaaaaaaaaaaaaaaaaaaaaaaaaaaaaaaaaaaaaaaaaaaaaaaaaaaaaaaaaaaaaaaaaaaaaaaaaaaaaaaaaaaa

SEQ ID NO: 4400 - RNA, 1673 nt, synthetic construct
  misc_feature 1..1673: note = mRNA a-1 (A100) (opt3) from Homo sapiens__NP_000448.3__HNF4A(1-474)(K300R)
  source 1..1673: mol_type = other RNA
aggagagtcccgcagtcggcgtccagcggctctgcttgttcgtgtgtgtgtcgttgcaggccttattcaagcttaccatgagactgagcaagaccctcgtggacatggatatggccgactactccgctgcacttgatcccgcctatacaactctggagttcgaaaacgtccaggttttgacgatgggcaatgacacctctccttcagaggggacaaacttaaatgcgccaaacagtctgggagtgagcgctctatgcgccatctgtggtgatagggcaactggcaaacactacggggcctcctcttgcgacggatgtaagggctttttccggcgctcggtacgtaaaaatcatatgtattcatgccgatttagcagacaatgtgtggtcgataaggacaaaaggaaccagtgccggtactgtcgcctcaagaagtgcttcagagctggtatgaaaaaggaagcagtgcagaatgagagggatcggattagtacccgccgatcctcttatgaagacagctccctgccgtcaataaacgcccttctgcaggctgaggttttgagtagacaaatcacaagccccgtgtctgggattaatggagatatcagggccaaaaagattgcgtccatcgcagacgtctgtgagtcaatgaaagaacagctcctggtgctggtagagtgggccaagtacatacctgctttttgcgaactcccattagatgaccaggttgccctgcttcgggcacacgctggcgagcatttgctgctaggcgccaccaagcgtagcatggtgttcaaagacgtcctcctgcttgggaacgattatatcgtgccccgccactgtcctgagctggcggaaatgagtagagtgtctattaggatcttggacgagctcgtcctgccatttcaggaattacaaattgatgacaatgagtacgcctacctgaaggcaatcatattctttgatcccgacgctcggggactctccgatcctggtaaaattaagcgacttcgcagccaggttcaggtgtcgctggaagactatatcaacgatagacagtacgactctaggggccggttcggggagttgctactgctcctgccaactcttcaatccattacatggcagatgatcgagcagatccaatttattaaactgttcggaatggccaagatagataatttgctccaggaaatgctgttaggcggttcaccgagtgacgctccccatgcccaccaccctctgcatccacacctaatgcaggagcatatggggaccaacgtaatcgtggcaaatacgatgcccactcacctcagcaacggacagatgtgcgaatggcctcgcccaagaggccaagccgctacccccgagacaccgcagccttctcccccaggcgggtccggaagcgaaccttataaactgcttcccggtgcggtcgcaactattgtgaagccattgtcagccatcccccagcctaccataacaaagcaggaggttatttgaggactagtccctgttcccagagcccacttttttttctttttttgaaataaaatagcctgtctttcagatctaaaaaaaaaaaaaaaaaaaaaaaaaaaaaaaaaaaaaaaaaaaaaaaaaaaaaaaaaaaaaaaaaaaaaaaaaaaaaaaaaaaaaaaaaaaaaaaaaaaa

SEQ ID NO: 4401 - RNA, 1673 nt, synthetic construct
  misc_feature 1..1673: note = mRNA a-1 (A100) (opt3) from Homo sapiens__NP_000448.3__HNF4A(1-474)(K300R_K307R_K309R)
  source 1..1673: mol_type = other RNA
aggagagtcccgcagtcggcgtccagcggctctgcttgttcgtgtgtgtgtcgttgcaggccttattcaagcttaccatgagactgagcaagaccctcgtggacatggatatggccgactactccgctgcacttgatcccgcctatacaactctggagttcgaaaacgtccaggttttgacgatgggcaatgacacctctccttcagaggggacaaacttaaatgcgccaaacagtctgggagtgagcgctctatgcgccatctgtggtgatagggcaactggcaaacactacggggcctcctcttgcgacggatgtaagggctttttccggcgctcggtacgtaaaaatcatatgtattcatgccgatttagcagacaatgtgtggtcgataaggacaaaaggaaccagtgccggtactgtcgcctcaagaagtgcttcagagctggtatgaaaaaggaagcagtgcagaatgagagggatcggattagtacccgccgatcctcttatgaagacagctccctgccgtcaataaacgcccttctgcaggctgaggttttgagtagacaaatcacaagccccgtgtctgggattaatggagatatcagggccaaaaagattgcgtccatcgcagacgtctgtgagtcaatgaaagaacagctcctggtgctggtagagtgggccaagtacatacctgctttttgcgaactcccattagatgaccaggttgccctgcttcgggcacacgctggcgagcatttgctgctaggcgccaccaagcgtagcatggtgttcaaagacgtcctcctgcttgggaacgattatatcgtgccccgccactgtcctgagctggcggaaatgagtagagtgtctattaggatcttggacgagctcgtcctgccatttcaggaattacaaattgatgacaatgagtacgcctacctgaaggcaatcatattctttgatcccgacgctcggggactctccgatcctggtcgcattcgaagacttaggagccaggttcaggtgtcgctggaagactatatcaacgatcggcagtacgactctcgcggcagattcggggagttgctactgctcctgccaactcttcaatccattacatggcagatgatcgagcagatccaatttattaaactgttcggaatggccaagatagataatttgctccaggaaatgctgttaggcggttcaccgagtgacgctccccatgcccaccaccctctgcatccacacctaatgcaggagcatatggggaccaacgtaatcgtggcaaatacgatgcccactcacctcagcaacggacagatgtgcgaatggcctaggccacgtggccaagccgctacccccgagacaccgcagccttctcccccaggcgggtccggaagcgaaccttataaactgcttcccggtgcggtcgcaactattgtgaagccattgtcagccatcccccagcctaccataacaaaacaggaggttatttgaggactagtccctgttcccagagcccacttttttttctttttttgaaataaaatagcctgtctttcagatctaaaaaaaaaaaaaaaaaaaaaaaaaaaaaaaaaaaaaaaaaaaaaaaaaaaaaaaaaaaaaaaaaaaaaaaaaaaaaaaaaaaaaaaaaaaaaaaaaaaa

SEQ ID NO: 4402 - RNA, 1673 nt, synthetic construct
  misc_feature 1..1673: note = mRNA a-1 (A100) (opt3) from Homo sapiens__NP_000448.3__HNF4A(1-474)(K447R_K470R)
  source 1..1673: mol_type = other RNA
aggagagtcccgcagtcggcgtccagcggctctgcttgttcgtgtgtgtgtcgttgcaggccttattcaagcttaccatgagactgagcaagaccctcgtggacatggatatggccgactactccgctgcacttgatcccgcctatacaactctggagttcgaaaacgtccaggttttgacgatgggcaatgacacctctccttcagaggggacaaacttaaatgcgccaaacagtctgggagtgagcgctctatgcgccatctgtggtgatagggcaactggcaaacactacggggcctcctcttgcgacggatgtaagggctttttccggcgctcggtacgtaaaaatcatatgtattcatgccgatttagcagacaatgtgtggtcgataaggacaaaaggaaccagtgccggtactgtcgcctcaagaagtgcttcagagctggtatgaaaaaggaagcagtgcagaatgagagggatcggattagtacccgccgatcctcttatgaagacagctccctgccgtcaataaacgcccttctgcaggctgaggttttgagtagacaaatcacaagccccgtgtctgggattaatggagatatcagggccaaaaagattgcgtccatcgcagacgtctgtgagtcaatgaaagaacagctcctggtgctggtagagtgggccaagtacatacctgctttttgcgaactcccattagatgaccaggttgccctgcttcgggcacacgctggcgagcatttgctgctaggcgccaccaagcgtagcatggtgttcaaagacgtcctcctgcttgggaacgattatatcgtgccccgccactgtcctgagctggcggaaatgagtagagtgtctattaggatcttggacgagctcgtcctgccatttcaggaattacaaattgatgacaatgagtacgcctacctgaaggcaatcatattctttgatcccgacgctaaaggactctccgatcctggtaagattaaacggcttcgaagccaggttcaggtgtcgctggaagactatatcaacgatcgccagtacgactctagaggcaggttcggggagttgctactgctcctgccaactcttcaatccattacatggcagatgatcgagcagatccaatttattaagctgttcggaatggccaaaatagataatttgctccaggaaatgctgttaggcggttcaccgagtgacgctccccatgcccaccaccctctgcatccacacctaatgcaggagcatatggggaccaacgtaatcgtggcaaatacgatgcccactcacctcagcaacggacagatgtgcgaatggcctcggccacgcggccaagccgctacccccgagacaccgcagccttctcccccaggcgggtccggaagcgaaccttatagactgcttcccggtgcggtcgcaactattgtgaagccattgtcagccatcccccagcctaccataacaaggcaggaggttatttgaggactagtccctgttcccagagcccacttttttttctttttttgaaataaaatagcctgtctttcagatctaaaaaaaaaaaaaaaaaaaaaaaaaaaaaaaaaaaaaaaaaaaaaaaaaaaaaaaaaaaaaaaaaaaaaaaaaaaaaaaaaaaaaaaaaaaaaaaaaaaa

SEQ ID NO: 4403 - RNA, 1673 nt, synthetic construct
  misc_feature 1..1673: note = mRNA a-1 (A100) (opt3) from Homo sapiens__NP_000448.3__HNF4A(1-474)(K458R)
  source 1..1673: mol_type = other RNA
aggagagtcccgcagtcggcgtccagcggctctgcttgttcgtgtgtgtgtcgttgcaggccttattcaagcttaccatgagactgagcaagaccctcgtggacatggatatggccgactactccgctgcacttgatcccgcctatacaactctggagttcgaaaacgtccaggttttgacgatgggcaatgacacctctccttcagaggggacaaacttaaatgcgccaaacagtctgggagtgagcgctctatgcgccatctgtggtgatagggcaactggcaaacactacggggcctcctcttgcgacggatgtaagggctttttccggcgctcggtacgtaaaaatcatatgtattcatgccgatttagcagacaatgtgtggtcgataaggacaaaaggaaccagtgccggtactgtcgcctcaagaagtgcttcagagctggtatgaaaaaggaagcagtgcagaatgagagggatcggattagtacccgccgatcctcttatgaagacagctccctgccgtcaataaacgcccttctgcaggctgaggttttgagtagacaaatcacaagccccgtgtctgggattaatggagatatcagggccaaaaagattgcgtccatcgcagacgtctgtgagtcaatgaaagaacagctcctggtgctggtagagtgggccaagtacatacctgctttttgcgaactcccattagatgaccaggttgccctgcttcgggcacacgctggcgagcatttgctgctaggcgccaccaagcgtagcatggtgttcaaagacgtcctcctgcttgggaacgattatatcgtgccccgccactgtcctgagctggcggaaatgagtagagtgtctattaggatcttggacgagctcgtcctgccatttcaggaattacaaattgatgacaatgagtacgcctacctgaaggcaatcatattctttgatcccgacgctaaaggactctccgatcctggtaagattaaacggcttcgaagccaggttcaggtgtcgctggaagactatatcaacgatcgccagtacgactctagaggcaggttcggggagttgctactgctcctgccaactcttcaatccattacatggcagatgatcgagcagatccaatttattaagctgttcggaatggccaaaatagataatttgctccaggaaatgctgttaggcggttcaccgagtgacgctccccatgcccaccaccctctgcatccacacctaatgcaggagcatatggggaccaacgtaatcgtggcaaatacgatgcccactcacctcagcaacggacagatgtgcgaatggcctcggccacgcggccaagccgctacccccgagacaccgcagccttctcccccaggcgggtccggaagcgaaccttataagctgcttcccggtgcggtcgcaactattgtgagaccattgtcagccatcccccagcctaccataacaaagcaggaggttatttgaggactagtccctgttcccagagcccacttttttttctttttttgaaataaaatagcctgtctttcagatctaaaaaaaaaaaaaaaaaaaaaaaaaaaaaaaaaaaaaaaaaaaaaaaaaaaaaaaaaaaaaaaaaaaaaaaaaaaaaaaaaaaaaaaaaaaaaaaaaaaa

SEQ ID NO: 4404 - RNA, 1673 nt, synthetic construct
  misc_feature 1..1673: note = mRNA a-1 (A100) (opt3) from Homo sapiens__NP_000448.3__HNF4A(1-474)(K106R_K108R_K126R_K127R)
  source 1..1673: mol_type = other RNA
aggagagtcccgcagtcggcgtccagcggctctgcttgttcgtgtgtgtgtcgttgcaggccttattcaagcttaccatgagactgagcaagaccctcgtggacatggatatggccgactactccgctgcacttgatcccgcctatacaactctggagttcgaaaacgtccaggttttgacgatgggcaatgacacctctccttcagaggggacaaacttaaatgcgccaaacagtctgggagtgagcgctctatgcgccatctgtggtgatagggcaactggcaaacactacggggcctcctcttgcgacggatgtaagggctttttccggcgctcggtacgtaaaaatcatatgtattcatgccgatttagcagacaatgtgtggtcgatagggaccggcgcaaccagtgcagatactgtaggctcaagaaatgcttccgggctggtatgcgccgagaagcagtgcagaatgagagagataggattagtacccggcgttcctcttatgaagacagctccctgccgtcaataaacgcccttctgcaggctgaggttttgagtcgccaaatcacaagccccgtgtctgggattaatggagatatcagagccaagaagattgcgtccatcgcagacgtctgtgagtcaatgaaagaacagctcctggtgctggtagagtgggccaagtacatacctgctttttgcgaactcccattagatgaccaggttgccctgcttagggcacacgctggcgagcatttgctgctaggcgccaccaaacggagcatggtgttcaaggacgtcctcctgcttgggaacgattatatcgtgccccgacactgtcctgagctggcggaaatgagtcgcgtgtctattagaatcttggacgagctcgtcctgccatttcaggaattacaaattgatgacaatgagtacgcctacctgaaagcaatcatattctttgatcccgacgctaagggactctccgatcctggtaagattaaaaggcttcggagccaggttcaggtgtcgctggaagactatatcaacgatcgccagtacgactctagaggcaggttcggggagttgctactgctcctgccaactcttcaatccattacatggcagatgatcgagcagatccaatttattaagctgttcggaatggccaaaatagataatttgctccaggaaatgctgttaggcggttcaccgagtgacgctccccatgcccaccaccctctgcatccacacctaatgcaggagcatatggggaccaacgtaatcgtggcaaatacgatgcccactcacctcagcaacggacagatgtgcgaatggcctcgtccacggggccaagccgctacccccgagacaccgcagccttctcccccaggcgggtccggaagcgaaccttataagctgcttcccggtgcggtcgcaactattgtgaaaccattgtcagccatcccccagcctaccataacaaagcaggaggttatttgaggactagtccctgttcccagagcccacttttttttctttttttgaaataaaatagcctgtctttcagatctaaaaaaaaaaaaaaaaaaaaaaaaaaaaaaaaaaaaaaaaaaaaaaaaaaaaaaaaaaaaaaaaaaaaaaaaaaaaaaaaaaaaaaaaaaaaaaaaaaaa

SEQ ID NO: 4405 - RNA, 1673 nt, synthetic construct
  misc_feature 1..1673: note = mRNA a-1 (A100) (opt3) from Homo sapiens__NP_000448.3__HNF4A(1-474)(E285Q)
  source 1..1673: mol_type = other RNA
aggagagtcccgcagtcggcgtccagcggctctgcttgttcgtgtgtgtgtcgttgcaggccttattcaagcttaccatgagactgagcaagaccctcgtggacatggatatggccgactactccgctgcacttgatcccgcctatacaactctggagttcgaaaacgtccaggttttgacgatgggcaatgacacctctccttcagaggggacaaacttaaatgcgccaaacagtctgggagtgagcgctctatgcgccatctgtggtgatagggcaactggcaaacactacggggcctcctcttgcgacggatgtaagggctttttccggcgctcggtacgtaaaaatcatatgtattcatgccgatttagcagacaatgtgtggtcgataaggacaaaaggaaccagtgccggtactgtcgcctcaagaagtgcttcagagctggtatgaaaaaggaagcagtgcagaatgagagggatcggattagtacccgccgatcctcttatgaagacagctccctgccgtcaataaacgcccttctgcaggctgaggttttgagtagacaaatcacaagccccgtgtctgggattaatggagatatcagggccaaaaagattgcgtccatcgcagacgtctgtgagtcaatgaaagaacagctcctggtgctggtagagtgggccaagtacatacctgctttttgcgaactcccattagatgaccaggttgccctgcttcgggcacacgctggcgagcatttgctgctaggcgccaccaagcgtagcatggtgttcaaagacgtcctcctgcttgggaacgattatatcgtgccccgccactgtcctgagctggcggaaatgagtagagtgtctattaggatcttggacgagctcgtcctgccatttcaggaattacaaattgatgacaatcagtacgcctacctgaaggcaatcatattctttgatcccgacgctaaaggactctccgatcctggtaagattaaacggcttcgaagccaggttcaggtgtcgctggaggactatatcaacgatcgccaatacgactctagaggcaggttcggggaattgctactgctcctgccaactcttcagtccattacatggcagatgatcgagcaaatccagtttattaagctgttcggaatggccaaaatagataatttgctccaggagatgctgttaggcggttcaccgagtgacgctccccatgcccaccaccctctgcatccacacctaatgcaggaacatatggggaccaacgtaatcgtggcaaatacgatgcccactcacctcagcaacggacaaatgtgcgagtggcctcggccacgcggccaggccgctacccccgaaacaccgcagccttctcccccaggcgggtccggaagcgagccttataagctgcttcccggtgcggtcgcaactattgtgaagccattgtcagccatcccccagcctaccataacaaaacaagaagttatttgaggactagtccctgttcccagagcccacttttttttctttttttgaaataaaatagcctgtctttcagatctaaaaaaaaaaaaaaaaaaaaaaaaaaaaaaaaaaaaaaaaaaaaaaaaaaaaaaaaaaaaaaaaaaaaaaaaaaaaaaaaaaaaaaaaaaaaaaaaaaaa

SEQ ID NO: 4406 - RNA, 1673 nt, synthetic construct
  misc_feature 1..1673: note = mRNA a-1 (A100) (opt3) from Homo sapiens__NP_000448.3__HNF4A(1-474)(T166E)
  source 1..1673: mol_type = other RNA
aggagagtcccgcagtcggcgtccagcggctctgcttgttcgtgtgtgtgtcgttgcaggccttattcaagcttaccatgagactgagcaagaccctcgtggacatggatatggccgactactccgctgcacttgatcccgcctatacaactctggagttcgaaaacgtccaggttttgacgatgggcaatgacacctctccttcagaggggacaaacttaaatgcgccaaacagtctgggagtgagcgctctatgcgccatctgtggtgatagggcaactggcaaacactacggggcctcctcttgcgacggatgtaagggctttttccggcgctcggtacgtaaaaatcatatgtattcatgccgatttagcagacaatgtgtggtcgataaggacaaaaggaaccagtgccggtactgtcgcctcaagaagtgcttcagagctggtatgaaaaaggaagcagtgcagaatgagagggatcggattagtacccgccgatcctcttatgaagacagctccctgccgtcaataaacgcccttctgcaggctgaggttttgagtagacaaatcgagagccccgtgtctgggattaatggagatatcagggccaaaaagattgcgtccatcgcagacgtctgtgaatcaatgaaagagcagctcctggtgctggtagaatgggccaagtacatacctgctttttgcgagctcccattagatgaccaggttgccctgcttcgggcacacgctggcgagcatttgctgctaggcgccacaaagcgtagcatggtgttcaaagacgtcctcctgcttgggaacgattatatcgtgccccgccactgtcctgaactggcggagatgagtagagtgtctattaggatcttggacgaactcgtcctgccatttcaggagttacaaattgatgacaatgaatacgcctacctgaaggcaatcatattctttgatcccgacgctaaaggactctccgatcctggtaagattaaacggcttcgaagccaggttcaggtgtcgctggaggactatatcaacgatcgccagtacgactctagaggcaggttcggggagttgctactgctcctgccaacccttcaatccattacttggcagatgatcgaacagatccaatttattaagctgttcggaatggccaaaatagataatttgctccaggagatgctgttaggcggttcaccgagtgacgctccccatgcccaccaccctctgcatccacacctaatgcaggaacatatggggacaaacgtaatcgtggcaaataccatgcccacgcacctcagcaacggacagatgtgcgagtggcctcggccacgcggccaagccgctactcccgaaaccccgcagccttctcccccaggcgggtccggaagcgagccttataagctgcttcccggtgcggtcgcaacaattgtgaagccattgtcagccatcccccagcctactataaccaaacaggaggttatttgaggactagtccctgttcccagagcccacttttttttctttttttgaaataaaatagcctgtctttcagatctaaaaaaaaaaaaaaaaaaaaaaaaaaaaaaaaaaaaaaaaaaaaaaaaaaaaaaaaaaaaaaaaaaaaaaaaaaaaaaaaaaaaaaaaaaaaaaaaaaaa

SEQ ID NO: 4407 - RNA, 1673 nt, synthetic construct
  misc_feature 1..1673: note = mRNA a-1 (A100) (opt3) from Homo sapiens__NP_000448.3__HNF4A(1-474)(S148A)
  source 1..1673: mol_type = other RNA
aggagagtcccgcagtcggcgtccagcggctctgcttgttcgtgtgtgtgtcgttgcaggccttattcaagcttaccatgagactgagcaagaccctcgtggacatggatatggccgactactccgctgcacttgatcccgcctatacaactctggagttcgaaaacgtccaggttttgacgatgggcaatgacacctctccttcagaggggacaaacttaaatgcgccaaacagtctgggagtgagcgctctatgcgccatctgtggtgatagggcaactggcaaacactacggggcctcctcttgcgacggatgtaagggctttttccggcgctcggtacgtaaaaatcatatgtattcatgccgatttagcagacaatgtgtggtcgataaggacaaaaggaaccagtgccggtactgtcgcctcaagaagtgcttcagagctggtatgaaaaaggaagcagtgcagaatgagagggatcggattagtacccgccgatcctcttatgaagacagcgccctgccgtccataaacgcccttctgcaggccgaggttttgtcaagacaaatcacaagtcccgtgagcgggattaatggagatatcagggcgaaaaagattgcatctatcgccgacgtctgtgagtccatgaaagaacagctcctggtgctggtagagtgggctaagtacatacctgccttttgcgaactcccattagatgaccaggttgcactgcttcgggctcacgccggcgagcatttgctgctaggcgcgaccaagcgttcaatggtgttcaaagacgtcctcctgcttgggaacgattatatcgtgccccgccactgtcctgagctggccgaaatgagcagagtgagtattaggatcttggacgagctcgtcctgccatttcaggaattacaaattgatgacaatgagtacgcatacctgaaggctatcatattctttgatcccgacgccaaaggactctctgatcctggtaagattaaacggcttcgatcccaggttcaggtgagcctggaagactatatcaacgatcgccagtacgactcgagaggcaggttcggggagttgctactgctcctgccaactcttcaatctattacatggcagatgatcgagcagatccaatttattaagctgttcggaatggctaaaatagataatttgctccaggaaatgctgttaggcggttccccgtcagacgctccccatgcacaccaccctctgcatccacacctaatgcaggagcatatggggaccaacgtaatcgtggccaatacgatgcccactcacctcagtaacggacagatgtgcgaatggcctcggccacgcggccaagctgcgacccccgagacaccgcagcctagcccacccggcgggtccggatctgaaccttataagctgcttcccggtgcagtcgccactattgtgaagccattgagcgctatcccccagcctaccataacaaaacaggaggttatttgaggactagtccctgttcccagagcccacttttttttctttttttgaaataaaatagcctgtctttcagatctaaaaaaaaaaaaaaaaaaaaaaaaaaaaaaaaaaaaaaaaaaaaaaaaaaaaaaaaaaaaaaaaaaaaaaaaaaaaaaaaaaaaaaaaaaaaaaaaaaaa

SEQ ID NO: 4408 - RNA, 1673 nt, synthetic construct
  misc_feature 1..1673: note = mRNA a-1 (A100) (opt3) from Homo sapiens__NP_000448.3__HNF4A(1-474)(S148E)
  source 1..1673: mol_type = other RNA
aggagagtcccgcagtcggcgtccagcggctctgcttgttcgtgtgtgtgtcgttgcaggccttattcaagcttaccatgagactgagcaagaccctcgtggacatggatatggccgactactccgctgcacttgatcccgcctatacaactctggagttcgaaaacgtccaggttttgacgatgggcaatgacacctctccttcagaggggacaaacttaaatgcgccaaacagtctgggagtgagcgctctatgcgccatctgtggtgatagggcaactggcaaacactacggggcctcctcttgcgacggatgtaagggctttttccggcgctcggtacgtaaaaatcatatgtattcatgccgatttagcagacaatgtgtggtcgataaggacaaaaggaaccagtgccggtactgtcgcctcaagaagtgcttcagagctggtatgaaaaaggaagcagtgcagaatgagagggatcggattagtacccgccgatcctcttatgaagacagcgagctgccgtccataaacgcccttctgcaggctgaggttttgtcaagacaaatcacaagtcccgtgagcgggattaatggagatatcagggccaaaaagattgcgtctatcgcagacgtctgtgaatccatgaaagagcagctcctggtgctggtagaatgggccaagtacatacctgctttttgcgagctcccattagatgaccaggttgccctgcttcgggcacacgctggcgagcatttgctgctaggcgccaccaagcgttcaatggtgttcaaagacgtcctcctgcttgggaacgattatatcgtgccccgccactgtcctgaactggcggagatgagcagagtgagtattaggatcttggacgaactcgtcctgccatttcaggagttacaaattgatgacaatgaatacgcctacctgaaggcaatcatattctttgatcccgacgctaaaggactctctgatcctggtaagattaaacggcttcgatcccaggttcaggtgagcctggaggactatatcaacgatcgccagtacgactcgagaggcaggttcggggagttgctactgctcctgccaactcttcaatctattacatggcagatgatcgaacagatccaatttattaagctgttcggaatggccaaaatagataatttgctccaggagatgctgttaggcggttccccgtcagacgctccccatgcccaccaccctctgcatccacacctaatgcaggaacatatggggaccaacgtaatcgtggcaaatacgatgcccactcacctcagtaacggacagatgtgcgagtggcctcggccacgcggccaagccgctacccccgaaacaccgcagcctagcccacccggcgggtccggatctgagccttataagctgcttcccggtgcggtcgcaactattgtgaagccattgagcgccatcccccagcctaccataacaaaacaggaggttatttgaggactagtccctgttcccagagcccacttttttttctttttttgaaataaaatagcctgtctttcagatctaaaaaaaaaaaaaaaaaaaaaaaaaaaaaaaaaaaaaaaaaaaaaaaaaaaaaaaaaaaaaaaaaaaaaaaaaaaaaaaaaaaaaaaaaaaaaaaaaaaa

SEQ ID NO: 4409 - RNA, 1673 nt, synthetic construct
  misc_feature 1..1673: note = mRNA a-1 (A100) (opt3) from Homo sapiens__NP_000448.3__HNF4A(1-474)(S183A)
  source 1..1673: mol_type = other RNA
aggagagtcccgcagtcggcgtccagcggctctgcttgttcgtgtgtgtgtcgttgcaggccttattcaagcttaccatgagactgagcaagaccctcgtggacatggatatggccgactactccgctgcacttgatcccgcctatacaactctggagttcgaaaacgtccaggttttgacgatgggcaatgacacctctccttcagaggggacaaacttaaatgcgccaaacagtctgggagtgagcgctctatgcgccatctgtggtgatagggcaactggcaaacactacggggcctcctcttgcgacggatgtaagggctttttccggcgctcggtacgtaaaaatcatatgtattcatgccgatttagcagacaatgtgtggtcgataaggacaaaaggaaccagtgccggtactgtcgcctcaagaagtgcttcagagctggtatgaaaaaggaagcagtgcagaatgagagggatcggattagtacccgccgatcctcttatgaagacagctccctgccgtcaataaacgcccttctgcaggctgaggttttgagtagacaaatcacaagccccgtgtctgggattaatggagatatcagggccaaaaagattgcggcaatcgccgacgtctgtgagtccatgaaagaacagctcctggtgctggtagagtgggctaagtacatacctgccttttgcgaactcccattagatgaccaggttgcactgcttcgggctcacgccggcgagcatttgctgctaggcgcgaccaagcgttcaatggtgttcaaagacgtcctcctgcttgggaacgattatatcgtgccccgccactgtcctgagctggccgaaatgagcagagtgagtattaggatcttggacgagctcgtcctgccatttcaggaattacaaattgatgacaatgagtacgcatacctgaaggctatcatattctttgatcccgacgccaaaggactctctgatcctggtaagattaaacggcttcgatcccaggttcaggtgagcctggaagactatatcaacgatcgccagtacgactcgagaggcaggttcggggagttgctactgctcctgccaactcttcaatctattacatggcagatgatcgagcagatccaatttattaagctgttcggaatggctaaaatagataatttgctccaggaaatgctgttaggcggttccccgtcagacgcaccccatgcccaccaccctctgcatccacacctaatgcaggagcatatggggaccaacgtaatcgtggccaatacgatgcccactcacctcagtaacggacagatgtgcgaatggcctcggccacgcggccaagctgcgacccccgagacaccgcagcctagcccacccggcgggtccggatctgaaccttataagctgcttcccggtgcagtcgccactattgtgaagccattgagcgctatcccccagcctaccataacaaaacaggaggttatttgaggactagtccctgttcccagagcccacttttttttctttttttgaaataaaatagcctgtctttcagatctaaaaaaaaaaaaaaaaaaaaaaaaaaaaaaaaaaaaaaaaaaaaaaaaaaaaaaaaaaaaaaaaaaaaaaaaaaaaaaaaaaaaaaaaaaaaaaaaaaaa

SEQ ID NO: 4410 - RNA, 1673 nt, synthetic construct
  misc_feature 1..1673: note = mRNA a-1 (A100) (opt3) from Homo sapiens__NP_000448.3__HNF4A(1-474)(S183E)
  source 1..1673: mol_type = other RNA
aggagagtcccgcagtcggcgtccagcggctctgcttgttcgtgtgtgtgtcgttgcaggccttattcaagcttaccatgagactgagcaagaccctcgtggacatggatatggccgactactccgctgcacttgatcccgcctatacaactctggagttcgaaaacgtccaggttttgacgatgggcaatgacacctctccttcagaggggacaaacttaaatgcgccaaacagtctgggagtgagcgctctatgcgccatctgtggtgatagggcaactggcaaacactacggggcctcctcttgcgacggatgtaagggctttttccggcgctcggtacgtaaaaatcatatgtattcatgccgatttagcagacaatgtgtggtcgataaggacaaaaggaaccagtgccggtactgtcgcctcaagaagtgcttcagagctggtatgaaaaaggaagcagtgcagaatgagagggatcggattagtacccgccgatcctcttatgaagacagctccctgccgtcaataaacgcccttctgcaggctgaggttttgagtagacaaatcacaagccccgtgtctgggattaatggagatatcagggccaaaaagattgcggagatcgcagacgtctgtgaatccatgaaagagcagctcctggtgctggtagaatgggccaagtacatacctgctttttgcgagctcccattagatgaccaggttgccctgcttcgggcacacgctggcgagcatttgctgctaggcgccaccaagcgttcaatggtgttcaaagacgtcctcctgcttgggaacgattatatcgtgccccgccactgtcctgaactggcggagatgagcagagtgagtattaggatcttggacgaactcgtcctgccatttcaggagttacaaattgatgacaatgaatacgcctacctgaaggcaatcatattctttgatcccgacgctaaaggactctctgatcctggtaagattaaacggcttcgatcccaggttcaggtgagcctggaggactatatcaacgatcgccagtacgactcgagaggcaggttcggggagttgctactgctcctgccaactcttcaatctattacatggcagatgatcgaacagatccaatttattaagctgttcggaatggccaaaatagataatttgctccaggagatgctgttaggcggttccccgtcagacgctccccatgcccaccaccctctgcatccacacctaatgcaggaacatatggggaccaacgtaatcgtggcaaatacgatgcccactcacctcagtaacggacagatgtgcgagtggcctcggccacgcggccaagccgctacccccgaaacaccgcagcctagcccacccggcgggtccggatctgagccttataagctgcttcccggtgcggtcgcaactattgtgaagccattgagcgccatcccccagcctaccataacaaaacaggaggttatttgaggactagtccctgttcccagagcccacttttttttctttttttgaaataaaatagcctgtctttcagatctaaaaaaaaaaaaaaaaaaaaaaaaaaaaaaaaaaaaaaaaaaaaaaaaaaaaaaaaaaaaaaaaaaaaaaaaaaaaaaaaaaaaaaaaaaaaaaaaaaaa

SEQ ID NO: 4411 - RNA, 1673 nt, synthetic construct
  misc_feature 1..1673: note = mRNA a-1 (A100) (opt3) from Homo sapiens__NP_000448.3__HNF4A(1-474)(S461A)
  source 1..1673: mol_type = other RNA
aggagagtcccgcagtcggcgtccagcggctctgcttgttcgtgtgtgtgtcgttgcaggccttattcaagcttaccatgagactgagcaagaccctcgtggacatggatatggccgactactccgctgcacttgatcccgcctatacaactctggagttcgaaaacgtccaggttttgacgatgggcaatgacacctctccttcagaggggacaaacttaaatgcgccaaacagtctgggagtgagcgctctatgcgccatctgtggtgatagggcaactggcaaacactacggggcctcctcttgcgacggatgtaagggctttttccggcgctcggtacgtaaaaatcatatgtattcatgccgatttagcagacaatgtgtggtcgataaggacaaaaggaaccagtgccggtactgtcgcctcaagaagtgcttcagagctggtatgaaaaaggaagcagtgcagaatgagagggatcggattagtacccgccgatcctcttatgaagacagctccctgccgtcaataaacgcccttctgcaggctgaggttttgagtagacaaatcacaagccccgtgtctgggattaatggagatatcagggccaaaaagattgcgtccatcgcagacgtctgtgagtcaatgaaagaacagctcctggtgctggtagagtgggccaagtacatacctgctttttgcgaactcccattagatgaccaggttgccctgcttcgggcacacgctggcgagcatttgctgctaggcgccaccaagcgtagcatggtgttcaaagacgtcctcctgcttgggaacgattatatcgtgccccgccactgtcctgagctggcggaaatgagtagagtgtctattaggatcttggacgagctcgtcctgccatttcaggaattacaaattgatgacaatgagtacgcctacctgaaggcaatcatattctttgatcccgacgctaaaggactctccgatcctggtaagattaaacggcttcgaagccaggttcaggtgtcgctggaagactatatcaacgatcgccagtacgactctagaggcaggttcggggagttgctactgctcctgccaactcttcaatccattacatggcagatgatcgagcagatccaatttattaagctgttcggaatggccaaaatagataatttgctccaggaaatgctgttaggcggttcaccgagtgacgctccccatgcccaccaccctctgcatccacacctaatgcaggagcatatggggaccaacgtaatcgtggcaaatacgatgcccactcacctcagcaacggacagatgtgcgaatggcctcggccacgcggccaagccgctacccccgagacaccgcagccttctcccccaggcgggtccggaagcgaaccttataagctgcttcccggtgcggtcgcaactattgtgaagccattggccgctatcccccagcctaccataacaaaacaggaggttatttgaggactagtccctgttcccagagcccacttttttttctttttttgaaataaaatagcctgtctttcagatctaaaaaaaaaaaaaaaaaaaaaaaaaaaaaaaaaaaaaaaaaaaaaaaaaaaaaaaaaaaaaaaaaaaaaaaaaaaaaaaaaaaaaaaaaaaaaaaaaaaa

SEQ ID NO: 4412 - RNA, 1673 nt, synthetic construct
  misc_feature 1..1673: note = mRNA a-1 (A100) (opt3) from Homo sapiens__NP_000448.3__HNF4A(1-474)(S461E)
  source 1..1673: mol_type = other RNA
aggagagtcccgcagtcggcgtccagcggctctgcttgttcgtgtgtgtgtcgttgcaggccttattcaagcttaccatgagactgagcaagaccctcgtggacatggatatggccgactactccgctgcacttgatcccgcctatacaactctggagttcgaaaacgtccaggttttgacgatgggcaatgacacctctccttcagaggggacaaacttaaatgcgccaaacagtctgggagtgagcgctctatgcgccatctgtggtgatagggcaactggcaaacactacggggcctcctcttgcgacggatgtaagggctttttccggcgctcggtacgtaaaaatcatatgtattcatgccgatttagcagacaatgtgtggtcgataaggacaaaaggaaccagtgccggtactgtcgcctcaagaagtgcttcagagctggtatgaaaaaggaagcagtgcagaatgagagggatcggattagtacccgccgatcctcttatgaagacagctccctgccgtcaataaacgcccttctgcaggctgaggttttgagtagacaaatcacaagccccgtgtctgggattaatggagatatcagggccaaaaagattgcgtccatcgcagacgtctgtgagtcaatgaaagaacagctcctggtgctggtagagtgggccaagtacatacctgctttttgcgaactcccattagatgaccaggttgccctgcttcgggcacacgctggcgagcatttgctgctaggcgccaccaagcgtagcatggtgttcaaagacgtcctcctgcttgggaacgattatatcgtgccccgccactgtcctgagctggcggaaatgagtagagtgtctattaggatcttggacgagctcgtcctgccatttcaggaattacaaattgatgacaatgagtacgcctacctgaaggcaatcatattctttgatcccgacgctaaaggactctccgatcctggtaagattaaacggcttcgaagccaggttcaggtgtcgctggaagactatatcaacgatcgccagtacgactctagaggcaggttcggggagttgctactgctcctgccaactcttcaatccattacatggcagatgatcgagcagatccaatttattaagctgttcggaatggccaaaatagataatttgctccaggaaatgctgttaggcggttcaccgagtgacgctccccatgcccaccaccctctgcatccacacctaatgcaggagcatatggggaccaacgtaatcgtggcaaatacgatgcccactcacctcagcaacggacagatgtgcgaatggcctcggccacgcggccaagccgctacccccgagacaccgcagccttctcccccaggcgggtccggaagcgaaccttataagctgcttcccggtgcggtcgcaactattgtgaagccattggaggccatcccccagcctaccataacaaaacaggaggttatttgaggactagtccctgttcccagagcccacttttttttctttttttgaaataaaatagcctgtctttcagatctaaaaaaaaaaaaaaaaaaaaaaaaaaaaaaaaaaaaaaaaaaaaaaaaaaaaaaaaaaaaaaaaaaaaaaaaaaaaaaaaaaaaaaaaaaaaaaaaaaaa

SEQ ID NO: 4413 - RNA, 1673 nt, synthetic construct
  misc_feature 1..1673: note = mRNA a-1 (A100) (opt3) from Homo sapiens__NP_000448.3__HNF4A(1-474)(S142A_S143A_S313A)
  source 1..1673: mol_type = other RNA
aggagagtcccgcagtcggcgtccagcggctctgcttgttcgtgtgtgtgtcgttgcaggccttattcaagcttaccatgagactgagcaagaccctcgtggacatggatatggccgactactccgctgcacttgatcccgcctatacaactctggagttcgaaaacgtccaggttttgacgatgggcaatgacacctctccttcagaggggacaaacttaaatgcgccaaacagtctgggagtgagcgctctatgcgccatctgtggtgatagggcaactggcaaacactacggggcctcctcttgcgacggatgtaagggctttttccggcgctcggtacgtaaaaatcatatgtattcatgccgatttagcagacaatgtgtggtcgataaggacaaaaggaaccagtgccggtactgtcgcctcaagaagtgcttcagagctggtatgaaaaaggaagcagtgcagaatgagagggatcggattagtacccgccgagccgcttatgaagactcctctctgccgagcataaacgcccttctgcaggcggaggttttgtccagacaaatcacatcacccgtgagtgggattaatggagatatcagggccaaaaagattgccagcatcgctgacgtctgtgagtctatgaaagaacagctcctggtgctggtagagtgggccaagtacatacctgcattttgcgaactcccattagatgaccaggttgctctgcttcgggcccacgcgggcgagcatttgctgctaggcgccaccaagcgttccatggtgttcaaagacgtcctcctgcttgggaacgattatatcgtgccccgccactgtcctgagctggcagaaatgtcaagagtgagcattaggatcttggacgagctcgtcctgccatttcaggaattacaaattgatgacaatgagtacgcttacctgaaggccatcatattctttgatcccgacgctaaaggactcagtgatcctggtaagattaaacggcttcgagcccaggttcaggtgtctctggaagactatatcaacgatcgccagtacgactccagaggcaggttcggggagttgctactgctcctgccaactcttcaaagcattacatggcagatgatcgagcagatccaatttattaagctgttcggaatggcaaaaatagataatttgctccaggaaatgctgttaggcggttcgccgtctgacgcaccccatgctcaccaccctctgcatccacacctaatgcaggagcatatggggaccaacgtaatcgtggcgaatacgatgcccactcacctctccaacggacagatgtgcgaatggcctcggccacgcggccaagcagccacccccgagacaccgcagccttcacccccaggcgggagtggaagcgaaccttataagctgcttcccggtgctgtcgccactattgtgaagccattgtccgcaatcccccagcctaccataacaaaacaggaggttatttgaggactagtccctgttcccagagcccacttttttttctttttttgaaataaaatagcctgtctttcagatctaaaaaaaaaaaaaaaaaaaaaaaaaaaaaaaaaaaaaaaaaaaaaaaaaaaaaaaaaaaaaaaaaaaaaaaaaaaaaaaaaaaaaaaaaaaaaaaaaaaa

SEQ ID NO: 4414 - RNA, 1673 nt, synthetic construct
  misc_feature 1..1673: note = mRNA a-1 (A100) (opt3) from Homo sapiens__NP_000448.3__HNF4A(1-474)(S142A_S143A_S313A_K458R)
  source 1..1673: mol_type = other RNA
aggagagtcccgcagtcggcgtccagcggctctgcttgttcgtgtgtgtgtcgttgcaggccttattcaagcttaccatgagactgagcaagaccctcgtggacatggatatggccgactactccgctgcacttgatcccgcctatacaactctggagttcgaaaacgtccaggttttgacgatgggcaatgacacctctccttcagaggggacaaacttaaatgcgccaaacagtctgggagtgagcgctctatgcgccatctgtggtgatagggcaactggcaaacactacggggcctcctcttgcgacggatgtaagggctttttccggcgctcggtacgtaaaaatcatatgtattcatgccgatttagcagacaatgtgtggtcgataaggacaaaaggaaccagtgccggtactgtcgcctcaagaagtgcttcagagctggtatgaaaaaggaagcagtgcagaatgagagggatcggattagtacccgccgagccgcttatgaagactcctctctgccgagcataaacgcccttctgcaggcggaggttttgtccagacaaatcacatcacccgtgagtgggattaatggagatatcagggccaaaaagattgccagcatcgctgacgtctgtgagtctatgaaagaacagctcctggtgctggtagagtgggccaagtacatacctgcattttgcgaactcccattagatgaccaggttgctctgcttcgggcccacgcgggcgagcatttgctgctaggcgccaccaagcgttccatggtgttcaaagacgtcctcctgcttgggaacgattatatcgtgccccgccactgtcctgagctggcagaaatgtcaagagtgagcattaggatcttggacgagctcgtcctgccatttcaggaattacaaattgatgacaatgagtacgcttacctgaaggccatcatattctttgatcccgacgctaaaggactcagtgatcctggtaagattaaacggcttcgagcccaggttcaggtgtctctggaagactatatcaacgatcgccagtacgactccagaggcaggttcggggagttgctactgctcctgccaactcttcaaagcattacatggcagatgatcgagcagatccaatttattaagctgttcggaatggcaaaaatagataatttgctccaggaaatgctgttaggcggttcgccgtctgacgcaccccatgctcaccaccctctgcatccacacctaatgcaggagcatatggggaccaacgtaatcgtggcgaatacgatgcccactcacctctccaacggacagatgtgcgaatggcctcggccacgcggccaagcagccacccccgagacaccgcagccttcacccccaggcgggagtggaagcgaaccttataagctgcttcccggtgctgtcgccactattgtgagaccattgtccgcaatcccccagcctaccataacaaagcaggaggttatttgaggactagtccctgttcccagagcccacttttttttctttttttgaaataaaatagcctgtctttcagatctaaaaaaaaaaaaaaaaaaaaaaaaaaaaaaaaaaaaaaaaaaaaaaaaaaaaaaaaaaaaaaaaaaaaaaaaaaaaaaaaaaaaaaaaaaaaaaaaaaaa

SEQ ID NO: 4415 - RNA, 1673 nt, synthetic construct
  misc_feature 1..1673: note = mRNA a-1 (A100) (opt3) from Homo sapiens__NP_000448.3__HNF4A(1-474)(S142A_S143A_S167A_S313A_ S378A_T429A_T432A_S436A_K458R)
  source 1..1673: mol_type = other RNA
aggagagtcccgcagtcggcgtccagcggctctgcttgttcgtgtgtgtgtcgttgcaggccttattcaagcttaccatgagactgagcaagaccctcgtggacatggatatggccgactactccgctgcacttgatcccgcctatacaactctggagttcgaaaacgtccaggttttgacgatgggcaatgacacctctccttcagaggggacaaacttaaatgcgccaaacagtctgggagtgagcgctctatgcgccatctgtggtgatagggcaactggcaaacactacggggcctcctcttgcgacggatgtaagggctttttccggcgctcggtacgtaaaaatcatatgtattcatgccgatttagcagacaatgtgtggtcgataaggacaaaaggaaccagtgccggtactgtcgcctcaagaagtgcttcagagctggtatgaaaaaggaagcagtgcagaatgagagggatcggattagtacccgccgagccgcttatgaagactcctctctgccgagcataaacgcccttctgcaggcggaggttttgtccagacaaatcacagcacccgtgtcagggattaatggagatatcagggccaaaaagattgctagtatcgccgacgtctgtgagagcatgaaagaacagctcctggtgctggtagagtgggcaaagtacatacctgctttttgcgaactcccattagatgaccaggttgccctgcttcgggcgcacgccggcgagcatttgctgctaggcgcaaccaagcgttctatggtgttcaaagacgtcctcctgcttgggaacgattatatcgtgccccgccactgtcctgagctggctgaaatgtccagagtgtcaattaggatcttggacgagctcgtcctgccatttcaggaattacaaattgatgacaatgagtacgcctacctgaaggctatcatattctttgatcccgacgccaaaggactcagcgatcctggtaagattaaacggcttcgagcacaggttcaggtgagtctggaagactatatcaacgatcgccagtacgactctagaggcaggttcggggagttgctactgctcctgccaactcttcaatccattacatggcagatgatcgagcagatccaatttattaagctgttcggaatggccaaaatagataatttgctccaggaaatgctgttaggcggtgctccgagcgacgcgccccatgcacaccaccctctgcatccacacctaatgcaggagcatatggggaccaacgtaatcgtggccaatacgatgcccactcacctctcgaacggacagatgtgcgaatggcctcggccacgcggccaagctgccgcacccgaggccccgcagcctgctcccccaggcgggtctggatccgaaccttataagctgcttcccggtgccgtcgcaaccattgtgagaccattgtcagcgatcccccagcctacaataactaagcaggaggttatttgaggactagtccctgttcccagagcccacttttttttctttttttgaaataaaatagcctgtctttcagatctaaaaaaaaaaaaaaaaaaaaaaaaaaaaaaaaaaaaaaaaaaaaaaaaaaaaaaaaaaaaaaaaaaaaaaaaaaaaaaaaaaaaaaaaaaaaaaaaaaaa

SEQ ID NO: 4416 - RNA, 1673 nt, synthetic construct
  misc_feature 1..1673: note = mRNA a-1 (A100) (opt3) from Homo sapiens__NP_000448.3__HNF4A(1-474)(S142A_S143A_S148A_S167A_ S313A_S378A_T429A_T432A_S436A_K458R)
  source 1..1673: mol_type = other RNA
aggagagtcccgcagtcggcgtccagcggctctgcttgttcgtgtgtgtgtcgttgcaggccttattcaagcttaccatgagactgagcaagaccctcgtggacatggatatggccgactactccgctgcacttgatcccgcctatacaactctggagttcgaaaacgtccaggttttgacgatgggcaatgacacctctccttcagaggggacaaacttaaatgcgccaaacagtctgggagtgagcgctctatgcgccatctgtggtgatagggcaactggcaaacactacggggcctcctcttgcgacggatgtaagggctttttccggcgctcggtacgtaaaaatcatatgtattcatgccgatttagcagacaatgtgtggtcgataaggacaaaaggaaccagtgccggtactgtcgcctcaagaagtgcttcagagctggtatgaaaaaggaagcagtgcagaatgagagggatcggattagtacccgccgagccgcttatgaagactccgccctgccgtctataaacgcgcttctgcaggcagaggttttgagcagacaaatcacagcccccgtgtccgggattaatggagatatcagggctaaaaagattgcctcaatcgcagacgtctgtgagagtatgaaagaacagctcctggtgctggtagagtgggctaagtacatacctgccttttgcgaactcccattagatgaccaggttgcgctgcttcgggcccacgcaggcgagcatttgctgctaggcgctaccaagcgtagcatggtgttcaaagacgtcctcctgcttgggaacgattatatcgtgccccgccactgtcctgagctggccgaaatgtctagagtgtccattaggatcttggacgagctcgtcctgccatttcaggaattacaaattgatgacaatgagtacgcttacctgaaggccatcatattctttgatcccgacgcaaaaggactctcagatcctggtaagattaaacggcttcgagcccaggttcaggtgagcctggaagactatatcaacgatcgccagtacgacagtagaggcaggttcggggagttgctactgctcctgccaactcttcaatctattacatggcagatgatcgagcagatccaatttattaagctgttcggaatggctaaaatagataatttgctccaggaaatgctgttaggcggtgcgccgtccgacgcaccccatgcccaccaccctctgcatccacacctaatgcaggagcatatggggaccaacgtaatcgtggctaatacgatgcccactcacctcagcaacggacagatgtgcgaatggcctcggccacgcggccaagccgcagcccccgaggctccgcagcctgcacccccaggcgggtcgggatctgaaccttataagctgcttcccggtgccgtcgcgaccattgtgagaccattgtccgctatcccccagcctacaataactaagcaggaggttatttgaggactagtccctgttcccagagcccacttttttttctttttttgaaataaaatagcctgtctttcagatctaaaaaaaaaaaaaaaaaaaaaaaaaaaaaaaaaaaaaaaaaaaaaaaaaaaaaaaaaaaaaaaaaaaaaaaaaaaaaaaaaaaaaaaaaaaaaaaaaaaa

SEQ ID NO: 4417 - RNA, 1673 nt, synthetic construct
  misc_feature 1..1673: note = mRNA a-1 (A100) (opt3) from Homo sapiens__NP_000448.3__HNF4A(1-474)(K106R_K108R_K126R_K127R_ S142A_S143A_S148A_S167A_S313A_S378A_T429A_T432A_S436A_K458R )
  source 1..1673: mol_type = other RNA
aggagagtcccgcagtcggcgtccagcggctctgcttgttcgtgtgtgtgtcgttgcaggccttattcaagcttaccatgagactgagcaagaccctcgtggacatggatatggccgactactccgctgcacttgatcccgcctatacaactctggagttcgaaaacgtccaggttttgacgatgggcaatgacacctctccttcagaggggacaaacttaaatgcgccaaacagtctgggagtgagcgctctatgcgccatctgtggtgatagggcaactggcaaacactacggggcctcctcttgcgacggatgtaagggctttttccggcgctcggtacgtaaaaatcatatgtattcatgccgatttagcagacaatgtgtggtcgatagggaccggcgcaaccagtgcagatactgtaggctcaagaaatgcttccgggctggtatgcgccgagaagcagtgcagaatgagagagataggattagtacccggcgtgccgcttatgaagactccgccctgccgtctataaacgcgcttctgcaggcagaggttttgagccgccaaatcacagcccccgtgtccgggattaatggagatatcagagctaagaagattgcctcaatcgcagacgtctgtgagagtatgaaagaacagctcctggtgctggtagagtgggctaagtacatacctgccttttgcgaactcccattagatgaccaggttgcgctgcttagggcccacgcaggcgagcatttgctgctaggcgctaccaaacggagcatggtgttcaaggacgtcctcctgcttgggaacgattatatcgtgccccgacactgtcctgagctggccgaaatgtctcgcgtgtccattagaatcttggacgagctcgtcctgccatttcaggaattacaaattgatgacaatgagtacgcttacctgaaagccatcatattctttgatcccgacgcaaagggactctcagatcctggtaagattaaaaggcttcgggcccaggttcaggtgagcctggaagactatatcaacgatcgccagtacgacagtagaggcaggttcggggagttgctactgctcctgccaactcttcaatctattacatggcagatgatcgagcagatccaatttattaagctgttcggaatggctaaaatagataatttgctccaggaaatgctgttaggcggtgcgccgtccgacgcaccccatgcccaccaccctctgcatccacacctaatgcaggagcatatggggaccaacgtaatcgtggctaatacgatgcccactcacctcagcaacggacagatgtgcgaatggcctcgtccacggggccaagccgcagcccccgaggctccgcagcctgcacccccaggcgggtcgggatctgaaccttataagctgcttcccggtgccgtcgcgaccattgtgcgaccattgtccgctatcccccagcctacaataactaaacaggaggttatttgaggactagtccctgttcccagagcccacttttttttctttttttgaaataaaatagcctgtctttcagatctaaaaaaaaaaaaaaaaaaaaaaaaaaaaaaaaaaaaaaaaaaaaaaaaaaaaaaaaaaaaaaaaaaaaaaaaaaaaaaaaaaaaaaaaaaaaaaaaaaaa

SEQ ID NO: 4418 - RNA, 1673 nt, synthetic construct
  misc_feature 1..1673: note = mRNA a-1 (A100) (opt3) from Homo sapiens__NP_000448.3__HNF4A(1-474)(S142A_S143A_S148A_T166A_ S167A_S313A_S378A_T429A_T432A_S436A_K458R)
  source 1..1673: mol_type = other RNA
aggagagtcccgcagtcggcgtccagcggctctgcttgttcgtgtgtgtgtcgttgcaggccttattcaagcttaccatgagactgagcaagaccctcgtggacatggatatggccgactactccgctgcacttgatcccgcctatacaactctggagttcgaaaacgtccaggttttgacgatgggcaatgacacctctccttcagaggggacaaacttaaatgcgccaaacagtctgggagtgagcgctctatgcgccatctgtggtgatagggcaactggcaaacactacggggcctcctcttgcgacggatgtaagggctttttccggcgctcggtacgtaaaaatcatatgtattcatgccgatttagcagacaatgtgtggtcgataaggacaaaaggaaccagtgccggtactgtcgcctcaagaagtgcttcagagctggtatgaaaaaggaagcagtgcagaatgagagggatcggattagtacccgccgagccgcttatgaagactccgccctgccgtctataaacgcgcttctgcaggcagaggttttgagcagacaaatcgccgctcccgtgtccgggattaatggagatatcagggccaaaaagattgcatcaatcgctgacgtctgtgagagtatgaaagaacagctcctggtgctggtagagtgggccaagtacatacctgcgttttgcgaactcccattagatgaccaggttgccctgcttcgggcacacgctggcgagcatttgctgctaggcgccacaaagcgtagcatggtgttcaaagacgtcctcctgcttgggaacgattatatcgtgccccgccactgtcctgagctggctgaaatgtctagagtgtccattaggatcttggacgagctcgtcctgccatttcaggaattacaaattgatgacaatgagtacgcctacctgaaggcaatcatattctttgatcccgacgccaaaggactctcagatcctggtaagattaaacggcttcgagctcaggttcaggtgagcctggaagactatatcaacgatcgccagtacgacagtagaggcaggttcggggagttgctactgctcctgccaacccttcaatctattacttggcagatgatcgagcagatccaatttattaagctgttcggaatggcgaaaatagataatttgctccaggaaatgctgttaggcggtgcaccgtccgacgctccccatgcccaccaccctctgcatccacacctaatgcaggagcatatggggacaaacgtaatcgtggccaataccatgcccacgcacctcagcaacggacagatgtgcgaatggcctcggccacgcggccaagcagccgctcccgaggccccgcagcctgcacccccaggcgggtcgggatctgaaccttataagctgcttcccggtgcggtcgctactattgtgagaccattgtccgccatcccccagcctaccataacaaagcaggaggttatttgaggactagtccctgttcccagagcccacttttttttctttttttgaaataaaatagcctgtctttcagatctaaaaaaaaaaaaaaaaaaaaaaaaaaaaaaaaaaaaaaaaaaaaaaaaaaaaaaaaaaaaaaaaaaaaaaaaaaaaaaaaaaaaaaaaaaaaaaaaaaaa

SEQ ID NO: 4419 - RNA, 1673 nt, synthetic construct
  misc_feature 1..1673: note = mRNA a-1 (A100) (opt3) from Homo sapiens__NP_000448.3__HNF4A(1-474)(S87A_S142A_S143A_S148A_T 166A_S167A_S313A_S378A_T429A_T432A_S436A_K458R)
  source 1..1673: mol_type = other RNA
aggagagtcccgcagtcggcgtccagcggctctgcttgttcgtgtgtgtgtcgttgcaggccttattcaagcttaccatgagactgagcaagaccctcgtggacatggatatggccgactactccgctgcacttgatcccgcctatacaactctggagttcgaaaacgtccaggttttgacgatgggcaatgacacctctccttcagaggggacaaacttaaatgcgccaaacagtctgggagtgagcgctctatgcgccatctgtggtgatagggcaactggcaaacactacggggcctcctcttgcgacggatgtaagggctttttccggcgcgctgtacgtaaaaatcatatgtattcgtgccgattttcaagacaatgtgtggtcgataaggacaaaaggaaccagtgccggtactgtcgcctcaagaagtgcttcagagcaggtatgaaaaaggaagccgtgcagaatgagagggatcggattagcacccgccgagctgcctatgaagacagtgcgctgccgtccataaacgcacttctgcaggccgaggttttgtctagacaaatcgctgcccccgtgagcgggattaatggagatatcagggctaaaaagattgcatccatcgccgacgtctgtgagtcaatgaaagaacagctcctggtgctggtagagtgggcgaagtacatacctgccttttgcgaactcccattagatgaccaggttgcactgcttcgggctcacgccggcgagcatttgctgctaggcgctacaaagcgtagtatggtgttcaaagacgtcctcctgcttgggaacgattatatcgtgccccgccactgtcctgagctggccgaaatgagcagagtgtctattaggatcttggacgagctcgtcctgccatttcaggaattacaaattgatgacaatgagtacgcatacctgaaggccatcatattctttgatcccgacgctaaaggactctccgatcctggtaagattaaacggcttcgagcgcaggttcaggtgtcactggaagactatatcaacgatcgccagtacgacagcagaggcaggttcggggagttgctactgctcctgccaacccttcaaagtattacttggcagatgatcgagcagatccaatttattaagctgttcggaatggcaaaaatagataatttgctccaggaaatgctgttaggcggtgccccgtctgacgctccccatgcccaccaccctctgcatccacacctaatgcaggagcatatggggacaaacgtaatcgtggcaaataccatgcccacgcacctctccaacggacagatgtgcgaatggcctcggccacgcggccaagccgctgcccccgaggcaccgcagcctgcgcccccaggcgggagcggatcggaaccttataagctgcttcccggtgctgtcgccactattgtgagaccattgtctgcaatcccccagcctaccataacaaagcaggaggttatttgaggactagtccctgttcccagagcccacttttttttctttttttgaaataaaatagcctgtctttcagatctaaaaaaaaaaaaaaaaaaaaaaaaaaaaaaaaaaaaaaaaaaaaaaaaaaaaaaaaaaaaaaaaaaaaaaaaaaaaaaaaaaaaaaaaaaaaaaaaaaaa

SEQ ID NO: 4420 - RNA, 1673 nt, synthetic construct
  misc_feature 1..1673: note = mRNA a-1 (A100) (opt3) from Homo sapiens__NP_000448.3__HNF4A(1-474)(S87A_K106R_K108R_K126R_K 127R_S142A_S143A_S148A_T166A_S167A_S313A_S378A_T429A_T432A_ S436A_K458R)
  source 1..1673: mol_type = other RNA
aggagagtcccgcagtcggcgtccagcggctctgcttgttcgtgtgtgtgtcgttgcaggccttattcaagcttaccatgagactgagcaagaccctcgtggacatggatatggccgactactccgctgcacttgatcccgcctatacaactctggagttcgaaaacgtccaggttttgacgatgggcaatgacacctctccttcagaggggacaaacttaaatgcgccaaacagtctgggagtgagcgctctatgcgccatctgtggtgatagggcaactggcaaacactacggggcctcctcttgcgacggatgtaagggctttttccggcgcgctgtacgtaaaaatcatatgtattcgtgccgattttcaagacaatgtgtggtcgatagggaccggcgcaaccagtgcagatactgtaggctcaagaaatgcttccgggcaggtatgcgccgagaagccgtgcagaatgagagagataggattagcacccggcgtgctgcctatgaagacagtgcgctgccgtccataaacgcacttctgcaggccgaggttttgtctcgccaaatcgctgcccccgtgagcgggattaatggagatatcagagcaaagaagattgcttccatcgccgacgtctgtgagtcaatgaaagaacagctcctggtgctggtagagtgggcgaagtacatacctgccttttgcgaactcccattagatgaccaggttgcactgcttagggctcacgccggcgagcatttgctgctaggcgctacaaaacggagtatggtgttcaaggacgtcctcctgcttgggaacgattatatcgtgccccgacactgtcctgagctggccgaaatgagccgcgtgtctattagaatcttggacgagctcgtcctgccatttcaggaattacaaattgatgacaatgagtacgcatacctgaaagccatcatattctttgatcccgacgctaagggactctccgatcctggtaagattaaaaggcttcgggcgcaggttcaggtgtcactggaagactatatcaacgatcgccagtacgacagcagaggcaggttcggggagttgctactgctcctgccaacccttcaaagtattacttggcagatgatcgagcagatccaatttattaagctgttcggaatggcaaaaatagataatttgctccaggaaatgctgttaggcggtgccccgtctgacgctccccatgcccaccaccctctgcatccacacctaatgcaggagcatatggggacaaacgtaatcgtggcaaataccatgcccacgcacctctccaacggacagatgtgcgaatggcctcgtccacggggccaagccgctgcccccgaggcaccgcagcctgcgcccccaggcgggagcggatcggaaccttataagctgcttcccggtgctgtcgccactattgtgcgaccattgtctgcaatcccccagcctaccataacaaaacaggaggttatttgaggactagtccctgttcccagagcccacttttttttctttttttgaaataaaatagcctgtctttcagatctaaaaaaaaaaaaaaaaaaaaaaaaaaaaaaaaaaaaaaaaaaaaaaaaaaaaaaaaaaaaaaaaaaaaaaaaaaaaaaaaaaaaaaaaaaaaaaaaaaaa

SEQ ID NO: 4421 - RNA, 1673 nt, synthetic construct
  misc_feature 1..1673: note = mRNA a-1 (A100) (opt3) from Homo sapiens__NP_000448.3__HNF4A(1-474)(S87A_K106R_K108R_K126R_K 127R)
  source 1..1673: mol_type = other RNA
aggagagtcccgcagtcggcgtccagcggctctgcttgttcgtgtgtgtgtcgttgcaggccttattcaagcttaccatgagactgagcaagaccctcgtggacatggatatggccgactactccgctgcacttgatcccgcctatacaactctggagttcgaaaacgtccaggttttgacgatgggcaatgacacctctccttcagaggggacaaacttaaatgcgccaaacagtctgggagtgagcgctctatgcgccatctgtggtgatagggcaactggcaaacactacggggcctcctcttgcgacggatgtaagggctttttccggcgcgctgtacgtaaaaatcatatgtattcgtgccgattttcaagacaatgtgtggtcgatagggaccggcgcaaccagtgcagatactgtaggctcaagaaatgcttccgggcaggtatgcgccgagaagccgtgcagaatgagagagataggattagcacccggcgtagttcctatgaagactctagcctgccgtccataaacgcccttctgcaggccgaggttttgtcacgccaaatcacaagtcccgtgagcgggattaatggagatatcagagcgaagaagattgcatctatcgccgacgtctgtgagtccatgaaagaacagctcctggtgctggtagagtgggctaagtacatacctgccttttgcgaactcccattagatgaccaggttgcactgcttagggctcacgccggcgagcatttgctgctaggcgcgaccaaacggtcaatggtgttcaaggacgtcctcctgcttgggaacgattatatcgtgccccgacactgtcctgagctggccgaaatgagccgcgtgagtattagaatcttggacgagctcgtcctgccatttcaggaattacaaattgatgacaatgagtacgcatacctgaaagctatcatattctttgatcccgacgccaagggactctctgatcctggtaagattaaaaggcttcggtcccaggttcaggtgagcctggaagactatatcaacgatcgccagtacgactcgagaggcaggttcggggagttgctactgctcctgccaactcttcaatctattacatggcagatgatcgagcagatccaatttattaagctgttcggaatggctaaaatagataatttgctccaggaaatgctgttaggcggttccccgtcagacgctccccatgcacaccaccctctgcatccacacctaatgcaggagcatatggggaccaacgtaatcgtggccaatacgatgcccactcacctcagtaacggacagatgtgcgaatggcctcgtccacggggccaagctgcgacccccgagacaccgcagcctagcccacccggcgggtccggatctgaaccttataagctgcttcccggtgcagtcgccactattgtgaaaccattgagcgctatcccccagcctaccataacaaagcaggaggttatttgaggactagtccctgttcccagagcccacttttttttctttttttgaaataaaatagcctgtctttcagatctaaaaaaaaaaaaaaaaaaaaaaaaaaaaaaaaaaaaaaaaaaaaaaaaaaaaaaaaaaaaaaaaaaaaaaaaaaaaaaaaaaaaaaaaaaaaaaaaaaaa

SEQ ID NO: 4422 - RNA, 1673 nt, synthetic construct
  misc_feature 1..1673: note = mRNA a-1 (A100) (opt3) from Homo sapiens__NP_000448.3__HNF4A(1-474)(S87A_K106R_K108R_K126R_K 127R_S142A_S143A_S148A_T166A_S167A_S313A_S378A_T429A_T432A_ S436A_K458R_S461A)
  source 1..1673: mol_type = other RNA
aggagagtcccgcagtcggcgtccagcggctctgcttgttcgtgtgtgtgtcgttgcaggccttattcaagcttaccatgagactgagcaagaccctcgtggacatggatatggccgactactccgctgcacttgatcccgcctatacaactctggagttcgaaaacgtccaggttttgacgatgggcaatgacacctctccttcagaggggacaaacttaaatgcgccaaacagtctgggagtgagcgctctatgcgccatctgtggtgatagggcaactggcaaacactacggggcctcctcttgcgacggatgtaagggctttttccggcgcgctgtacgtaaaaatcatatgtattcgtgccgattttcaagacaatgtgtggtcgatagggaccggcgcaaccagtgcagatactgtaggctcaagaaatgcttccgggcaggtatgcgccgagaagccgtgcagaatgagagagataggattagcacccggcgtgctgcctatgaagacagtgcgctgccgtccataaacgcacttctgcaggccgaggttttgtctcgccaaatcgctgcccccgtgagcgggattaatggagatatcagagcaaagaagattgcttccatcgccgacgtctgtgagtcaatgaaagaacagctcctggtgctggtagagtgggcgaagtacatacctgccttttgcgaactcccattagatgaccaggttgcactgcttagggctcacgccggcgagcatttgctgctaggcgctacaaaacggagtatggtgttcaaggacgtcctcctgcttgggaacgattatatcgtgccccgacactgtcctgagctggccgaaatgagccgcgtgtctattagaatcttggacgagctcgtcctgccatttcaggaattacaaattgatgacaatgagtacgcatacctgaaagccatcatattctttgatcccgacgctaagggactctccgatcctggtaagattaaaaggcttcgggcgcaggttcaggtgtcactggaagactatatcaacgatcgccagtacgacagcagaggcaggttcggggagttgctactgctcctgccaacccttcaaagtattacttggcagatgatcgagcagatccaatttattaagctgttcggaatggcaaaaatagataatttgctccaggaaatgctgttaggcggtgccccgtctgacgctccccatgcccaccaccctctgcatccacacctaatgcaggagcatatggggacaaacgtaatcgtggcaaataccatgcccacgcacctctccaacggacagatgtgcgaatggcctcgtccacggggccaagccgctgcccccgaggcaccgcagcctgcgcccccaggcgggagcggatcggaaccttataagctgcttcccggtgctgtcgccactattgtgcgaccattggcagccatcccccagcctaccataacaaaacaggaggttatttgaggactagtccctgttcccagagcccacttttttttctttttttgaaataaaatagcctgtctttcagatctaaaaaaaaaaaaaaaaaaaaaaaaaaaaaaaaaaaaaaaaaaaaaaaaaaaaaaaaaaaaaaaaaaaaaaaaaaaaaaaaaaaaaaaaaaaaaaaaaaaa

SEQ ID NO: 4423 - RNA, 1673 nt, synthetic construct
  misc_feature 1..1673: note = mRNA a-1 (A100) (opt3) from Homo sapiens__NP_000448.3__HNF4A(1-474)(S87A_K106R_K108R_K126R_K 127R_S142A_S143A_S148A_T166A_S167A_S313A_S378A_T429A_T432A_ S436A_K458R_S461E)
  source 1..1673: mol_type = other RNA
aggagagtcccgcagtcggcgtccagcggctctgcttgttcgtgtgtgtgtcgttgcaggccttattcaagcttaccatgagactgagcaagaccctcgtggacatggatatggccgactactccgctgcacttgatcccgcctatacaactctggagttcgaaaacgtccaggttttgacgatgggcaatgacacctctccttcagaggggacaaacttaaatgcgccaaacagtctgggagtgagcgctctatgcgccatctgtggtgatagggcaactggcaaacactacggggcctcctcttgcgacggatgtaagggctttttccggcgcgctgtacgtaaaaatcatatgtattcgtgccgattttcaagacaatgtgtggtcgatagggaccggcgcaaccagtgcagatactgtaggctcaagaaatgcttccgggcaggtatgcgccgagaagccgtgcagaatgagagagataggattagcacccggcgtgctgcctatgaagacagtgcgctgccgtccataaacgcacttctgcaggccgaggttttgtctcgccaaatcgctgcccccgtgagcgggattaatggagatatcagagcaaagaagattgcttccatcgccgacgtctgtgagtcaatgaaagaacagctcctggtgctggtagagtgggcgaagtacatacctgccttttgcgaactcccattagatgaccaggttgcactgcttagggctcacgccggcgagcatttgctgctaggcgctacaaaacggagtatggtgttcaaggacgtcctcctgcttgggaacgattatatcgtgccccgacactgtcctgagctggccgaaatgagccgcgtgtctattagaatcttggacgagctcgtcctgccatttcaggaattacaaattgatgacaatgagtacgcatacctgaaagccatcatattctttgatcccgacgctaagggactctccgatcctggtaagattaaaaggcttcgggcgcaggttcaggtgtcactggaagactatatcaacgatcgccagtacgacagcagaggcaggttcggggagttgctactgctcctgccaacccttcaaagtattacttggcagatgatcgagcagatccaatttattaagctgttcggaatggcaaaaatagataatttgctccaggaaatgctgttaggcggtgccccgtctgacgctccccatgcccaccaccctctgcatccacacctaatgcaggagcatatggggacaaacgtaatcgtggcaaataccatgcccacgcacctctccaacggacagatgtgcgaatggcctcgtccacggggccaagccgctgcccccgaggcaccgcagcctgcgcccccaggcgggagcggatcggaaccttataagctgcttcccggtgctgtcgccactattgtgcgaccattggaggcaatcccccagcctaccataacaaaacaggaggttatttgaggactagtccctgttcccagagcccacttttttttctttttttgaaataaaatagcctgtctttcagatctaaaaaaaaaaaaaaaaaaaaaaaaaaaaaaaaaaaaaaaaaaaaaaaaaaaaaaaaaaaaaaaaaaaaaaaaaaaaaaaaaaaaaaaaaaaaaaaaaaaa

SEQ ID NO: 4424 - RNA, 1673 nt, synthetic construct
  misc_feature 1..1673: note = mRNA a-1 (A100) (opt3) from Homo sapiens__NP_000448.3__HNF4A(1-474)(S87A_K106R_K108R_K126R_K 127R_S142A_S143A_S148E_T166A_S167E_S313A_S378E_T429E_T432E_ S436E_K458R_S461E)
  source 1..1673: mol_type = other RNA
aggagagtcccgcagtcggcgtccagcggctctgcttgttcgtgtgtgtgtcgttgcaggccttattcaagcttaccatgagactgagcaagaccctcgtggacatggatatggccgactactccgctgcacttgatcccgcctatacaactctggagttcgaaaacgtccaggttttgacgatgggcaatgacacctctccttcagaggggacaaacttaaatgcgccaaacagtctgggagtgagcgctctatgcgccatctgtggtgatagggcaactggcaaacactacggggcctcctcttgcgacggatgtaagggctttttccggcgcgctgtacgtaaaaatcatatgtattcgtgccgattttcaagacaatgtgtggtcgatagggaccggcgcaaccagtgcagatactgtaggctcaagaaatgcttccgggcaggtatgcgccgagaagccgtgcagaatgagagagataggattagcacccggcgtgctgcctatgaagacagtgagctgccgtccataaacgcgcttctgcaggcagaggttttgtctcgccaaatcgccgaacccgtgagcgggattaatggagatatcagagctaagaagattgcctccatcgcagacgtctgtgagtcaatgaaagaacagctcctggtgctggtagagtgggctaagtacatacctgccttttgcgagctcccattagatgaccaggttgcgctgcttagggcccacgcaggcgaacatttgctgctaggcgctacaaaacggagtatggtgttcaaggacgtcctcctgcttgggaacgattatatcgtgccccgacactgtcctgagctggccgaaatgagccgcgtgtctattagaatcttggacgagctcgtcctgccatttcaggaattacaaattgatgacaatgagtacgcttacctgaaagccatcatattctttgatcccgacgcaaagggactctccgatcctggtaagattaaaaggcttcgggcccaggttcaggtgtcactggaggactatatcaacgatcgccagtacgacagcagaggcaggttcggggaattgctactgctcctgccaacccttcaaagtattacttggcagatgatcgagcagatccaatttattaagctgttcggaatggctaaaatagataatttgctccaggaaatgctgttaggcggtgagccgtctgacgcgccccatgcacaccaccctctgcatccacacctaatgcaggaacatatggggacaaacgtaatcgtggccaataccatgcccacgcacctctccaacggacagatgtgcgagtggcctcgtccacggggccaagctgccgagcccgaggaaccgcagcctgaacccccaggcgggagcggatcggagccttataagctgcttcccggtgcagtcgccactattgtgcgaccattggaagctatcccccagcctaccataacaaaacaggaggttatttgaggactagtccctgttcccagagcccacttttttttctttttttgaaataaaatagcctgtctttcagatctaaaaaaaaaaaaaaaaaaaaaaaaaaaaaaaaaaaaaaaaaaaaaaaaaaaaaaaaaaaaaaaaaaaaaaaaaaaaaaaaaaaaaaaaaaaaaaaaaaaa

SEQ ID NO: 4425 - RNA, 1673 nt, synthetic construct
  misc_feature 1..1673: note = mRNA a-1 (A100) (opt3) from Homo sapiens__NP_000448.3__HNF4A(1-474)(S87A_K106R_K108R_K126R_K 127R_S142A_S143A_S148A_T166A_S167A_K179R_K180R_S313A_S378A_ T429A_T432A_S436A_K458R_S461E)
  source 1..1673: mol_type = other RNA
aggagagtcccgcagtcggcgtccagcggctctgcttgttcgtgtgtgtgtcgttgcaggccttattcaagcttaccatgagactgagcaagaccctcgtggacatggatatggccgactactccgctgcacttgatcccgcctatacaactctggagttcgaaaacgtccaggttttgacgatgggcaatgacacctctccttcagaggggacaaacttaaatgcgccaaacagtctgggagtgagcgctctatgcgccatctgtggtgatagggcaactggcaaacactacggggcctcctcttgcgacggatgtaagggctttttccggcgcgctgtacgtaaaaatcatatgtattcgtgccgattttcaagacaatgtgtggtcgatagggaccggcgcaaccagtgcagatactgtaggctcaagaaatgcttccgggcaggtatgcgccgagaagccgtgcagaatgagagagataggattagcacccggcgtgctgcctatgaagacagtgcgctgccgtccataaacgcacttctgcaggccgaggttttgtctcgccaaatcgctgcccccgtgagcgggattaatggagatatcagagcaaggcggattgcttccatcgccgacgtctgtgagtcaatgaaggaacagctcctggtgctggtagagtgggcgaagtacatacctgccttttgcgaactcccattagatgaccaggttgcactgcttcgagctcacgccggcgagcatttgctgctaggcgctacaaaacgcagtatggtgttcaaggacgtcctcctgcttgggaacgattatatcgtgcccagacactgtcctgagctggccgaaatgagcagggtgtctattcggatcttggacgagctcgtcctgccatttcaggaattacaaattgatgacaatgagtacgcatacctgaaagccatcatattctttgatcccgacgctaagggactctccgatcctggtaaaattaagcgccttagagcgcaggttcaggtgtcactggaagactatatcaacgataggcagtacgacagccgtggccggttcggggagttgctactgctcctgccaacccttcaaagtattacttggcagatgatcgagcagatccaatttattaagctgttcggaatggcaaaaatagataatttgctccaggaaatgctgttaggcggtgccccgtctgacgctccccatgcccaccaccctctgcatccacacctaatgcaggagcatatggggacaaacgtaatcgtggcaaataccatgcccacgcacctctccaacggacagatgtgcgaatggcctcgaccaagaggccaagccgctgcccccgaggcaccgcagcctgcgcccccaggcgggagcggatcggaaccttataagctgcttcccggtgctgtcgccactattgtgaggccattggaggcaatcccccagcctaccataacaaaacaggaggttatttgaggactagtccctgttcccagagcccacttttttttctttttttgaaataaaatagcctgtctttcagatctaaaaaaaaaaaaaaaaaaaaaaaaaaaaaaaaaaaaaaaaaaaaaaaaaaaaaaaaaaaaaaaaaaaaaaaaaaaaaaaaaaaaaaaaaaaaaaaaaaaa

SEQ ID NO: 4426 - RNA, 1673 nt, synthetic construct
  misc_feature 1..1673: note = mRNA a-1 (A100) (opt3) from Homo sapiens__NP_000448.3__HNF4A(1-474)(S87A_K106R_K108R_K126R_K 127R_S142A_S143A_S148A_T166A_S167A_K300R_K307R_K309R_S313A_ S378A_T429A_T432A_S436A_K458R_S461E)
  source 1..1673: mol_type = other RNA
aggagagtcccgcagtcggcgtccagcggctctgcttgttcgtgtgtgtgtcgttgcaggccttattcaagcttaccatgagactgagcaagaccctcgtggacatggatatggccgactactccgctgcacttgatcccgcctatacaactctggagttcgaaaacgtccaggttttgacgatgggcaatgacacctctccttcagaggggacaaacttaaatgcgccaaacagtctgggagtgagcgctctatgcgccatctgtggtgatagggcaactggcaaacactacggggcctcctcttgcgacggatgtaagggctttttccggcgcgctgtacgtaaaaatcatatgtattcgtgccgattttcaagacaatgtgtggtcgatagggaccggcgcaaccagtgcagatactgtaggctcaagaaatgcttccgggcaggtatgcgccgagaagccgtgcagaatgagagagataggattagcacccggcgtgctgcctatgaagacagtgcgctgccgtccataaacgcacttctgcaggccgaggttttgtctcgccaaatcgctgcccccgtgagcgggattaatggagatatcagagcaaagaagattgcttccatcgccgacgtctgtgagtcaatgaaagaacagctcctggtgctggtagagtgggcgaagtacatacctgccttttgcgaactcccattagatgaccaggttgcactgcttagggctcacgccggcgagcatttgctgctaggcgctacaaaacggagtatggtgttcaaggacgtcctcctgcttgggaacgattatatcgtgccccgacactgtcctgagctggccgaaatgagccgcgtgtctattagaatcttggacgagctcgtcctgccatttcaggaattacaaattgatgacaatgagtacgcatacctgaaagccatcatattctttgatcccgacgctaggggactctccgatcctggtcggattcgcagacttagggcgcaggttcaggtgtcactggaagactatatcaacgatcgtcagtacgacagccggggccgattcggggagttgctactgctcctgccaacccttcaaagtattacttggcagatgatcgagcagatccaatttattaagctgttcggaatggcaaagatagataatttgctccaggaaatgctgttaggcggtgccccgtctgacgctccccatgcccaccaccctctgcatccacacctaatgcaggagcatatggggacaaacgtaatcgtggcaaataccatgcccacgcacctctccaacggacagatgtgcgaatggcctagaccaaggggccaagccgctgcccccgaggcaccgcagcctgcgcccccaggcgggagcggatcggaaccttataaactgcttcccggtgctgtcgccactattgtgcgcccattggaggcaatcccccagcctaccataacaaagcaggaggttatttgaggactagtccctgttcccagagcccacttttttttctttttttgaaataaaatagcctgtctttcagatctaaaaaaaaaaaaaaaaaaaaaaaaaaaaaaaaaaaaaaaaaaaaaaaaaaaaaaaaaaaaaaaaaaaaaaaaaaaaaaaaaaaaaaaaaaaaaaaaaaaa

SEQ ID NO: 4427 - RNA, 1673 nt, synthetic construct
  misc_feature 1..1673: note = mRNA a-1 (A100) (opt3) from Homo sapiens__NP_000448.3__HNF4A(1-474)(S87A_K106R_K108R_K126R_K 127R_S142A_S143A_S148A_T166A_S167A_S313A_S378A_T429A_T432A_ S436A_K447R_K458R_S461E_K470R)
  source 1..1673: mol_type = other RNA
aggagagtcccgcagtcggcgtccagcggctctgcttgttcgtgtgtgtgtcgttgcaggccttattcaagcttaccatgagactgagcaagaccctcgtggacatggatatggccgactactccgctgcacttgatcccgcctatacaactctggagttcgaaaacgtccaggttttgacgatgggcaatgacacctctccttcagaggggacaaacttaaatgcgccaaacagtctgggagtgagcgctctatgcgccatctgtggtgatagggcaactggcaaacactacggggcctcctcttgcgacggatgtaagggctttttccggcgcgctgtacgtaaaaatcatatgtattcgtgccgattttcaagacaatgtgtggtcgatagggaccggcgcaaccagtgcagatactgtaggctcaagaaatgcttccgggcaggtatgcgccgagaagccgtgcagaatgagagagataggattagcacccggcgtgctgcctatgaagacagtgcgctgccgtccataaacgcacttctgcaggccgaggttttgtctcgccaaatcgctgcccccgtgagcgggattaatggagatatcagagcaaagaagattgcttccatcgccgacgtctgtgagtcaatgaaagaacagctcctggtgctggtagagtgggcgaagtacatacctgccttttgcgaactcccattagatgaccaggttgcactgcttagggctcacgccggcgagcatttgctgctaggcgctacaaaacggagtatggtgttcaaggacgtcctcctgcttgggaacgattatatcgtgccccgacactgtcctgagctggccgaaatgagccgcgtgtctattagaatcttggacgagctcgtcctgccatttcaggaattacaaattgatgacaatgagtacgcatacctgaaagccatcatattctttgatcccgacgctaagggactctccgatcctggtaagattaaaaggcttcgggcgcaggttcaggtgtcactggaagactatatcaacgatcgccagtacgacagcagaggcaggttcggggagttgctactgctcctgccaacccttcaaagtattacttggcagatgatcgagcagatccaatttattaagctgttcggaatggcaaaaatagataatttgctccaggaaatgctgttaggcggtgccccgtctgacgctccccatgcccaccaccctctgcatccacacctaatgcaggagcatatggggacaaacgtaatcgtggcaaataccatgcccacgcacctctccaacggacagatgtgcgaatggcctcgtccacggggccaagccgctgcccccgaggcaccgcagcctgcgcccccaggcgggagcggatcggaaccttatcgactgcttcccggtgctgtcgccactattgtgagaccattggaggcaatcccccagcctaccataacaaggcaggaggttatttgaggactagtccctgttcccagagcccacttttttttctttttttgaaataaaatagcctgtctttcagatctaaaaaaaaaaaaaaaaaaaaaaaaaaaaaaaaaaaaaaaaaaaaaaaaaaaaaaaaaaaaaaaaaaaaaaaaaaaaaaaaaaaaaaaaaaaaaaaaaaaa

SEQ ID NO: 4428 - RNA, 1673 nt, synthetic construct
  misc_feature 1..1673: note = mRNA a-1 (A100) (opt3) from Homo sapiens__NP_000448.3__HNF4A(1-474)(S87A_K106R_K108R_K126R_K 127R_S142A_S143A_S148A_T166A_S167A_K179R_K180R_K234R_K300R_ K307R_K309R_S313A_S378A_T429A_T432A_S436A_K447R_K458R_S461E _K470R)
  source 1..1673: mol_type = other RNA
aggagagtcccgcagtcggcgtccagcggctctgcttgttcgtgtgtgtgtcgttgcaggccttattcaagcttaccatgagactgagcaagaccctcgtggacatggatatggccgactactccgctgcacttgatcccgcctatacaactctggagttcgaaaacgtccaggttttgacgatgggcaatgacacctctccttcagaggggacaaacttaaatgcgccaaacagtctgggagtgagcgctctatgcgccatctgtggtgatagggcaactggcaaacactacggggcctcctcttgcgacggatgtaagggctttttccggcgcgctgtacgtaaaaatcatatgtattcgtgccgattttcaagacaatgtgtggtcgatagggaccggcgcaaccagtgcagatactgtaggctcaagaaatgcttccgggcaggtatgcgccgagaagccgtgcagaatgagagagataggattagcacccggcgtgctgcctatgaagacagtgcgctgccgtccataaacgcacttctgcaggccgaggttttgtctcgccaaatcgctgcccccgtgagcgggattaatggagatatcagagcaaggcggattgcttccatcgccgacgtctgtgagtcaatgaaggaacagctcctggtgctggtagagtgggcgaagtacatacctgccttttgcgaactcccattagatgaccaggttgcactgcttcgagctcacgccggcgagcatttgctgctaggcgctacacgcagaagtatggtgttcaaagacgtcctcctgcttgggaacgattatatcgtgcccaggcactgtcctgagctggccgaaatgagccgggtgtctattcgcatcttggacgagctcgtcctgccatttcaggaattacaaattgatgacaatgagtacgcatacctgaaggccatcatattctttgatcccgacgctagaggactctccgatcctggtaggattcgtcggcttcgagcgcaggttcaggtgtcactggaagactatatcaacgatagacagtacgacagcaggggccgcttcggggagttgctactgctcctgccaacccttcaaagtattacttggcagatgatcgagcagatccaatttattaaactgttcggaatggcaaagatagataatttgctccaggaaatgctgttaggcggtgccccgtctgacgctccccatgcccaccaccctctgcatccacacctaatgcaggagcatatggggacaaacgtaatcgtggcaaataccatgcccacgcacctctccaacggacagatgtgcgaatggcctcggccaagaggccaagccgctgcccccgaggcaccgcagcctgcgcccccaggcgggagcggatcggaaccttataggctgcttcccggtgctgtcgccactattgtgcgcccattggaggcaatcccccagcctaccataacacgacaggaggttatttgaggactagtccctgttcccagagcccacttttttttctttttttgaaataaaatagcctgtctttcagatctaaaaaaaaaaaaaaaaaaaaaaaaaaaaaaaaaaaaaaaaaaaaaaaaaaaaaaaaaaaaaaaaaaaaaaaaaaaaaaaaaaaaaaaaaaaaaaaaaaaa

SEQ ID NO: 4429 - RNA, 1673 nt, synthetic construct
  misc_feature 1..1673: note = mRNA a-1 (A100) (opt3) from Homo sapiens__NP_000448.3__HNF4A(1-474)(S87A_S95A_S99A_K106R_K10 8R_K126R_K127R_S142A_S143A_S148A_T166A_S167A_S313A_S378A_T4 29A_T432A_S436A_K458R_S461E)
  source 1..1673: mol_type = other RNA
aggagagtcccgcagtcggcgtccagcggctctgcttgttcgtgtgtgtgtcgttgcaggccttattcaagcttaccatgagactgagcaagaccctcgtggacatggatatggccgactactccgctgcacttgatcccgcctatacaactctggagttcgaaaacgtccaggttttgacgatgggcaatgacacctctccttcagaggggacaaacttaaatgcgccaaacagtctgggagtgagcgctctatgcgccatctgtggtgatagggcaactggcaaacactacggggcctcctcttgcgacggatgtaagggctttttccggcgcgctgtacgtaaaaatcatatgtatgcatgccgatttgccagacaatgtgtggtcgatagggaccggcgcaaccagtgcagatactgtaggctcaagaaatgcttccgggctggtatgcgccgagaagccgtgcagaatgagagagataggatttcgacccggcgtgcggcatatgaagactcagccctgccgagcataaacgcccttctgcaggccgaggttttgagtcgccaaatcgcagctcccgtgtccgggattaatggagatatcagagccaagaagattgcgtctatcgccgacgtctgtgagagcatgaaagaacagctcctggtgctggtagagtgggcaaagtacatacctgctttttgcgaactcccattagatgaccaggttgccctgcttagggctcacgccggcgagcatttgctgctaggcgcaacaaaacggtccatggtgttcaaggacgtcctcctgcttgggaacgattatatcgtgccccgacactgtcctgagctggccgaaatgtcacgcgtgagtattagaatcttggacgagctcgtcctgccatttcaggaattacaaattgatgacaatgagtacgcttacctgaaagcgatcatattctttgatcccgacgcaaagggactcagcgatcctggtaagattaaaaggcttcgggcccaggttcaggtgtctctggaagactatatcaacgatcgccagtacgactccagaggcaggttcggggagttgctactgctcctgccaacccttcaatcaattacttggcagatgatcgagcagatccaatttattaagctgttcggaatggctaaaatagataatttgctccaggaaatgctgttaggcggtgccccgagcgacgcaccccatgcccaccaccctctgcatccacacctaatgcaggagcatatggggacaaacgtaatcgtggctaataccatgcccacgcacctcagtaacggacagatgtgcgaatggcctcgtccacggggccaagccgcagcgcccgaggctccgcagcctgctcccccaggcgggtctggatccgaaccttataagctgcttcccggtgcagtcgccactattgtgcgaccattggaggctatcccccagcctaccataacaaaacaggaggttatttgaggactagtccctgttcccagagcccacttttttttctttttttgaaataaaatagcctgtctttcagatctaaaaaaaaaaaaaaaaaaaaaaaaaaaaaaaaaaaaaaaaaaaaaaaaaaaaaaaaaaaaaaaaaaaaaaaaaaaaaaaaaaaaaaaaaaaaaaaaaaaa

SEQ ID NO: 4430 - RNA, 1673 nt, synthetic construct
  misc_feature 1..1673: note = mRNA a-1 (A100) (opt3) from Homo sapiens__NP_000448.3__HNF4A(1-474)(S87A_K106R_K108R_K126R_K 127R_S138A_T139A_S142A_S143A_S148A_T166A_S167A_S313A_S378A_ T429A_T432A_S436A_K458R_S461E)
  source 1..1673: mol_type = other RNA
aggagagtcccgcagtcggcgtccagcggctctgcttgttcgtgtgtgtgtcgttgcaggccttattcaagcttaccatgagactgagcaagaccctcgtggacatggatatggccgactactccgctgcacttgatcccgcctatacaactctggagttcgaaaacgtccaggttttgacgatgggcaatgacacctctccttcagaggggacaaacttaaatgcgccaaacagtctgggagtgagcgctctatgcgccatctgtggtgatagggcaactggcaaacactacggggcctcctcttgcgacggatgtaagggctttttccggcgcgctgtacgtaaaaatcatatgtattcgtgccgattttcaagacaatgtgtggtcgatagggaccggcgcaaccagtgcagatactgtaggctcaagaaatgcttccgggcaggtatgcgccgagaagccgtgcagaatgagagagataggattgctgcccggcgtgcggcatatgaagacagcgccctgccgagtataaacgcccttctgcaggccgaggttttgtcccgccaaatcgcagctcccgtgtctgggattaatggagatatcagagccaagaagattgcgagcatcgccgacgtctgtgagtccatgaaagaacagctcctggtgctggtagagtgggcaaagtacatacctgctttttgcgaactcccattagatgaccaggttgccctgcttagggctcacgccggcgagcatttgctgctaggcgcaaccaaacggtcaatggtgttcaaggacgtcctcctgcttgggaacgattatatcgtgccccgacactgtcctgagctggccgaaatgagtcgcgtgagcattagaatcttggacgagctcgtcctgccatttcaggaattacaaattgatgacaatgagtacgcttacctgaaagcgatcatattctttgatcccgacgcaaagggactctctgatcctggtaagattaaaaggcttcgggcccaggttcaggtgtccctggaagactatatcaacgatcgccagtacgactcaagaggcaggttcggggagttgctactgctcctgccaacacttcaaagcattacctggcagatgatcgagcagatccaatttattaagctgttcggaatggctaaaatagataatttgctccaggaaatgctgttaggcggtgccccgagtgacgcaccccatgcccaccaccctctgcatccacacctaatgcaggagcatatggggactaacgtaatcgtggctaatacaatgcccacccacctctctaacggacagatgtgcgaatggcctcgtccacggggccaagccgcagcgcccgaggctccgcagcctgctcccccaggcgggtccggaagcgaaccttataagctgcttcccggtgcagtcgccacgattgtgcgaccattggaggctatcccccagcctactataaccaaacaggaggttatttgaggactagtccctgttcccagagcccacttttttttctttttttgaaataaaatagcctgtctttcagatctaaaaaaaaaaaaaaaaaaaaaaaaaaaaaaaaaaaaaaaaaaaaaaaaaaaaaaaaaaaaaaaaaaaaaaaaaaaaaaaaaaaaaaaaaaaaaaaaaaaa

SEQ ID NO: 4431 - RNA, 1673 nt, synthetic construct
  misc_feature 1..1673: note = mRNA a-1 (A100) (opt3) from Homo sapiens__NP_000448.3__HNF4A(1-474)(S87A_S95A_S99A_K106R_K10 8R_K126R_K127R_S138A_T139A_S142A_S143A_S148A_T166A_S167A_S3 13A_S378A_T429A_T432A_S436A_K458R_S461E)
  source 1..1673: mol_type = other RNA
aggagagtcccgcagtcggcgtccagcggctctgcttgttcgtgtgtgtgtcgttgcaggccttattcaagcttaccatgagactgagcaagaccctcgtggacatggatatggccgactactccgctgcacttgatcccgcctatacaactctggagttcgaaaacgtccaggttttgacgatgggcaatgacacctctccttcagaggggacaaacttaaatgcgccaaacagtctgggagtgagcgctctatgcgccatctgtggtgatagggcaactggcaaacactacggggcctcctcttgcgacggatgtaagggctttttccggcgcgctgtacgtaaaaatcatatgtatgcatgccgatttgccagacaatgtgtggtcgatagggaccggcgcaaccagtgcagatactgtaggctcaagaaatgcttccgggctggtatgcgccgagaagccgtgcagaatgagagagataggattgcggcacggcgtgccgcttatgaagactcggccctgccgtcaataaacgcacttctgcaggctgaggttttgagccgccaaatcgccgcgcccgtgagtgggattaatggagatatcagagccaagaagattgcatccatcgctgacgtctgtgagtctatgaaagaacagctcctggtgctggtagagtgggccaagtacatacctgctttttgcgaactcccattagatgaccaggttgccctgcttagggcacacgccggcgagcatttgctgctaggcgctaccaaacggagcatggtgttcaaggacgtcctcctgcttgggaacgattatatcgtgccccgacactgtcctgagctggcggaaatgtcccgcgtgtcaattagaatcttggacgagctcgtcctgccatttcaggaattacaaattgatgacaatgagtacgcatacctgaaagccatcatattctttgatcccgacgctaagggactcagtgatcctggtaagattaaaaggcttcgggcccaggttcaggtgagcctggaagactatatcaacgatcgccagtacgactctagaggcaggttcggggagttgctactgctcctgccaacacttcaatccattacctggcagatgatcgagcagatccaatttattaagctgttcggaatggcaaaaatagataatttgctccaggaaatgctgttaggcggtgccccgtcagacgctccccatgcccaccaccctctgcatccacacctaatgcaggagcatatggggactaacgtaatcgtggcaaatacaatgcccacccacctcagcaacggacagatgtgcgaatggcctcgtccacggggccaagcggctgcccccgaggcaccgcagcctgctcccccaggcgggagtggatctgaaccttataagctgcttcccggtgccgtcgccacgattgtgcgaccattggaggcaatcccccagcctactataaccaaacaggaggttatttgaggactagtccctgttcccagagcccacttttttttctttttttgaaataaaatagcctgtctttcagatctaaaaaaaaaaaaaaaaaaaaaaaaaaaaaaaaaaaaaaaaaaaaaaaaaaaaaaaaaaaaaaaaaaaaaaaaaaaaaaaaaaaaaaaaaaaaaaaaaaaa

SEQ ID NO: 4432 - RNA, 1673 nt, synthetic construct
  misc_feature 1..1673: note = mRNA a-1 (A100) (opt4) from Homo sapiens__NP_000448.3__HNF4A(1-474)
  source 1..1673: mol_type = other RNA
aggagagtcccgcagtcggcgtccagcggctctgcttgttcgtgtgtgtgtcgttgcaggccttattcaagcttaccatgagactgagcaagaccctggtggacatggacatggccgactacagcgccgccctggaccccgcctacaccaccctggagttcgagaacgtgcaggtgctgaccatgggcaacgacaccagccccagcgagggcaccaacctgaacgcccccaacagcctgggcgtgagcgccctgtgcgccatctgcggcgacagagccaccggcaagcactacggcgccagcagctgcgacggctgcaagggcttcttcagaagaagcgtgagaaagaaccacatgtacagctgcagattcagcagacagtgcgtggtggacaaggacaagagaaaccagtgcagatactgcagactgaagaagtgcttcagagccggcatgaagaaggaggccgtgcagaacgagagagacagaatcagcaccagaagaagcagctacgaggacagcagcctgcccagcatcaacgccctgctgcaggccgaggtgctgagcagacagatcaccagccccgtgagcggcatcaacggcgacatcagagccaagaagatcgccagcatcgccgacgtgtgcgagagcatgaaggagcagctgctggtgctggtggagtgggccaagtacatccccgccttctgcgagctgcccctggacgaccaggtggccctgctgagagcccacgccggcgagcacctgctgctgggcgccaccaagagaagcatggtgttcaaggacgtgctgctgctgggcaacgactacatcgtgcccagacactgccccgagctggccgagatgagcagagtgagcatcagaatcctggacgagctggtgctgcccttccaggagctgcagatcgacgacaacgagtacgcctacctgaaggccatcatcttcttcgaccccgacgccaagggcctgagcgaccccggcaagatcaagagactgagaagccaggtgcaggtgagcctggaggactacatcaacgacagacagtacgacagcagaggcagattcggcgagctgctgctgctgctgcccaccctgcagagcatcacctggcagatgatcgagcagatccagttcatcaagctgttcggcatggccaagatcgacaacctgctgcaggagatgctgctgggcggcagccccagcgacgccccccacgcccaccaccccctgcacccccacctgatgcaggagcacatgggcaccaacgtgatcgtggccaacaccatgcccacccacctgagcaacggccagatgtgcgagtggcccagacccagaggccaggccgccacccccgagaccccccagcccagcccccccggcggcagcggcagcgagccctacaagctgctgcccggcgccgtggccaccatcgtgaagcccctgagcgccatcccccagcccaccatcaccaagcaggaggtgatctgaggactagtccctgttcccagagcccacttttttttctttttttgaaataaaatagcctgtctttcagatctaaaaaaaaaaaaaaaaaaaaaaaaaaaaaaaaaaaaaaaaaaaaaaaaaaaaaaaaaaaaaaaaaaaaaaaaaaaaaaaaaaaaaaaaaaaaaaaaaaaa

SEQ ID NO: 4433 - RNA, 1673 nt, synthetic construct
  misc_feature 1..1673: note = mRNA a-1 (A100) (opt4) from Homo sapiens__NP_000448.3__HNF4A(1-474)(S313A)
  source 1..1673: mol_type = other RNA
aggagagtcccgcagtcggcgtccagcggctctgcttgttcgtgtgtgtgtcgttgcaggccttattcaagcttaccatgagactgagcaagaccctggtggacatggacatggccgactacagcgccgccctggaccccgcctacaccaccctggagttcgagaacgtgcaggtgctgaccatgggcaacgacaccagccccagcgagggcaccaacctgaacgcccccaacagcctgggcgtgagcgccctgtgcgccatctgcggcgacagagccaccggcaagcactacggcgccagcagctgcgacggctgcaagggcttcttcagaagaagcgtgagaaagaaccacatgtacagctgcagattcagcagacagtgcgtggtggacaaggacaagagaaaccagtgcagatactgcagactgaagaagtgcttcagagccggcatgaagaaggaggccgtgcagaacgagagagacagaatcagcaccagaagaagcagctacgaggacagcagcctgcccagcatcaacgccctgctgcaggccgaggtgctgagcagacagatcaccagccccgtgagcggcatcaacggcgacatcagagccaagaagatcgccagcatcgccgacgtgtgcgagagcatgaaggagcagctgctggtgctggtggagtgggccaagtacatccccgccttctgcgagctgcccctggacgaccaggtggccctgctgagagcccacgccggcgagcacctgctgctgggcgccaccaagagaagcatggtgttcaaggacgtgctgctgctgggcaacgactacatcgtgcccagacactgccccgagctggccgagatgagcagagtgagcatcagaatcctggacgagctggtgctgcccttccaggagctgcagatcgacgacaacgagtacgcctacctgaaggccatcatcttcttcgaccccgacgccaagggcctgagcgaccccggcaagatcaagagactgagagcccaggtgcaggtgagcctggaggactacatcaacgacagacagtacgacagcagaggcagattcggcgagctgctgctgctgctgcccaccctgcagagcatcacctggcagatgatcgagcagatccagttcatcaagctgttcggcatggccaagatcgacaacctgctgcaggagatgctgctgggcggcagccccagcgacgccccccacgcccaccaccccctgcacccccacctgatgcaggagcacatgggcaccaacgtgatcgtggccaacaccatgcccacccacctgagcaacggccagatgtgcgagtggcccagacccagaggccaggccgccacccccgagaccccccagcccagcccccccggcggcagcggcagcgagccctacaagctgctgcccggcgccgtggccaccatcgtgaagcccctgagcgccatcccccagcccaccatcaccaagcaggaggtgatctgaggactagtccctgttcccagagcccacttttttttctttttttgaaataaaatagcctgtctttcagatctaaaaaaaaaaaaaaaaaaaaaaaaaaaaaaaaaaaaaaaaaaaaaaaaaaaaaaaaaaaaaaaaaaaaaaaaaaaaaaaaaaaaaaaaaaaaaaaaaaaa

SEQ ID NO: 4434 - RNA, 1673 nt, synthetic construct
  misc_feature 1..1673: note = mRNA a-1 (A100) (opt4) from Homo sapiens__NP_000448.3__HNF4A(1-474)(S313E)
  source 1..1673: mol_type = other RNA
aggagagtcccgcagtcggcgtccagcggctctgcttgttcgtgtgtgtgtcgttgcaggccttattcaagcttaccatgagactgagcaagaccctggtggacatggacatggccgactacagcgccgccctggaccccgcctacaccaccctggagttcgagaacgtgcaggtgctgaccatgggcaacgacaccagccccagcgagggcaccaacctgaacgcccccaacagcctgggcgtgagcgccctgtgcgccatctgcggcgacagagccaccggcaagcactacggcgccagcagctgcgacggctgcaagggcttcttcagaagaagcgtgagaaagaaccacatgtacagctgcagattcagcagacagtgcgtggtggacaaggacaagagaaaccagtgcagatactgcagactgaagaagtgcttcagagccggcatgaagaaggaggccgtgcagaacgagagagacagaatcagcaccagaagaagcagctacgaggacagcagcctgcccagcatcaacgccctgctgcaggccgaggtgctgagcagacagatcaccagccccgtgagcggcatcaacggcgacatcagagccaagaagatcgccagcatcgccgacgtgtgcgagagcatgaaggagcagctgctggtgctggtggagtgggccaagtacatccccgccttctgcgagctgcccctggacgaccaggtggccctgctgagagcccacgccggcgagcacctgctgctgggcgccaccaagagaagcatggtgttcaaggacgtgctgctgctgggcaacgactacatcgtgcccagacactgccccgagctggccgagatgagcagagtgagcatcagaatcctggacgagctggtgctgcccttccaggagctgcagatcgacgacaacgagtacgcctacctgaaggccatcatcttcttcgaccccgacgccaagggcctgagcgaccccggcaagatcaagagactgagagagcaggtgcaggtgagcctggaggactacatcaacgacagacagtacgacagcagaggcagattcggcgagctgctgctgctgctgcccaccctgcagagcatcacctggcagatgatcgagcagatccagttcatcaagctgttcggcatggccaagatcgacaacctgctgcaggagatgctgctgggcggcagccccagcgacgccccccacgcccaccaccccctgcacccccacctgatgcaggagcacatgggcaccaacgtgatcgtggccaacaccatgcccacccacctgagcaacggccagatgtgcgagtggcccagacccagaggccaggccgccacccccgagaccccccagcccagcccccccggcggcagcggcagcgagccctacaagctgctgcccggcgccgtggccaccatcgtgaagcccctgagcgccatcccccagcccaccatcaccaagcaggaggtgatctgaggactagtccctgttcccagagcccacttttttttctttttttgaaataaaatagcctgtctttcagatctaaaaaaaaaaaaaaaaaaaaaaaaaaaaaaaaaaaaaaaaaaaaaaaaaaaaaaaaaaaaaaaaaaaaaaaaaaaaaaaaaaaaaaaaaaaaaaaaaaaa

SEQ ID NO: 4435 - RNA, 1673 nt, synthetic construct
  misc_feature 1..1673: note = mRNA a-1 (A100) (opt4) from Homo sapiens__NP_000448.3__HNF4A(1-474)(S142A_S143A)
  source 1..1673: mol_type = other RNA
aggagagtcccgcagtcggcgtccagcggctctgcttgttcgtgtgtgtgtcgttgcaggccttattcaagcttaccatgagactgagcaagaccctggtggacatggacatggccgactacagcgccgccctggaccccgcctacaccaccctggagttcgagaacgtgcaggtgctgaccatgggcaacgacaccagccccagcgagggcaccaacctgaacgcccccaacagcctgggcgtgagcgccctgtgcgccatctgcggcgacagagccaccggcaagcactacggcgccagcagctgcgacggctgcaagggcttcttcagaagaagcgtgagaaagaaccacatgtacagctgcagattcagcagacagtgcgtggtggacaaggacaagagaaaccagtgcagatactgcagactgaagaagtgcttcagagccggcatgaagaaggaggccgtgcagaacgagagagacagaatcagcaccagaagagccgcctacgaggacagcagcctgcccagcatcaacgccctgctgcaggccgaggtgctgagcagacagatcaccagccccgtgagcggcatcaacggcgacatcagagccaagaagatcgccagcatcgccgacgtgtgcgagagcatgaaggagcagctgctggtgctggtggagtgggccaagtacatccccgccttctgcgagctgcccctggacgaccaggtggccctgctgagagcccacgccggcgagcacctgctgctgggcgccaccaagagaagcatggtgttcaaggacgtgctgctgctgggcaacgactacatcgtgcccagacactgccccgagctggccgagatgagcagagtgagcatcagaatcctggacgagctggtgctgcccttccaggagctgcagatcgacgacaacgagtacgcctacctgaaggccatcatcttcttcgaccccgacgccaagggcctgagcgaccccggcaagatcaagagactgagaagccaggtgcaggtgagcctggaggactacatcaacgacagacagtacgacagcagaggcagattcggcgagctgctgctgctgctgcccaccctgcagagcatcacctggcagatgatcgagcagatccagttcatcaagctgttcggcatggccaagatcgacaacctgctgcaggagatgctgctgggcggcagccccagcgacgccccccacgcccaccaccccctgcacccccacctgatgcaggagcacatgggcaccaacgtgatcgtggccaacaccatgcccacccacctgagcaacggccagatgtgcgagtggcccagacccagaggccaggccgccacccccgagaccccccagcccagcccccccggcggcagcggcagcgagccctacaagctgctgcccggcgccgtggccaccatcgtgaagcccctgagcgccatcccccagcccaccatcaccaagcaggaggtgatctgaggactagtccctgttcccagagcccacttttttttctttttttgaaataaaatagcctgtctttcagatctaaaaaaaaaaaaaaaaaaaaaaaaaaaaaaaaaaaaaaaaaaaaaaaaaaaaaaaaaaaaaaaaaaaaaaaaaaaaaaaaaaaaaaaaaaaaaaaaaaaa

SEQ ID NO: 4436 - RNA, 1673 nt, synthetic construct
  misc_feature 1..1673: note = mRNA a-1 (A100) (opt4) from Homo sapiens__NP_000448.3__HNF4A(1-474)(S142E_S143E)
  source 1..1673: mol_type = other RNA
aggagagtcccgcagtcggcgtccagcggctctgcttgttcgtgtgtgtgtcgttgcaggccttattcaagcttaccatgagactgagcaagaccctggtggacatggacatggccgactacagcgccgccctggaccccgcctacaccaccctggagttcgagaacgtgcaggtgctgaccatgggcaacgacaccagccccagcgagggcaccaacctgaacgcccccaacagcctgggcgtgagcgccctgtgcgccatctgcggcgacagagccaccggcaagcactacggcgccagcagctgcgacggctgcaagggcttcttcagaagaagcgtgagaaagaaccacatgtacagctgcagattcagcagacagtgcgtggtggacaaggacaagagaaaccagtgcagatactgcagactgaagaagtgcttcagagccggcatgaagaaggaggccgtgcagaacgagagagacagaatcagcaccagaagagaggagtacgaggacagcagcctgcccagcatcaacgccctgctgcaggccgaggtgctgagcagacagatcaccagccccgtgagcggcatcaacggcgacatcagagccaagaagatcgccagcatcgccgacgtgtgcgagagcatgaaggagcagctgctggtgctggtggagtgggccaagtacatccccgccttctgcgagctgcccctggacgaccaggtggccctgctgagagcccacgccggcgagcacctgctgctgggcgccaccaagagaagcatggtgttcaaggacgtgctgctgctgggcaacgactacatcgtgcccagacactgccccgagctggccgagatgagcagagtgagcatcagaatcctggacgagctggtgctgcccttccaggagctgcagatcgacgacaacgagtacgcctacctgaaggccatcatcttcttcgaccccgacgccaagggcctgagcgaccccggcaagatcaagagactgagaagccaggtgcaggtgagcctggaggactacatcaacgacagacagtacgacagcagaggcagattcggcgagctgctgctgctgctgcccaccctgcagagcatcacctggcagatgatcgagcagatccagttcatcaagctgttcggcatggccaagatcgacaacctgctgcaggagatgctgctgggcggcagccccagcgacgccccccacgcccaccaccccctgcacccccacctgatgcaggagcacatgggcaccaacgtgatcgtggccaacaccatgcccacccacctgagcaacggccagatgtgcgagtggcccagacccagaggccaggccgccacccccgagaccccccagcccagcccccccggcggcagcggcagcgagccctacaagctgctgcccggcgccgtggccaccatcgtgaagcccctgagcgccatcccccagcccaccatcaccaagcaggaggtgatctgaggactagtccctgttcccagagcccacttttttttctttttttgaaataaaatagcctgtctttcagatctaaaaaaaaaaaaaaaaaaaaaaaaaaaaaaaaaaaaaaaaaaaaaaaaaaaaaaaaaaaaaaaaaaaaaaaaaaaaaaaaaaaaaaaaaaaaaaaaaaaa

SEQ ID NO: 4437 - RNA, 1673 nt, synthetic construct
  misc_feature 1..1673: note = mRNA a-1 (A100) (opt4) from Homo sapiens__NP_000448.3__HNF4A(1-474)(S143A)
  source 1..1673: mol_type = other RNA
aggagagtcccgcagtcggcgtccagcggctctgcttgttcgtgtgtgtgtcgttgcaggccttattcaagcttaccatgagactgagcaagaccctggtggacatggacatggccgactacagcgccgccctggaccccgcctacaccaccctggagttcgagaacgtgcaggtgctgaccatgggcaacgacaccagccccagcgagggcaccaacctgaacgcccccaacagcctgggcgtgagcgccctgtgcgccatctgcggcgacagagccaccggcaagcactacggcgccagcagctgcgacggctgcaagggcttcttcagaagaagcgtgagaaagaaccacatgtacagctgcagattcagcagacagtgcgtggtggacaaggacaagagaaaccagtgcagatactgcagactgaagaagtgcttcagagccggcatgaagaaggaggccgtgcagaacgagagagacagaatcagcaccagaagaagcgcctacgaggacagcagcctgcccagcatcaacgccctgctgcaggccgaggtgctgagcagacagatcaccagccccgtgagcggcatcaacggcgacatcagagccaagaagatcgccagcatcgccgacgtgtgcgagagcatgaaggagcagctgctggtgctggtggagtgggccaagtacatccccgccttctgcgagctgcccctggacgaccaggtggccctgctgagagcccacgccggcgagcacctgctgctgggcgccaccaagagaagcatggtgttcaaggacgtgctgctgctgggcaacgactacatcgtgcccagacactgccccgagctggccgagatgagcagagtgagcatcagaatcctggacgagctggtgctgcccttccaggagctgcagatcgacgacaacgagtacgcctacctgaaggccatcatcttcttcgaccccgacgccaagggcctgagcgaccccggcaagatcaagagactgagaagccaggtgcaggtgagcctggaggactacatcaacgacagacagtacgacagcagaggcagattcggcgagctgctgctgctgctgcccaccctgcagagcatcacctggcagatgatcgagcagatccagttcatcaagctgttcggcatggccaagatcgacaacctgctgcaggagatgctgctgggcggcagccccagcgacgccccccacgcccaccaccccctgcacccccacctgatgcaggagcacatgggcaccaacgtgatcgtggccaacaccatgcccacccacctgagcaacggccagatgtgcgagtggcccagacccagaggccaggccgccacccccgagaccccccagcccagcccccccggcggcagcggcagcgagccctacaagctgctgcccggcgccgtggccaccatcgtgaagcccctgagcgccatcccccagcccaccatcaccaagcaggaggtgatctgaggactagtccctgttcccagagcccacttttttttctttttttgaaataaaatagcctgtctttcagatctaaaaaaaaaaaaaaaaaaaaaaaaaaaaaaaaaaaaaaaaaaaaaaaaaaaaaaaaaaaaaaaaaaaaaaaaaaaaaaaaaaaaaaaaaaaaaaaaaaaa

SEQ ID NO: 4438 - RNA, 1673 nt, synthetic construct
  misc_feature 1..1673: note = mRNA a-1 (A100) (opt4) from Homo sapiens__NP_000448.3__HNF4A(1-474)(T166A)
  source 1..1673: mol_type = other RNA
aggagagtcccgcagtcggcgtccagcggctctgcttgttcgtgtgtgtgtcgttgcaggccttattcaagcttaccatgagactgagcaagaccctggtggacatggacatggccgactacagcgccgccctggaccccgcctacaccaccctggagttcgagaacgtgcaggtgctgaccatgggcaacgacaccagccccagcgagggcaccaacctgaacgcccccaacagcctgggcgtgagcgccctgtgcgccatctgcggcgacagagccaccggcaagcactacggcgccagcagctgcgacggctgcaagggcttcttcagaagaagcgtgagaaagaaccacatgtacagctgcagattcagcagacagtgcgtggtggacaaggacaagagaaaccagtgcagatactgcagactgaagaagtgcttcagagccggcatgaagaaggaggccgtgcagaacgagagagacagaatcagcaccagaagaagcagctacgaggacagcagcctgcccagcatcaacgccctgctgcaggccgaggtgctgagcagacagatcgccagccccgtgagcggcatcaacggcgacatcagagccaagaagatcgccagcatcgccgacgtgtgcgagagcatgaaggagcagctgctggtgctggtggagtgggccaagtacatccccgccttctgcgagctgcccctggacgaccaggtggccctgctgagagcccacgccggcgagcacctgctgctgggcgccaccaagagaagcatggtgttcaaggacgtgctgctgctgggcaacgactacatcgtgcccagacactgccccgagctggccgagatgagcagagtgagcatcagaatcctggacgagctggtgctgcccttccaggagctgcagatcgacgacaacgagtacgcctacctgaaggccatcatcttcttcgaccccgacgccaagggcctgagcgaccccggcaagatcaagagactgagaagccaggtgcaggtgagcctggaggactacatcaacgacagacagtacgacagcagaggcagattcggcgagctgctgctgctgctgcccaccctgcagagcatcacctggcagatgatcgagcagatccagttcatcaagctgttcggcatggccaagatcgacaacctgctgcaggagatgctgctgggcggcagccccagcgacgccccccacgcccaccaccccctgcacccccacctgatgcaggagcacatgggcaccaacgtgatcgtggccaacaccatgcccacccacctgagcaacggccagatgtgcgagtggcccagacccagaggccaggccgccacccccgagaccccccagcccagcccccccggcggcagcggcagcgagccctacaagctgctgcccggcgccgtggccaccatcgtgaagcccctgagcgccatcccccagcccaccatcaccaagcaggaggtgatctgaggactagtccctgttcccagagcccacttttttttctttttttgaaataaaatagcctgtctttcagatctaaaaaaaaaaaaaaaaaaaaaaaaaaaaaaaaaaaaaaaaaaaaaaaaaaaaaaaaaaaaaaaaaaaaaaaaaaaaaaaaaaaaaaaaaaaaaaaaaaaa

SEQ ID NO: 4439 - RNA, 1673 nt, synthetic construct
  misc_feature 1..1673: note = mRNA a-1 (A100) (opt4) from Homo sapiens__NP_000448.3__HNF4A(1-474)(S167E)
  source 1..1673: mol_type = other RNA
aggagagtcccgcagtcggcgtccagcggctctgcttgttcgtgtgtgtgtcgttgcaggccttattcaagcttaccatgagactgagcaagaccctggtggacatggacatggccgactacagcgccgccctggaccccgcctacaccaccctggagttcgagaacgtgcaggtgctgaccatgggcaacgacaccagccccagcgagggcaccaacctgaacgcccccaacagcctgggcgtgagcgccctgtgcgccatctgcggcgacagagccaccggcaagcactacggcgccagcagctgcgacggctgcaagggcttcttcagaagaagcgtgagaaagaaccacatgtacagctgcagattcagcagacagtgcgtggtggacaaggacaagagaaaccagtgcagatactgcagactgaagaagtgcttcagagccggcatgaagaaggaggccgtgcagaacgagagagacagaatcagcaccagaagaagcagctacgaggacagcagcctgcccagcatcaacgccctgctgcaggccgaggtgctgagcagacagatcaccgagcccgtgagcggcatcaacggcgacatcagagccaagaagatcgccagcatcgccgacgtgtgcgagagcatgaaggagcagctgctggtgctggtggagtgggccaagtacatccccgccttctgcgagctgcccctggacgaccaggtggccctgctgagagcccacgccggcgagcacctgctgctgggcgccaccaagagaagcatggtgttcaaggacgtgctgctgctgggcaacgactacatcgtgcccagacactgccccgagctggccgagatgagcagagtgagcatcagaatcctggacgagctggtgctgcccttccaggagctgcagatcgacgacaacgagtacgcctacctgaaggccatcatcttcttcgaccccgacgccaagggcctgagcgaccccggcaagatcaagagactgagaagccaggtgcaggtgagcctggaggactacatcaacgacagacagtacgacagcagaggcagattcggcgagctgctgctgctgctgcccaccctgcagagcatcacctggcagatgatcgagcagatccagttcatcaagctgttcggcatggccaagatcgacaacctgctgcaggagatgctgctgggcggcagccccagcgacgccccccacgcccaccaccccctgcacccccacctgatgcaggagcacatgggcaccaacgtgatcgtggccaacaccatgcccacccacctgagcaacggccagatgtgcgagtggcccagacccagaggccaggccgccacccccgagaccccccagcccagcccccccggcggcagcggcagcgagccctacaagctgctgcccggcgccgtggccaccatcgtgaagcccctgagcgccatcccccagcccaccatcaccaagcaggaggtgatctgaggactagtccctgttcccagagcccacttttttttctttttttgaaataaaatagcctgtctttcagatctaaaaaaaaaaaaaaaaaaaaaaaaaaaaaaaaaaaaaaaaaaaaaaaaaaaaaaaaaaaaaaaaaaaaaaaaaaaaaaaaaaaaaaaaaaaaaaaaaaaa

SEQ ID NO: 4440 - RNA, 1673 nt, synthetic construct
  misc_feature 1..1673: note = mRNA a-1 (A100) (opt4) from Homo sapiens__NP_000448.3__HNF4A(1-474)(S167A)
  source 1..1673: mol_type = other RNA
aggagagtcccgcagtcggcgtccagcggctctgcttgttcgtgtgtgtgtcgttgcaggccttattcaagcttaccatgagactgagcaagaccctggtggacatggacatggccgactacagcgccgccctggaccccgcctacaccaccctggagttcgagaacgtgcaggtgctgaccatgggcaacgacaccagccccagcgagggcaccaacctgaacgcccccaacagcctgggcgtgagcgccctgtgcgccatctgcggcgacagagccaccggcaagcactacggcgccagcagctgcgacggctgcaagggcttcttcagaagaagcgtgagaaagaaccacatgtacagctgcagattcagcagacagtgcgtggtggacaaggacaagagaaaccagtgcagatactgcagactgaagaagtgcttcagagccggcatgaagaaggaggccgtgcagaacgagagagacagaatcagcaccagaagaagcagctacgaggacagcagcctgcccagcatcaacgccctgctgcaggccgaggtgctgagcagacagatcaccgcccccgtgagcggcatcaacggcgacatcagagccaagaagatcgccagcatcgccgacgtgtgcgagagcatgaaggagcagctgctggtgctggtggagtgggccaagtacatccccgccttctgcgagctgcccctggacgaccaggtggccctgctgagagcccacgccggcgagcacctgctgctgggcgccaccaagagaagcatggtgttcaaggacgtgctgctgctgggcaacgactacatcgtgcccagacactgccccgagctggccgagatgagcagagtgagcatcagaatcctggacgagctggtgctgcccttccaggagctgcagatcgacgacaacgagtacgcctacctgaaggccatcatcttcttcgaccccgacgccaagggcctgagcgaccccggcaagatcaagagactgagaagccaggtgcaggtgagcctggaggactacatcaacgacagacagtacgacagcagaggcagattcggcgagctgctgctgctgctgcccaccctgcagagcatcacctggcagatgatcgagcagatccagttcatcaagctgttcggcatggccaagatcgacaacctgctgcaggagatgctgctgggcggcagccccagcgacgccccccacgcccaccaccccctgcacccccacctgatgcaggagcacatgggcaccaacgtgatcgtggccaacaccatgcccacccacctgagcaacggccagatgtgcgagtggcccagacccagaggccaggccgccacccccgagaccccccagcccagcccccccggcggcagcggcagcgagccctacaagctgctgcccggcgccgtggccaccatcgtgaagcccctgagcgccatcccccagcccaccatcaccaagcaggaggtgatctgaggactagtccctgttcccagagcccacttttttttctttttttgaaataaaatagcctgtctttcagatctaaaaaaaaaaaaaaaaaaaaaaaaaaaaaaaaaaaaaaaaaaaaaaaaaaaaaaaaaaaaaaaaaaaaaaaaaaaaaaaaaaaaaaaaaaaaaaaaaaaa

SEQ ID NO: 4441 - RNA, 1673 nt, synthetic construct
  misc_feature 1..1673: note = mRNA a-1 (A100) (opt4) from Homo sapiens__NP_000448.3__HNF4A(1-474)(S167A_S378A_T429A_T432A_ S436A)
  source 1..1673: mol_type = other RNA
aggagagtcccgcagtcggcgtccagcggctctgcttgttcgtgtgtgtgtcgttgcaggccttattcaagcttaccatgagactgagcaagaccctggtggacatggacatggccgactacagcgccgccctggaccccgcctacaccaccctggagttcgagaacgtgcaggtgctgaccatgggcaacgacaccagccccagcgagggcaccaacctgaacgcccccaacagcctgggcgtgagcgccctgtgcgccatctgcggcgacagagccaccggcaagcactacggcgccagcagctgcgacggctgcaagggcttcttcagaagaagcgtgagaaagaaccacatgtacagctgcagattcagcagacagtgcgtggtggacaaggacaagagaaaccagtgcagatactgcagactgaagaagtgcttcagagccggcatgaagaaggaggccgtgcagaacgagagagacagaatcagcaccagaagaagcagctacgaggacagcagcctgcccagcatcaacgccctgctgcaggccgaggtgctgagcagacagatcaccgcccccgtgagcggcatcaacggcgacatcagagccaagaagatcgccagcatcgccgacgtgtgcgagagcatgaaggagcagctgctggtgctggtggagtgggccaagtacatccccgccttctgcgagctgcccctggacgaccaggtggccctgctgagagcccacgccggcgagcacctgctgctgggcgccaccaagagaagcatggtgttcaaggacgtgctgctgctgggcaacgactacatcgtgcccagacactgccccgagctggccgagatgagcagagtgagcatcagaatcctggacgagctggtgctgcccttccaggagctgcagatcgacgacaacgagtacgcctacctgaaggccatcatcttcttcgaccccgacgccaagggcctgagcgaccccggcaagatcaagagactgagaagccaggtgcaggtgagcctggaggactacatcaacgacagacagtacgacagcagaggcagattcggcgagctgctgctgctgctgcccaccctgcagagcatcacctggcagatgatcgagcagatccagttcatcaagctgttcggcatggccaagatcgacaacctgctgcaggagatgctgctgggcggcgcccccagcgacgccccccacgcccaccaccccctgcacccccacctgatgcaggagcacatgggcaccaacgtgatcgtggccaacaccatgcccacccacctgagcaacggccagatgtgcgagtggcccagacccagaggccaggccgccgcccccgaggccccccagcccgccccccccggcggcagcggcagcgagccctacaagctgctgcccggcgccgtggccaccatcgtgaagcccctgagcgccatcccccagcccaccatcaccaagcaggaggtgatctgaggactagtccctgttcccagagcccacttttttttctttttttgaaataaaatagcctgtctttcagatctaaaaaaaaaaaaaaaaaaaaaaaaaaaaaaaaaaaaaaaaaaaaaaaaaaaaaaaaaaaaaaaaaaaaaaaaaaaaaaaaaaaaaaaaaaaaaaaaaaaa

SEQ ID NO: 4442 - RNA, 1673 nt, synthetic construct
  misc_feature 1..1673: note = mRNA a-1 (A100) (opt4) from Homo sapiens__NP_000448.3__HNF4A(1-474)(S167E_S378E_T429E_T432E_ S436E)
  source 1..1673: mol_type = other RNA
aggagagtcccgcagtcggcgtccagcggctctgcttgttcgtgtgtgtgtcgttgcaggccttattcaagcttaccatgagactgagcaagaccctggtggacatggacatggccgactacagcgccgccctggaccccgcctacaccaccctggagttcgagaacgtgcaggtgctgaccatgggcaacgacaccagccccagcgagggcaccaacctgaacgcccccaacagcctgggcgtgagcgccctgtgcgccatctgcggcgacagagccaccggcaagcactacggcgccagcagctgcgacggctgcaagggcttcttcagaagaagcgtgagaaagaaccacatgtacagctgcagattcagcagacagtgcgtggtggacaaggacaagagaaaccagtgcagatactgcagactgaagaagtgcttcagagccggcatgaagaaggaggccgtgcagaacgagagagacagaatcagcaccagaagaagcagctacgaggacagcagcctgcccagcatcaacgccctgctgcaggccgaggtgctgagcagacagatcaccgagcccgtgagcggcatcaacggcgacatcagagccaagaagatcgccagcatcgccgacgtgtgcgagagcatgaaggagcagctgctggtgctggtggagtgggccaagtacatccccgccttctgcgagctgcccctggacgaccaggtggccctgctgagagcccacgccggcgagcacctgctgctgggcgccaccaagagaagcatggtgttcaaggacgtgctgctgctgggcaacgactacatcgtgcccagacactgccccgagctggccgagatgagcagagtgagcatcagaatcctggacgagctggtgctgcccttccaggagctgcagatcgacgacaacgagtacgcctacctgaaggccatcatcttcttcgaccccgacgccaagggcctgagcgaccccggcaagatcaagagactgagaagccaggtgcaggtgagcctggaggactacatcaacgacagacagtacgacagcagaggcagattcggcgagctgctgctgctgctgcccaccctgcagagcatcacctggcagatgatcgagcagatccagttcatcaagctgttcggcatggccaagatcgacaacctgctgcaggagatgctgctgggcggcgagcccagcgacgccccccacgcccaccaccccctgcacccccacctgatgcaggagcacatgggcaccaacgtgatcgtggccaacaccatgcccacccacctgagcaacggccagatgtgcgagtggcccagacccagaggccaggccgccgagcccgaggagccccagcccgagccccccggcggcagcggcagcgagccctacaagctgctgcccggcgccgtggccaccatcgtgaagcccctgagcgccatcccccagcccaccatcaccaagcaggaggtgatctgaggactagtccctgttcccagagcccacttttttttctttttttgaaataaaatagcctgtctttcagatctaaaaaaaaaaaaaaaaaaaaaaaaaaaaaaaaaaaaaaaaaaaaaaaaaaaaaaaaaaaaaaaaaaaaaaaaaaaaaaaaaaaaaaaaaaaaaaaaaaaa

SEQ ID NO: 4443 - RNA, 1673 nt, synthetic construct
  misc_feature 1..1673: note = mRNA a-1 (A100) (opt4) from Homo sapiens__NP_000448.3__HNF4A(1-474)(S87A)
  source 1..1673: mol_type = other RNA
aggagagtcccgcagtcggcgtccagcggctctgcttgttcgtgtgtgtgtcgttgcaggccttattcaagcttaccatgagactgagcaagaccctggtggacatggacatggccgactacagcgccgccctggaccccgcctacaccaccctggagttcgagaacgtgcaggtgctgaccatgggcaacgacaccagccccagcgagggcaccaacctgaacgcccccaacagcctgggcgtgagcgccctgtgcgccatctgcggcgacagagccaccggcaagcactacggcgccagcagctgcgacggctgcaagggcttcttcagaagagccgtgagaaagaaccacatgtacagctgcagattcagcagacagtgcgtggtggacaaggacaagagaaaccagtgcagatactgcagactgaagaagtgcttcagagccggcatgaagaaggaggccgtgcagaacgagagagacagaatcagcaccagaagaagcagctacgaggacagcagcctgcccagcatcaacgccctgctgcaggccgaggtgctgagcagacagatcaccagccccgtgagcggcatcaacggcgacatcagagccaagaagatcgccagcatcgccgacgtgtgcgagagcatgaaggagcagctgctggtgctggtggagtgggccaagtacatccccgccttctgcgagctgcccctggacgaccaggtggccctgctgagagcccacgccggcgagcacctgctgctgggcgccaccaagagaagcatggtgttcaaggacgtgctgctgctgggcaacgactacatcgtgcccagacactgccccgagctggccgagatgagcagagtgagcatcagaatcctggacgagctggtgctgcccttccaggagctgcagatcgacgacaacgagtacgcctacctgaaggccatcatcttcttcgaccccgacgccaagggcctgagcgaccccggcaagatcaagagactgagaagccaggtgcaggtgagcctggaggactacatcaacgacagacagtacgacagcagaggcagattcggcgagctgctgctgctgctgcccaccctgcagagcatcacctggcagatgatcgagcagatccagttcatcaagctgttcggcatggccaagatcgacaacctgctgcaggagatgctgctgggcggcagccccagcgacgccccccacgcccaccaccccctgcacccccacctgatgcaggagcacatgggcaccaacgtgatcgtggccaacaccatgcccacccacctgagcaacggccagatgtgcgagtggcccagacccagaggccaggccgccacccccgagaccccccagcccagcccccccggcggcagcggcagcgagccctacaagctgctgcccggcgccgtggccaccatcgtgaagcccctgagcgccatcccccagcccaccatcaccaagcaggaggtgatctgaggactagtccctgttcccagagcccacttttttttctttttttgaaataaaatagcctgtctttcagatctaaaaaaaaaaaaaaaaaaaaaaaaaaaaaaaaaaaaaaaaaaaaaaaaaaaaaaaaaaaaaaaaaaaaaaaaaaaaaaaaaaaaaaaaaaaaaaaaaaaa

SEQ ID NO: 4444 - RNA, 1673 nt, synthetic construct
  misc_feature 1..1673: note = mRNA a-1 (A100) (opt4) from Homo sapiens__NP_000448.3__HNF4A(1-474)(S87E)
  source 1..1673: mol_type = other RNA
aggagagtcccgcagtcggcgtccagcggctctgcttgttcgtgtgtgtgtcgttgcaggccttattcaagcttaccatgagactgagcaagaccctggtggacatggacatggccgactacagcgccgccctggaccccgcctacaccaccctggagttcgagaacgtgcaggtgctgaccatgggcaacgacaccagccccagcgagggcaccaacctgaacgcccccaacagcctgggcgtgagcgccctgtgcgccatctgcggcgacagagccaccggcaagcactacggcgccagcagctgcgacggctgcaagggcttcttcagaagagaggtgagaaagaaccacatgtacagctgcagattcagcagacagtgcgtggtggacaaggacaagagaaaccagtgcagatactgcagactgaagaagtgcttcagagccggcatgaagaaggaggccgtgcagaacgagagagacagaatcagcaccagaagaagcagctacgaggacagcagcctgcccagcatcaacgccctgctgcaggccgaggtgctgagcagacagatcaccagccccgtgagcggcatcaacggcgacatcagagccaagaagatcgccagcatcgccgacgtgtgcgagagcatgaaggagcagctgctggtgctggtggagtgggccaagtacatccccgccttctgcgagctgcccctggacgaccaggtggccctgctgagagcccacgccggcgagcacctgctgctgggcgccaccaagagaagcatggtgttcaaggacgtgctgctgctgggcaacgactacatcgtgcccagacactgccccgagctggccgagatgagcagagtgagcatcagaatcctggacgagctggtgctgcccttccaggagctgcagatcgacgacaacgagtacgcctacctgaaggccatcatcttcttcgaccccgacgccaagggcctgagcgaccccggcaagatcaagagactgagaagccaggtgcaggtgagcctggaggactacatcaacgacagacagtacgacagcagaggcagattcggcgagctgctgctgctgctgcccaccctgcagagcatcacctggcagatgatcgagcagatccagttcatcaagctgttcggcatggccaagatcgacaacctgctgcaggagatgctgctgggcggcagccccagcgacgccccccacgcccaccaccccctgcacccccacctgatgcaggagcacatgggcaccaacgtgatcgtggccaacaccatgcccacccacctgagcaacggccagatgtgcgagtggcccagacccagaggccaggccgccacccccgagaccccccagcccagcccccccggcggcagcggcagcgagccctacaagctgctgcccggcgccgtggccaccatcgtgaagcccctgagcgccatcccccagcccaccatcaccaagcaggaggtgatctgaggactagtccctgttcccagagcccacttttttttctttttttgaaataaaatagcctgtctttcagatctaaaaaaaaaaaaaaaaaaaaaaaaaaaaaaaaaaaaaaaaaaaaaaaaaaaaaaaaaaaaaaaaaaaaaaaaaaaaaaaaaaaaaaaaaaaaaaaaaaaa

SEQ ID NO: 4445 - RNA, 1673 nt, synthetic construct
  misc_feature 1..1673: note = mRNA a-1 (A100) (opt4) from Homo sapiens__NP_000448.3__HNF4A(1-474)(R2V)
  source 1..1673: mol_type = other RNA
aggagagtcccgcagtcggcgtccagcggctctgcttgttcgtgtgtgtgtcgttgcaggccttattcaagcttaccatggtgctgagcaagaccctggtggacatggacatggccgactacagcgccgccctggaccccgcctacaccaccctggagttcgagaacgtgcaggtgctgaccatgggcaacgacaccagccccagcgagggcaccaacctgaacgcccccaacagcctgggcgtgagcgccctgtgcgccatctgcggcgacagagccaccggcaagcactacggcgccagcagctgcgacggctgcaagggcttcttcagaagaagcgtgagaaagaaccacatgtacagctgcagattcagcagacagtgcgtggtggacaaggacaagagaaaccagtgcagatactgcagactgaagaagtgcttcagagccggcatgaagaaggaggccgtgcagaacgagagagacagaatcagcaccagaagaagcagctacgaggacagcagcctgcccagcatcaacgccctgctgcaggccgaggtgctgagcagacagatcaccagccccgtgagcggcatcaacggcgacatcagagccaagaagatcgccagcatcgccgacgtgtgcgagagcatgaaggagcagctgctggtgctggtggagtgggccaagtacatccccgccttctgcgagctgcccctggacgaccaggtggccctgctgagagcccacgccggcgagcacctgctgctgggcgccaccaagagaagcatggtgttcaaggacgtgctgctgctgggcaacgactacatcgtgcccagacactgccccgagctggccgagatgagcagagtgagcatcagaatcctggacgagctggtgctgcccttccaggagctgcagatcgacgacaacgagtacgcctacctgaaggccatcatcttcttcgaccccgacgccaagggcctgagcgaccccggcaagatcaagagactgagaagccaggtgcaggtgagcctggaggactacatcaacgacagacagtacgacagcagaggcagattcggcgagctgctgctgctgctgcccaccctgcagagcatcacctggcagatgatcgagcagatccagttcatcaagctgttcggcatggccaagatcgacaacctgctgcaggagatgctgctgggcggcagccccagcgacgccccccacgcccaccaccccctgcacccccacctgatgcaggagcacatgggcaccaacgtgatcgtggccaacaccatgcccacccacctgagcaacggccagatgtgcgagtggcccagacccagaggccaggccgccacccccgagaccccccagcccagcccccccggcggcagcggcagcgagccctacaagctgctgcccggcgccgtggccaccatcgtgaagcccctgagcgccatcccccagcccaccatcaccaagcaggaggtgatctgaggactagtccctgttcccagagcccacttttttttctttttttgaaataaaatagcctgtctttcagatctaaaaaaaaaaaaaaaaaaaaaaaaaaaaaaaaaaaaaaaaaaaaaaaaaaaaaaaaaaaaaaaaaaaaaaaaaaaaaaaaaaaaaaaaaaaaaaaaaaaa

SEQ ID NO: 4446 - RNA, 1673 nt, synthetic construct
  misc_feature 1..1673: note = mRNA a-1 (A100) (opt4) from Homo sapiens__NP_000448.3__HNF4A(1-474)(R2V_K5V)
  source 1..1673: mol_type = other RNA
aggagagtcccgcagtcggcgtccagcggctctgcttgttcgtgtgtgtgtcgttgcaggccttattcaagcttaccatggtgctgagcgtgaccctggtggacatggacatggccgactacagcgccgccctggaccccgcctacaccaccctggagttcgagaacgtgcaggtgctgaccatgggcaacgacaccagccccagcgagggcaccaacctgaacgcccccaacagcctgggcgtgagcgccctgtgcgccatctgcggcgacagagccaccggcaagcactacggcgccagcagctgcgacggctgcaagggcttcttcagaagaagcgtgagaaagaaccacatgtacagctgcagattcagcagacagtgcgtggtggacaaggacaagagaaaccagtgcagatactgcagactgaagaagtgcttcagagccggcatgaagaaggaggccgtgcagaacgagagagacagaatcagcaccagaagaagcagctacgaggacagcagcctgcccagcatcaacgccctgctgcaggccgaggtgctgagcagacagatcaccagccccgtgagcggcatcaacggcgacatcagagccaagaagatcgccagcatcgccgacgtgtgcgagagcatgaaggagcagctgctggtgctggtggagtgggccaagtacatccccgccttctgcgagctgcccctggacgaccaggtggccctgctgagagcccacgccggcgagcacctgctgctgggcgccaccaagagaagcatggtgttcaaggacgtgctgctgctgggcaacgactacatcgtgcccagacactgccccgagctggccgagatgagcagagtgagcatcagaatcctggacgagctggtgctgcccttccaggagctgcagatcgacgacaacgagtacgcctacctgaaggccatcatcttcttcgaccccgacgccaagggcctgagcgaccccggcaagatcaagagactgagaagccaggtgcaggtgagcctggaggactacatcaacgacagacagtacgacagcagaggcagattcggcgagctgctgctgctgctgcccaccctgcagagcatcacctggcagatgatcgagcagatccagttcatcaagctgttcggcatggccaagatcgacaacctgctgcaggagatgctgctgggcggcagccccagcgacgccccccacgcccaccaccccctgcacccccacctgatgcaggagcacatgggcaccaacgtgatcgtggccaacaccatgcccacccacctgagcaacggccagatgtgcgagtggcccagacccagaggccaggccgccacccccgagaccccccagcccagcccccccggcggcagcggcagcgagccctacaagctgctgcccggcgccgtggccaccatcgtgaagcccctgagcgccatcccccagcccaccatcaccaagcaggaggtgatctgaggactagtccctgttcccagagcccacttttttttctttttttgaaataaaatagcctgtctttcagatctaaaaaaaaaaaaaaaaaaaaaaaaaaaaaaaaaaaaaaaaaaaaaaaaaaaaaaaaaaaaaaaaaaaaaaaaaaaaaaaaaaaaaaaaaaaaaaaaaaaa

SEQ ID NO: 4447 - RNA, 1673 nt, synthetic construct
  misc_feature 1..1673: note = mRNA a-1 (A100) (opt4) from Homo sapiens__NP_000448.3__HNF4A(1-474)(K179R_K180R)
  source 1..1673: mol_type = other RNA
aggagagtcccgcagtcggcgtccagcggctctgcttgttcgtgtgtgtgtcgttgcaggccttattcaagcttaccatgagactgagcaagaccctggtggacatggacatggccgactacagcgccgccctggaccccgcctacaccaccctggagttcgagaacgtgcaggtgctgaccatgggcaacgacaccagccccagcgagggcaccaacctgaacgcccccaacagcctgggcgtgagcgccctgtgcgccatctgcggcgacagagccaccggcaagcactacggcgccagcagctgcgacggctgcaagggcttcttcagaagaagcgtgagaaagaaccacatgtacagctgcagattcagcagacagtgcgtggtggacaaggacaagagaaaccagtgcagatactgcagactgaagaagtgcttcagagccggcatgaagaaggaggccgtgcagaacgagagagacagaatcagcaccagaagaagcagctacgaggacagcagcctgcccagcatcaacgccctgctgcaggccgaggtgctgagcagacagatcaccagccccgtgagcggcatcaacggcgacatcagagccagaagaatcgccagcatcgccgacgtgtgcgagagcatgaaggagcagctgctggtgctggtggagtgggccaagtacatccccgccttctgcgagctgcccctggacgaccaggtggccctgctgagagcccacgccggcgagcacctgctgctgggcgccaccaagagaagcatggtgttcaaggacgtgctgctgctgggcaacgactacatcgtgcccagacactgccccgagctggccgagatgagcagagtgagcatcagaatcctggacgagctggtgctgcccttccaggagctgcagatcgacgacaacgagtacgcctacctgaaggccatcatcttcttcgaccccgacgccaagggcctgagcgaccccggcaagatcaagagactgagaagccaggtgcaggtgagcctggaggactacatcaacgacagacagtacgacagcagaggcagattcggcgagctgctgctgctgctgcccaccctgcagagcatcacctggcagatgatcgagcagatccagttcatcaagctgttcggcatggccaagatcgacaacctgctgcaggagatgctgctgggcggcagccccagcgacgccccccacgcccaccaccccctgcacccccacctgatgcaggagcacatgggcaccaacgtgatcgtggccaacaccatgcccacccacctgagcaacggccagatgtgcgagtggcccagacccagaggccaggccgccacccccgagaccccccagcccagcccccccggcggcagcggcagcgagccctacaagctgctgcccggcgccgtggccaccatcgtgaagcccctgagcgccatcccccagcccaccatcaccaagcaggaggtgatctgaggactagtccctgttcccagagcccacttttttttctttttttgaaataaaatagcctgtctttcagatctaaaaaaaaaaaaaaaaaaaaaaaaaaaaaaaaaaaaaaaaaaaaaaaaaaaaaaaaaaaaaaaaaaaaaaaaaaaaaaaaaaaaaaaaaaaaaaaaaaaa

SEQ ID NO: 4448 - RNA, 1673 nt, synthetic construct
  misc_feature 1..1673: note = mRNA a-1 (A100) (opt4) from Homo sapiens__NP_000448.3__HNF4A(1-474)(K234R)
  source 1..1673: mol_type = other RNA
aggagagtcccgcagtcggcgtccagcggctctgcttgttcgtgtgtgtgtcgttgcaggccttattcaagcttaccatgagactgagcaagaccctggtggacatggacatggccgactacagcgccgccctggaccccgcctacaccaccctggagttcgagaacgtgcaggtgctgaccatgggcaacgacaccagccccagcgagggcaccaacctgaacgcccccaacagcctgggcgtgagcgccctgtgcgccatctgcggcgacagagccaccggcaagcactacggcgccagcagctgcgacggctgcaagggcttcttcagaagaagcgtgagaaagaaccacatgtacagctgcagattcagcagacagtgcgtggtggacaaggacaagagaaaccagtgcagatactgcagactgaagaagtgcttcagagccggcatgaagaaggaggccgtgcagaacgagagagacagaatcagcaccagaagaagcagctacgaggacagcagcctgcccagcatcaacgccctgctgcaggccgaggtgctgagcagacagatcaccagccccgtgagcggcatcaacggcgacatcagagccaagaagatcgccagcatcgccgacgtgtgcgagagcatgaaggagcagctgctggtgctggtggagtgggccaagtacatccccgccttctgcgagctgcccctggacgaccaggtggccctgctgagagcccacgccggcgagcacctgctgctgggcgccaccagaagaagcatggtgttcaaggacgtgctgctgctgggcaacgactacatcgtgcccagacactgccccgagctggccgagatgagcagagtgagcatcagaatcctggacgagctggtgctgcccttccaggagctgcagatcgacgacaacgagtacgcctacctgaaggccatcatcttcttcgaccccgacgccaagggcctgagcgaccccggcaagatcaagagactgagaagccaggtgcaggtgagcctggaggactacatcaacgacagacagtacgacagcagaggcagattcggcgagctgctgctgctgctgcccaccctgcagagcatcacctggcagatgatcgagcagatccagttcatcaagctgttcggcatggccaagatcgacaacctgctgcaggagatgctgctgggcggcagccccagcgacgccccccacgcccaccaccccctgcacccccacctgatgcaggagcacatgggcaccaacgtgatcgtggccaacaccatgcccacccacctgagcaacggccagatgtgcgagtggcccagacccagaggccaggccgccacccccgagaccccccagcccagcccccccggcggcagcggcagcgagccctacaagctgctgcccggcgccgtggccaccatcgtgaagcccctgagcgccatcccccagcccaccatcaccaagcaggaggtgatctgaggactagtccctgttcccagagcccacttttttttctttttttgaaataaaatagcctgtctttcagatctaaaaaaaaaaaaaaaaaaaaaaaaaaaaaaaaaaaaaaaaaaaaaaaaaaaaaaaaaaaaaaaaaaaaaaaaaaaaaaaaaaaaaaaaaaaaaaaaaaaa

SEQ ID NO: 4449 - RNA, 1673 nt, synthetic construct
  misc_feature 1..1673: note = mRNA a-1 (A100) (opt4) from Homo sapiens__NP_000448.3__HNF4A(1-474)(K300R)
  source 1..1673: mol_type = other RNA
aggagagtcccgcagtcggcgtccagcggctctgcttgttcgtgtgtgtgtcgttgcaggccttattcaagcttaccatgagactgagcaagaccctggtggacatggacatggccgactacagcgccgccctggaccccgcctacaccaccctggagttcgagaacgtgcaggtgctgaccatgggcaacgacaccagccccagcgagggcaccaacctgaacgcccccaacagcctgggcgtgagcgccctgtgcgccatctgcggcgacagagccaccggcaagcactacggcgccagcagctgcgacggctgcaagggcttcttcagaagaagcgtgagaaagaaccacatgtacagctgcagattcagcagacagtgcgtggtggacaaggacaagagaaaccagtgcagatactgcagactgaagaagtgcttcagagccggcatgaagaaggaggccgtgcagaacgagagagacagaatcagcaccagaagaagcagctacgaggacagcagcctgcccagcatcaacgccctgctgcaggccgaggtgctgagcagacagatcaccagccccgtgagcggcatcaacggcgacatcagagccaagaagatcgccagcatcgccgacgtgtgcgagagcatgaaggagcagctgctggtgctggtggagtgggccaagtacatccccgccttctgcgagctgcccctggacgaccaggtggccctgctgagagcccacgccggcgagcacctgctgctgggcgccaccaagagaagcatggtgttcaaggacgtgctgctgctgggcaacgactacatcgtgcccagacactgccccgagctggccgagatgagcagagtgagcatcagaatcctggacgagctggtgctgcccttccaggagctgcagatcgacgacaacgagtacgcctacctgaaggccatcatcttcttcgaccccgacgccagaggcctgagcgaccccggcaagatcaagagactgagaagccaggtgcaggtgagcctggaggactacatcaacgacagacagtacgacagcagaggcagattcggcgagctgctgctgctgctgcccaccctgcagagcatcacctggcagatgatcgagcagatccagttcatcaagctgttcggcatggccaagatcgacaacctgctgcaggagatgctgctgggcggcagccccagcgacgccccccacgcccaccaccccctgcacccccacctgatgcaggagcacatgggcaccaacgtgatcgtggccaacaccatgcccacccacctgagcaacggccagatgtgcgagtggcccagacccagaggccaggccgccacccccgagaccccccagcccagcccccccggcggcagcggcagcgagccctacaagctgctgcccggcgccgtggccaccatcgtgaagcccctgagcgccatcccccagcccaccatcaccaagcaggaggtgatctgaggactagtccctgttcccagagcccacttttttttctttttttgaaataaaatagcctgtctttcagatctaaaaaaaaaaaaaaaaaaaaaaaaaaaaaaaaaaaaaaaaaaaaaaaaaaaaaaaaaaaaaaaaaaaaaaaaaaaaaaaaaaaaaaaaaaaaaaaaaaaa

SEQ ID NO: 4450 - RNA, 1673 nt, synthetic construct
  misc_feature 1..1673: note = mRNA a-1 (A100) (opt4) from Homo sapiens__NP_000448.3__HNF4A(1-474)(K300R_K307R_K309R)
  source 1..1673: mol_type = other RNA
aggagagtcccgcagtcggcgtccagcggctctgcttgttcgtgtgtgtgtcgttgcaggccttattcaagcttaccatgagactgagcaagaccctggtggacatggacatggccgactacagcgccgccctggaccccgcctacaccaccctggagttcgagaacgtgcaggtgctgaccatgggcaacgacaccagccccagcgagggcaccaacctgaacgcccccaacagcctgggcgtgagcgccctgtgcgccatctgcggcgacagagccaccggcaagcactacggcgccagcagctgcgacggctgcaagggcttcttcagaagaagcgtgagaaagaaccacatgtacagctgcagattcagcagacagtgcgtggtggacaaggacaagagaaaccagtgcagatactgcagactgaagaagtgcttcagagccggcatgaagaaggaggccgtgcagaacgagagagacagaatcagcaccagaagaagcagctacgaggacagcagcctgcccagcatcaacgccctgctgcaggccgaggtgctgagcagacagatcaccagccccgtgagcggcatcaacggcgacatcagagccaagaagatcgccagcatcgccgacgtgtgcgagagcatgaaggagcagctgctggtgctggtggagtgggccaagtacatccccgccttctgcgagctgcccctggacgaccaggtggccctgctgagagcccacgccggcgagcacctgctgctgggcgccaccaagagaagcatggtgttcaaggacgtgctgctgctgggcaacgactacatcgtgcccagacactgccccgagctggccgagatgagcagagtgagcatcagaatcctggacgagctggtgctgcccttccaggagctgcagatcgacgacaacgagtacgcctacctgaaggccatcatcttcttcgaccccgacgccagaggcctgagcgaccccggcagaatcagaagactgagaagccaggtgcaggtgagcctggaggactacatcaacgacagacagtacgacagcagaggcagattcggcgagctgctgctgctgctgcccaccctgcagagcatcacctggcagatgatcgagcagatccagttcatcaagctgttcggcatggccaagatcgacaacctgctgcaggagatgctgctgggcggcagccccagcgacgccccccacgcccaccaccccctgcacccccacctgatgcaggagcacatgggcaccaacgtgatcgtggccaacaccatgcccacccacctgagcaacggccagatgtgcgagtggcccagacccagaggccaggccgccacccccgagaccccccagcccagcccccccggcggcagcggcagcgagccctacaagctgctgcccggcgccgtggccaccatcgtgaagcccctgagcgccatcccccagcccaccatcaccaagcaggaggtgatctgaggactagtccctgttcccagagcccacttttttttctttttttgaaataaaatagcctgtctttcagatctaaaaaaaaaaaaaaaaaaaaaaaaaaaaaaaaaaaaaaaaaaaaaaaaaaaaaaaaaaaaaaaaaaaaaaaaaaaaaaaaaaaaaaaaaaaaaaaaaaaa

SEQ ID NO: 4451 - RNA, 1673 nt, synthetic construct
  misc_feature 1..1673: note = mRNA a-1 (A100) (opt4) from Homo sapiens__NP_000448.3__HNF4A(1-474)(K447R_K470R)
  source 1..1673: mol_type = other RNA
aggagagtcccgcagtcggcgtccagcggctctgcttgttcgtgtgtgtgtcgttgcaggccttattcaagcttaccatgagactgagcaagaccctggtggacatggacatggccgactacagcgccgccctggaccccgcctacaccaccctggagttcgagaacgtgcaggtgctgaccatgggcaacgacaccagccccagcgagggcaccaacctgaacgcccccaacagcctgggcgtgagcgccctgtgcgccatctgcggcgacagagccaccggcaagcactacggcgccagcagctgcgacggctgcaagggcttcttcagaagaagcgtgagaaagaaccacatgtacagctgcagattcagcagacagtgcgtggtggacaaggacaagagaaaccagtgcagatactgcagactgaagaagtgcttcagagccggcatgaagaaggaggccgtgcagaacgagagagacagaatcagcaccagaagaagcagctacgaggacagcagcctgcccagcatcaacgccctgctgcaggccgaggtgctgagcagacagatcaccagccccgtgagcggcatcaacggcgacatcagagccaagaagatcgccagcatcgccgacgtgtgcgagagcatgaaggagcagctgctggtgctggtggagtgggccaagtacatccccgccttctgcgagctgcccctggacgaccaggtggccctgctgagagcccacgccggcgagcacctgctgctgggcgccaccaagagaagcatggtgttcaaggacgtgctgctgctgggcaacgactacatcgtgcccagacactgccccgagctggccgagatgagcagagtgagcatcagaatcctggacgagctggtgctgcccttccaggagctgcagatcgacgacaacgagtacgcctacctgaaggccatcatcttcttcgaccccgacgccaagggcctgagcgaccccggcaagatcaagagactgagaagccaggtgcaggtgagcctggaggactacatcaacgacagacagtacgacagcagaggcagattcggcgagctgctgctgctgctgcccaccctgcagagcatcacctggcagatgatcgagcagatccagttcatcaagctgttcggcatggccaagatcgacaacctgctgcaggagatgctgctgggcggcagccccagcgacgccccccacgcccaccaccccctgcacccccacctgatgcaggagcacatgggcaccaacgtgatcgtggccaacaccatgcccacccacctgagcaacggccagatgtgcgagtggcccagacccagaggccaggccgccacccccgagaccccccagcccagcccccccggcggcagcggcagcgagccctacagactgctgcccggcgccgtggccaccatcgtgaagcccctgagcgccatcccccagcccaccatcaccagacaggaggtgatctgaggactagtccctgttcccagagcccacttttttttctttttttgaaataaaatagcctgtctttcagatctaaaaaaaaaaaaaaaaaaaaaaaaaaaaaaaaaaaaaaaaaaaaaaaaaaaaaaaaaaaaaaaaaaaaaaaaaaaaaaaaaaaaaaaaaaaaaaaaaaaa

SEQ ID NO: 4452 - RNA, 1673 nt, synthetic construct
  misc_feature 1..1673: note = mRNA a-1 (A100) (opt4) from Homo sapiens__NP_000448.3__HNF4A(1-474)(K458R)
  source 1..1673: mol_type = other RNA
aggagagtcccgcagtcggcgtccagcggctctgcttgttcgtgtgtgtgtcgttgcaggccttattcaagcttaccatgagactgagcaagaccctggtggacatggacatggccgactacagcgccgccctggaccccgcctacaccaccctggagttcgagaacgtgcaggtgctgaccatgggcaacgacaccagccccagcgagggcaccaacctgaacgcccccaacagcctgggcgtgagcgccctgtgcgccatctgcggcgacagagccaccggcaagcactacggcgccagcagctgcgacggctgcaagggcttcttcagaagaagcgtgagaaagaaccacatgtacagctgcagattcagcagacagtgcgtggtggacaaggacaagagaaaccagtgcagatactgcagactgaagaagtgcttcagagccggcatgaagaaggaggccgtgcagaacgagagagacagaatcagcaccagaagaagcagctacgaggacagcagcctgcccagcatcaacgccctgctgcaggccgaggtgctgagcagacagatcaccagccccgtgagcggcatcaacggcgacatcagagccaagaagatcgccagcatcgccgacgtgtgcgagagcatgaaggagcagctgctggtgctggtggagtgggccaagtacatccccgccttctgcgagctgcccctggacgaccaggtggccctgctgagagcccacgccggcgagcacctgctgctgggcgccaccaagagaagcatggtgttcaaggacgtgctgctgctgggcaacgactacatcgtgcccagacactgccccgagctggccgagatgagcagagtgagcatcagaatcctggacgagctggtgctgcccttccaggagctgcagatcgacgacaacgagtacgcctacctgaaggccatcatcttcttcgaccccgacgccaagggcctgagcgaccccggcaagatcaagagactgagaagccaggtgcaggtgagcctggaggactacatcaacgacagacagtacgacagcagaggcagattcggcgagctgctgctgctgctgcccaccctgcagagcatcacctggcagatgatcgagcagatccagttcatcaagctgttcggcatggccaagatcgacaacctgctgcaggagatgctgctgggcggcagccccagcgacgccccccacgcccaccaccccctgcacccccacctgatgcaggagcacatgggcaccaacgtgatcgtggccaacaccatgcccacccacctgagcaacggccagatgtgcgagtggcccagacccagaggccaggccgccacccccgagaccccccagcccagcccccccggcggcagcggcagcgagccctacaagctgctgcccggcgccgtggccaccatcgtgagacccctgagcgccatcccccagcccaccatcaccaagcaggaggtgatctgaggactagtccctgttcccagagcccacttttttttctttttttgaaataaaatagcctgtctttcagatctaaaaaaaaaaaaaaaaaaaaaaaaaaaaaaaaaaaaaaaaaaaaaaaaaaaaaaaaaaaaaaaaaaaaaaaaaaaaaaaaaaaaaaaaaaaaaaaaaaaa

SEQ ID NO: 4453 - RNA, 1673 nt, synthetic construct
  misc_feature 1..1673: note = mRNA a-1 (A100) (opt4) from Homo sapiens__NP_000448.3__HNF4A(1-474)(K106R_K108R_K126R_K127R)
  source 1..1673: mol_type = other RNA
aggagagtcccgcagtcggcgtccagcggctctgcttgttcgtgtgtgtgtcgttgcaggccttattcaagcttaccatgagactgagcaagaccctggtggacatggacatggccgactacagcgccgccctggaccccgcctacaccaccctggagttcgagaacgtgcaggtgctgaccatgggcaacgacaccagccccagcgagggcaccaacctgaacgcccccaacagcctgggcgtgagcgccctgtgcgccatctgcggcgacagagccaccggcaagcactacggcgccagcagctgcgacggctgcaagggcttcttcagaagaagcgtgagaaagaaccacatgtacagctgcagattcagcagacagtgcgtggtggacagagacagaagaaaccagtgcagatactgcagactgaagaagtgcttcagagccggcatgagaagagaggccgtgcagaacgagagagacagaatcagcaccagaagaagcagctacgaggacagcagcctgcccagcatcaacgccctgctgcaggccgaggtgctgagcagacagatcaccagccccgtgagcggcatcaacggcgacatcagagccaagaagatcgccagcatcgccgacgtgtgcgagagcatgaaggagcagctgctggtgctggtggagtgggccaagtacatccccgccttctgcgagctgcccctggacgaccaggtggccctgctgagagcccacgccggcgagcacctgctgctgggcgccaccaagagaagcatggtgttcaaggacgtgctgctgctgggcaacgactacatcgtgcccagacactgccccgagctggccgagatgagcagagtgagcatcagaatcctggacgagctggtgctgcccttccaggagctgcagatcgacgacaacgagtacgcctacctgaaggccatcatcttcttcgaccccgacgccaagggcctgagcgaccccggcaagatcaagagactgagaagccaggtgcaggtgagcctggaggactacatcaacgacagacagtacgacagcagaggcagattcggcgagctgctgctgctgctgcccaccctgcagagcatcacctggcagatgatcgagcagatccagttcatcaagctgttcggcatggccaagatcgacaacctgctgcaggagatgctgctgggcggcagccccagcgacgccccccacgcccaccaccccctgcacccccacctgatgcaggagcacatgggcaccaacgtgatcgtggccaacaccatgcccacccacctgagcaacggccagatgtgcgagtggcccagacccagaggccaggccgccacccccgagaccccccagcccagcccccccggcggcagcggcagcgagccctacaagctgctgcccggcgccgtggccaccatcgtgaagcccctgagcgccatcccccagcccaccatcaccaagcaggaggtgatctgaggactagtccctgttcccagagcccacttttttttctttttttgaaataaaatagcctgtctttcagatctaaaaaaaaaaaaaaaaaaaaaaaaaaaaaaaaaaaaaaaaaaaaaaaaaaaaaaaaaaaaaaaaaaaaaaaaaaaaaaaaaaaaaaaaaaaaaaaaaaaa

SEQ ID NO: 4454 - RNA, 1673 nt, synthetic construct
  misc_feature 1..1673: note = mRNA a-1 (A100) (opt4) from Homo sapiens__NP_000448.3__HNF4A(1-474)(E285Q)
  source 1..1673: mol_type = other RNA
aggagagtcccgcagtcggcgtccagcggctctgcttgttcgtgtgtgtgtcgttgcaggccttattcaagcttaccatgagactgagcaagaccctggtggacatggacatggccgactacagcgccgccctggaccccgcctacaccaccctggagttcgagaacgtgcaggtgctgaccatgggcaacgacaccagccccagcgagggcaccaacctgaacgcccccaacagcctgggcgtgagcgccctgtgcgccatctgcggcgacagagccaccggcaagcactacggcgccagcagctgcgacggctgcaagggcttcttcagaagaagcgtgagaaagaaccacatgtacagctgcagattcagcagacagtgcgtggtggacaaggacaagagaaaccagtgcagatactgcagactgaagaagtgcttcagagccggcatgaagaaggaggccgtgcagaacgagagagacagaatcagcaccagaagaagcagctacgaggacagcagcctgcccagcatcaacgccctgctgcaggccgaggtgctgagcagacagatcaccagccccgtgagcggcatcaacggcgacatcagagccaagaagatcgccagcatcgccgacgtgtgcgagagcatgaaggagcagctgctggtgctggtggagtgggccaagtacatccccgccttctgcgagctgcccctggacgaccaggtggccctgctgagagcccacgccggcgagcacctgctgctgggcgccaccaagagaagcatggtgttcaaggacgtgctgctgctgggcaacgactacatcgtgcccagacactgccccgagctggccgagatgagcagagtgagcatcagaatcctggacgagctggtgctgcccttccaggagctgcagatcgacgacaaccagtacgcctacctgaaggccatcatcttcttcgaccccgacgccaagggcctgagcgaccccggcaagatcaagagactgagaagccaggtgcaggtgagcctggaggactacatcaacgacagacagtacgacagcagaggcagattcggcgagctgctgctgctgctgcccaccctgcagagcatcacctggcagatgatcgagcagatccagttcatcaagctgttcggcatggccaagatcgacaacctgctgcaggagatgctgctgggcggcagccccagcgacgccccccacgcccaccaccccctgcacccccacctgatgcaggagcacatgggcaccaacgtgatcgtggccaacaccatgcccacccacctgagcaacggccagatgtgcgagtggcccagacccagaggccaggccgccacccccgagaccccccagcccagcccccccggcggcagcggcagcgagccctacaagctgctgcccggcgccgtggccaccatcgtgaagcccctgagcgccatcccccagcccaccatcaccaagcaggaggtgatctgaggactagtccctgttcccagagcccacttttttttctttttttgaaataaaatagcctgtctttcagatctaaaaaaaaaaaaaaaaaaaaaaaaaaaaaaaaaaaaaaaaaaaaaaaaaaaaaaaaaaaaaaaaaaaaaaaaaaaaaaaaaaaaaaaaaaaaaaaaaaaa

SEQ ID NO: 4455 - RNA, 1673 nt, synthetic construct
  misc_feature 1..1673: note = mRNA a-1 (A100) (opt4) from Homo sapiens__NP_000448.3__HNF4A(1-474)(T166E)
  source 1..1673: mol_type = other RNA
aggagagtcccgcagtcggcgtccagcggctctgcttgttcgtgtgtgtgtcgttgcaggccttattcaagcttaccatgagactgagcaagaccctggtggacatggacatggccgactacagcgccgccctggaccccgcctacaccaccctggagttcgagaacgtgcaggtgctgaccatgggcaacgacaccagccccagcgagggcaccaacctgaacgcccccaacagcctgggcgtgagcgccctgtgcgccatctgcggcgacagagccaccggcaagcactacggcgccagcagctgcgacggctgcaagggcttcttcagaagaagcgtgagaaagaaccacatgtacagctgcagattcagcagacagtgcgtggtggacaaggacaagagaaaccagtgcagatactgcagactgaagaagtgcttcagagccggcatgaagaaggaggccgtgcagaacgagagagacagaatcagcaccagaagaagcagctacgaggacagcagcctgcccagcatcaacgccctgctgcaggccgaggtgctgagcagacagatcgagagccccgtgagcggcatcaacggcgacatcagagccaagaagatcgccagcatcgccgacgtgtgcgagagcatgaaggagcagctgctggtgctggtggagtgggccaagtacatccccgccttctgcgagctgcccctggacgaccaggtggccctgctgagagcccacgccggcgagcacctgctgctgggcgccaccaagagaagcatggtgttcaaggacgtgctgctgctgggcaacgactacatcgtgcccagacactgccccgagctggccgagatgagcagagtgagcatcagaatcctggacgagctggtgctgcccttccaggagctgcagatcgacgacaacgagtacgcctacctgaaggccatcatcttcttcgaccccgacgccaagggcctgagcgaccccggcaagatcaagagactgagaagccaggtgcaggtgagcctggaggactacatcaacgacagacagtacgacagcagaggcagattcggcgagctgctgctgctgctgcccaccctgcagagcatcacctggcagatgatcgagcagatccagttcatcaagctgttcggcatggccaagatcgacaacctgctgcaggagatgctgctgggcggcagccccagcgacgccccccacgcccaccaccccctgcacccccacctgatgcaggagcacatgggcaccaacgtgatcgtggccaacaccatgcccacccacctgagcaacggccagatgtgcgagtggcccagacccagaggccaggccgccacccccgagaccccccagcccagcccccccggcggcagcggcagcgagccctacaagctgctgcccggcgccgtggccaccatcgtgaagcccctgagcgccatcccccagcccaccatcaccaagcaggaggtgatctgaggactagtccctgttcccagagcccacttttttttctttttttgaaataaaatagcctgtctttcagatctaaaaaaaaaaaaaaaaaaaaaaaaaaaaaaaaaaaaaaaaaaaaaaaaaaaaaaaaaaaaaaaaaaaaaaaaaaaaaaaaaaaaaaaaaaaaaaaaaaaa

SEQ ID NO: 4456 - RNA, 1673 nt, synthetic construct
  misc_feature 1..1673: note = mRNA a-1 (A100) (opt4) from Homo sapiens__NP_000448.3__HNF4A(1-474)(S148A)
  source 1..1673: mol_type = other RNA
aggagagtcccgcagtcggcgtccagcggctctgcttgttcgtgtgtgtgtcgttgcaggccttattcaagcttaccatgagactgagcaagaccctggtggacatggacatggccgactacagcgccgccctggaccccgcctacaccaccctggagttcgagaacgtgcaggtgctgaccatgggcaacgacaccagccccagcgagggcaccaacctgaacgcccccaacagcctgggcgtgagcgccctgtgcgccatctgcggcgacagagccaccggcaagcactacggcgccagcagctgcgacggctgcaagggcttcttcagaagaagcgtgagaaagaaccacatgtacagctgcagattcagcagacagtgcgtggtggacaaggacaagagaaaccagtgcagatactgcagactgaagaagtgcttcagagccggcatgaagaaggaggccgtgcagaacgagagagacagaatcagcaccagaagaagcagctacgaggacagcgccctgcccagcatcaacgccctgctgcaggccgaggtgctgagcagacagatcaccagccccgtgagcggcatcaacggcgacatcagagccaagaagatcgccagcatcgccgacgtgtgcgagagcatgaaggagcagctgctggtgctggtggagtgggccaagtacatccccgccttctgcgagctgcccctggacgaccaggtggccctgctgagagcccacgccggcgagcacctgctgctgggcgccaccaagagaagcatggtgttcaaggacgtgctgctgctgggcaacgactacatcgtgcccagacactgccccgagctggccgagatgagcagagtgagcatcagaatcctggacgagctggtgctgcccttccaggagctgcagatcgacgacaacgagtacgcctacctgaaggccatcatcttcttcgaccccgacgccaagggcctgagcgaccccggcaagatcaagagactgagaagccaggtgcaggtgagcctggaggactacatcaacgacagacagtacgacagcagaggcagattcggcgagctgctgctgctgctgcccaccctgcagagcatcacctggcagatgatcgagcagatccagttcatcaagctgttcggcatggccaagatcgacaacctgctgcaggagatgctgctgggcggcagccccagcgacgccccccacgcccaccaccccctgcacccccacctgatgcaggagcacatgggcaccaacgtgatcgtggccaacaccatgcccacccacctgagcaacggccagatgtgcgagtggcccagacccagaggccaggccgccacccccgagaccccccagcccagcccccccggcggcagcggcagcgagccctacaagctgctgcccggcgccgtggccaccatcgtgaagcccctgagcgccatcccccagcccaccatcaccaagcaggaggtgatctgaggactagtccctgttcccagagcccacttttttttctttttttgaaataaaatagcctgtctttcagatctaaaaaaaaaaaaaaaaaaaaaaaaaaaaaaaaaaaaaaaaaaaaaaaaaaaaaaaaaaaaaaaaaaaaaaaaaaaaaaaaaaaaaaaaaaaaaaaaaaaa

SEQ ID NO: 4457 - RNA, 1673 nt, synthetic construct
  misc_feature 1..1673: note = mRNA a-1 (A100) (opt4) from Homo sapiens__NP_000448.3__HNF4A(1-474)(S148E)
  source 1..1673: mol_type = other RNA
aggagagtcccgcagtcggcgtccagcggctctgcttgttcgtgtgtgtgtcgttgcaggccttattcaagcttaccatgagactgagcaagaccctggtggacatggacatggccgactacagcgccgccctggaccccgcctacaccaccctggagttcgagaacgtgcaggtgctgaccatgggcaacgacaccagccccagcgagggcaccaacctgaacgcccccaacagcctgggcgtgagcgccctgtgcgccatctgcggcgacagagccaccggcaagcactacggcgccagcagctgcgacggctgcaagggcttcttcagaagaagcgtgagaaagaaccacatgtacagctgcagattcagcagacagtgcgtggtggacaaggacaagagaaaccagtgcagatactgcagactgaagaagtgcttcagagccggcatgaagaaggaggccgtgcagaacgagagagacagaatcagcaccagaagaagcagctacgaggacagcgagctgcccagcatcaacgccctgctgcaggccgaggtgctgagcagacagatcaccagccccgtgagcggcatcaacggcgacatcagagccaagaagatcgccagcatcgccgacgtgtgcgagagcatgaaggagcagctgctggtgctggtggagtgggccaagtacatccccgccttctgcgagctgcccctggacgaccaggtggccctgctgagagcccacgccggcgagcacctgctgctgggcgccaccaagagaagcatggtgttcaaggacgtgctgctgctgggcaacgactacatcgtgcccagacactgccccgagctggccgagatgagcagagtgagcatcagaatcctggacgagctggtgctgcccttccaggagctgcagatcgacgacaacgagtacgcctacctgaaggccatcatcttcttcgaccccgacgccaagggcctgagcgaccccggcaagatcaagagactgagaagccaggtgcaggtgagcctggaggactacatcaacgacagacagtacgacagcagaggcagattcggcgagctgctgctgctgctgcccaccctgcagagcatcacctggcagatgatcgagcagatccagttcatcaagctgttcggcatggccaagatcgacaacctgctgcaggagatgctgctgggcggcagccccagcgacgccccccacgcccaccaccccctgcacccccacctgatgcaggagcacatgggcaccaacgtgatcgtggccaacaccatgcccacccacctgagcaacggccagatgtgcgagtggcccagacccagaggccaggccgccacccccgagaccccccagcccagcccccccggcggcagcggcagcgagccctacaagctgctgcccggcgccgtggccaccatcgtgaagcccctgagcgccatcccccagcccaccatcaccaagcaggaggtgatctgaggactagtccctgttcccagagcccacttttttttctttttttgaaataaaatagcctgtctttcagatctaaaaaaaaaaaaaaaaaaaaaaaaaaaaaaaaaaaaaaaaaaaaaaaaaaaaaaaaaaaaaaaaaaaaaaaaaaaaaaaaaaaaaaaaaaaaaaaaaaaa

SEQ ID NO: 4458 - RNA, 1673 nt, synthetic construct
  misc_feature 1..1673: note = mRNA a-1 (A100) (opt4) from Homo sapiens__NP_000448.3__HNF4A(1-474)(S183A)
  source 1..1673: mol_type = other RNA
aggagagtcccgcagtcggcgtccagcggctctgcttgttcgtgtgtgtgtcgttgcaggccttattcaagcttaccatgagactgagcaagaccctggtggacatggacatggccgactacagcgccgccctggaccccgcctacaccaccctggagttcgagaacgtgcaggtgctgaccatgggcaacgacaccagccccagcgagggcaccaacctgaacgcccccaacagcctgggcgtgagcgccctgtgcgccatctgcggcgacagagccaccggcaagcactacggcgccagcagctgcgacggctgcaagggcttcttcagaagaagcgtgagaaagaaccacatgtacagctgcagattcagcagacagtgcgtggtggacaaggacaagagaaaccagtgcagatactgcagactgaagaagtgcttcagagccggcatgaagaaggaggccgtgcagaacgagagagacagaatcagcaccagaagaagcagctacgaggacagcagcctgcccagcatcaacgccctgctgcaggccgaggtgctgagcagacagatcaccagccccgtgagcggcatcaacggcgacatcagagccaagaagatcgccgccatcgccgacgtgtgcgagagcatgaaggagcagctgctggtgctggtggagtgggccaagtacatccccgccttctgcgagctgcccctggacgaccaggtggccctgctgagagcccacgccggcgagcacctgctgctgggcgccaccaagagaagcatggtgttcaaggacgtgctgctgctgggcaacgactacatcgtgcccagacactgccccgagctggccgagatgagcagagtgagcatcagaatcctggacgagctggtgctgcccttccaggagctgcagatcgacgacaacgagtacgcctacctgaaggccatcatcttcttcgaccccgacgccaagggcctgagcgaccccggcaagatcaagagactgagaagccaggtgcaggtgagcctggaggactacatcaacgacagacagtacgacagcagaggcagattcggcgagctgctgctgctgctgcccaccctgcagagcatcacctggcagatgatcgagcagatccagttcatcaagctgttcggcatggccaagatcgacaacctgctgcaggagatgctgctgggcggcagccccagcgacgccccccacgcccaccaccccctgcacccccacctgatgcaggagcacatgggcaccaacgtgatcgtggccaacaccatgcccacccacctgagcaacggccagatgtgcgagtggcccagacccagaggccaggccgccacccccgagaccccccagcccagcccccccggcggcagcggcagcgagccctacaagctgctgcccggcgccgtggccaccatcgtgaagcccctgagcgccatcccccagcccaccatcaccaagcaggaggtgatctgaggactagtccctgttcccagagcccacttttttttctttttttgaaataaaatagcctgtctttcagatctaaaaaaaaaaaaaaaaaaaaaaaaaaaaaaaaaaaaaaaaaaaaaaaaaaaaaaaaaaaaaaaaaaaaaaaaaaaaaaaaaaaaaaaaaaaaaaaaaaaa

SEQ ID NO: 4459 - RNA, 1673 nt, synthetic construct
  misc_feature 1..1673: note = mRNA a-1 (A100) (opt4) from Homo sapiens__NP_000448.3__HNF4A(1-474)(S183E)
  source 1..1673: mol_type = other RNA
aggagagtcccgcagtcggcgtccagcggctctgcttgttcgtgtgtgtgtcgttgcaggccttattcaagcttaccatgagactgagcaagaccctggtggacatggacatggccgactacagcgccgccctggaccccgcctacaccaccctggagttcgagaacgtgcaggtgctgaccatgggcaacgacaccagccccagcgagggcaccaacctgaacgcccccaacagcctgggcgtgagcgccctgtgcgccatctgcggcgacagagccaccggcaagcactacggcgccagcagctgcgacggctgcaagggcttcttcagaagaagcgtgagaaagaaccacatgtacagctgcagattcagcagacagtgcgtggtggacaaggacaagagaaaccagtgcagatactgcagactgaagaagtgcttcagagccggcatgaagaaggaggccgtgcagaacgagagagacagaatcagcaccagaagaagcagctacgaggacagcagcctgcccagcatcaacgccctgctgcaggccgaggtgctgagcagacagatcaccagccccgtgagcggcatcaacggcgacatcagagccaagaagatcgccgagatcgccgacgtgtgcgagagcatgaaggagcagctgctggtgctggtggagtgggccaagtacatccccgccttctgcgagctgcccctggacgaccaggtggccctgctgagagcccacgccggcgagcacctgctgctgggcgccaccaagagaagcatggtgttcaaggacgtgctgctgctgggcaacgactacatcgtgcccagacactgccccgagctggccgagatgagcagagtgagcatcagaatcctggacgagctggtgctgcccttccaggagctgcagatcgacgacaacgagtacgcctacctgaaggccatcatcttcttcgaccccgacgccaagggcctgagcgaccccggcaagatcaagagactgagaagccaggtgcaggtgagcctggaggactacatcaacgacagacagtacgacagcagaggcagattcggcgagctgctgctgctgctgcccaccctgcagagcatcacctggcagatgatcgagcagatccagttcatcaagctgttcggcatggccaagatcgacaacctgctgcaggagatgctgctgggcggcagccccagcgacgccccccacgcccaccaccccctgcacccccacctgatgcaggagcacatgggcaccaacgtgatcgtggccaacaccatgcccacccacctgagcaacggccagatgtgcgagtggcccagacccagaggccaggccgccacccccgagaccccccagcccagcccccccggcggcagcggcagcgagccctacaagctgctgcccggcgccgtggccaccatcgtgaagcccctgagcgccatcccccagcccaccatcaccaagcaggaggtgatctgaggactagtccctgttcccagagcccacttttttttctttttttgaaataaaatagcctgtctttcagatctaaaaaaaaaaaaaaaaaaaaaaaaaaaaaaaaaaaaaaaaaaaaaaaaaaaaaaaaaaaaaaaaaaaaaaaaaaaaaaaaaaaaaaaaaaaaaaaaaaaa

SEQ ID NO: 4460 - RNA, 1673 nt, synthetic construct
  misc_feature 1..1673: note = mRNA a-1 (A100) (opt4) from Homo sapiens__NP_000448.3__HNF4A(1-474)(S461A)
  source 1..1673: mol_type = other RNA
aggagagtcccgcagtcggcgtccagcggctctgcttgttcgtgtgtgtgtcgttgcaggccttattcaagcttaccatgagactgagcaagaccctggtggacatggacatggccgactacagcgccgccctggaccccgcctacaccaccctggagttcgagaacgtgcaggtgctgaccatgggcaacgacaccagccccagcgagggcaccaacctgaacgcccccaacagcctgggcgtgagcgccctgtgcgccatctgcggcgacagagccaccggcaagcactacggcgccagcagctgcgacggctgcaagggcttcttcagaagaagcgtgagaaagaaccacatgtacagctgcagattcagcagacagtgcgtggtggacaaggacaagagaaaccagtgcagatactgcagactgaagaagtgcttcagagccggcatgaagaaggaggccgtgcagaacgagagagacagaatcagcaccagaagaagcagctacgaggacagcagcctgcccagcatcaacgccctgctgcaggccgaggtgctgagcagacagatcaccagccccgtgagcggcatcaacggcgacatcagagccaagaagatcgccagcatcgccgacgtgtgcgagagcatgaaggagcagctgctggtgctggtggagtgggccaagtacatccccgccttctgcgagctgcccctggacgaccaggtggccctgctgagagcccacgccggcgagcacctgctgctgggcgccaccaagagaagcatggtgttcaaggacgtgctgctgctgggcaacgactacatcgtgcccagacactgccccgagctggccgagatgagcagagtgagcatcagaatcctggacgagctggtgctgcccttccaggagctgcagatcgacgacaacgagtacgcctacctgaaggccatcatcttcttcgaccccgacgccaagggcctgagcgaccccggcaagatcaagagactgagaagccaggtgcaggtgagcctggaggactacatcaacgacagacagtacgacagcagaggcagattcggcgagctgctgctgctgctgcccaccctgcagagcatcacctggcagatgatcgagcagatccagttcatcaagctgttcggcatggccaagatcgacaacctgctgcaggagatgctgctgggcggcagccccagcgacgccccccacgcccaccaccccctgcacccccacctgatgcaggagcacatgggcaccaacgtgatcgtggccaacaccatgcccacccacctgagcaacggccagatgtgcgagtggcccagacccagaggccaggccgccacccccgagaccccccagcccagcccccccggcggcagcggcagcgagccctacaagctgctgcccggcgccgtggccaccatcgtgaagcccctggccgccatcccccagcccaccatcaccaagcaggaggtgatctgaggactagtccctgttcccagagcccacttttttttctttttttgaaataaaatagcctgtctttcagatctaaaaaaaaaaaaaaaaaaaaaaaaaaaaaaaaaaaaaaaaaaaaaaaaaaaaaaaaaaaaaaaaaaaaaaaaaaaaaaaaaaaaaaaaaaaaaaaaaaaa

SEQ ID NO: 4461 - RNA, 1673 nt, synthetic construct
  misc_feature 1..1673: note = mRNA a-1 (A100) (opt4) from Homo sapiens__NP_000448.3__HNF4A(1-474)(S461E)
  source 1..1673: mol_type = other RNA
aggagagtcccgcagtcggcgtccagcggctctgcttgttcgtgtgtgtgtcgttgcaggccttattcaagcttaccatgagactgagcaagaccctggtggacatggacatggccgactacagcgccgccctggaccccgcctacaccaccctggagttcgagaacgtgcaggtgctgaccatgggcaacgacaccagccccagcgagggcaccaacctgaacgcccccaacagcctgggcgtgagcgccctgtgcgccatctgcggcgacagagccaccggcaagcactacggcgccagcagctgcgacggctgcaagggcttcttcagaagaagcgtgagaaagaaccacatgtacagctgcagattcagcagacagtgcgtggtggacaaggacaagagaaaccagtgcagatactgcagactgaagaagtgcttcagagccggcatgaagaaggaggccgtgcagaacgagagagacagaatcagcaccagaagaagcagctacgaggacagcagcctgcccagcatcaacgccctgctgcaggccgaggtgctgagcagacagatcaccagccccgtgagcggcatcaacggcgacatcagagccaagaagatcgccagcatcgccgacgtgtgcgagagcatgaaggagcagctgctggtgctggtggagtgggccaagtacatccccgccttctgcgagctgcccctggacgaccaggtggccctgctgagagcccacgccggcgagcacctgctgctgggcgccaccaagagaagcatggtgttcaaggacgtgctgctgctgggcaacgactacatcgtgcccagacactgccccgagctggccgagatgagcagagtgagcatcagaatcctggacgagctggtgctgcccttccaggagctgcagatcgacgacaacgagtacgcctacctgaaggccatcatcttcttcgaccccgacgccaagggcctgagcgaccccggcaagatcaagagactgagaagccaggtgcaggtgagcctggaggactacatcaacgacagacagtacgacagcagaggcagattcggcgagctgctgctgctgctgcccaccctgcagagcatcacctggcagatgatcgagcagatccagttcatcaagctgttcggcatggccaagatcgacaacctgctgcaggagatgctgctgggcggcagccccagcgacgccccccacgcccaccaccccctgcacccccacctgatgcaggagcacatgggcaccaacgtgatcgtggccaacaccatgcccacccacctgagcaacggccagatgtgcgagtggcccagacccagaggccaggccgccacccccgagaccccccagcccagcccccccggcggcagcggcagcgagccctacaagctgctgcccggcgccgtggccaccatcgtgaagcccctggaggccatcccccagcccaccatcaccaagcaggaggtgatctgaggactagtccctgttcccagagcccacttttttttctttttttgaaataaaatagcctgtctttcagatctaaaaaaaaaaaaaaaaaaaaaaaaaaaaaaaaaaaaaaaaaaaaaaaaaaaaaaaaaaaaaaaaaaaaaaaaaaaaaaaaaaaaaaaaaaaaaaaaaaaa

SEQ ID NO: 4462 - RNA, 1673 nt, synthetic construct
  misc_feature 1..1673: note = mRNA a-1 (A100) (opt4) from Homo sapiens__NP_000448.3__HNF4A(1-474)(S142A_S143A_S313A)
  source 1..1673: mol_type = other RNA
aggagagtcccgcagtcggcgtccagcggctctgcttgttcgtgtgtgtgtcgttgcaggccttattcaagcttaccatgagactgagcaagaccctggtggacatggacatggccgactacagcgccgccctggaccccgcctacaccaccctggagttcgagaacgtgcaggtgctgaccatgggcaacgacaccagccccagcgagggcaccaacctgaacgcccccaacagcctgggcgtgagcgccctgtgcgccatctgcggcgacagagccaccggcaagcactacggcgccagcagctgcgacggctgcaagggcttcttcagaagaagcgtgagaaagaaccacatgtacagctgcagattcagcagacagtgcgtggtggacaaggacaagagaaaccagtgcagatactgcagactgaagaagtgcttcagagccggcatgaagaaggaggccgtgcagaacgagagagacagaatcagcaccagaagagccgcctacgaggacagcagcctgcccagcatcaacgccctgctgcaggccgaggtgctgagcagacagatcaccagccccgtgagcggcatcaacggcgacatcagagccaagaagatcgccagcatcgccgacgtgtgcgagagcatgaaggagcagctgctggtgctggtggagtgggccaagtacatccccgccttctgcgagctgcccctggacgaccaggtggccctgctgagagcccacgccggcgagcacctgctgctgggcgccaccaagagaagcatggtgttcaaggacgtgctgctgctgggcaacgactacatcgtgcccagacactgccccgagctggccgagatgagcagagtgagcatcagaatcctggacgagctggtgctgcccttccaggagctgcagatcgacgacaacgagtacgcctacctgaaggccatcatcttcttcgaccccgacgccaagggcctgagcgaccccggcaagatcaagagactgagagcccaggtgcaggtgagcctggaggactacatcaacgacagacagtacgacagcagaggcagattcggcgagctgctgctgctgctgcccaccctgcagagcatcacctggcagatgatcgagcagatccagttcatcaagctgttcggcatggccaagatcgacaacctgctgcaggagatgctgctgggcggcagccccagcgacgccccccacgcccaccaccccctgcacccccacctgatgcaggagcacatgggcaccaacgtgatcgtggccaacaccatgcccacccacctgagcaacggccagatgtgcgagtggcccagacccagaggccaggccgccacccccgagaccccccagcccagcccccccggcggcagcggcagcgagccctacaagctgctgcccggcgccgtggccaccatcgtgaagcccctgagcgccatcccccagcccaccatcaccaagcaggaggtgatctgaggactagtccctgttcccagagcccacttttttttctttttttgaaataaaatagcctgtctttcagatctaaaaaaaaaaaaaaaaaaaaaaaaaaaaaaaaaaaaaaaaaaaaaaaaaaaaaaaaaaaaaaaaaaaaaaaaaaaaaaaaaaaaaaaaaaaaaaaaaaaa

SEQ ID NO: 4463 - RNA, 1673 nt, synthetic construct
  misc_feature 1..1673: note = mRNA a-1 (A100) (opt4) from Homo sapiens__NP_000448.3__HNF4A(1-474)(S142A_S143A_S313A_K458R)
  source 1..1673: mol_type = other RNA
aggagagtcccgcagtcggcgtccagcggctctgcttgttcgtgtgtgtgtcgttgcaggccttattcaagcttaccatgagactgagcaagaccctggtggacatggacatggccgactacagcgccgccctggaccccgcctacaccaccctggagttcgagaacgtgcaggtgctgaccatgggcaacgacaccagccccagcgagggcaccaacctgaacgcccccaacagcctgggcgtgagcgccctgtgcgccatctgcggcgacagagccaccggcaagcactacggcgccagcagctgcgacggctgcaagggcttcttcagaagaagcgtgagaaagaaccacatgtacagctgcagattcagcagacagtgcgtggtggacaaggacaagagaaaccagtgcagatactgcagactgaagaagtgcttcagagccggcatgaagaaggaggccgtgcagaacgagagagacagaatcagcaccagaagagccgcctacgaggacagcagcctgcccagcatcaacgccctgctgcaggccgaggtgctgagcagacagatcaccagccccgtgagcggcatcaacggcgacatcagagccaagaagatcgccagcatcgccgacgtgtgcgagagcatgaaggagcagctgctggtgctggtggagtgggccaagtacatccccgccttctgcgagctgcccctggacgaccaggtggccctgctgagagcccacgccggcgagcacctgctgctgggcgccaccaagagaagcatggtgttcaaggacgtgctgctgctgggcaacgactacatcgtgcccagacactgccccgagctggccgagatgagcagagtgagcatcagaatcctggacgagctggtgctgcccttccaggagctgcagatcgacgacaacgagtacgcctacctgaaggccatcatcttcttcgaccccgacgccaagggcctgagcgaccccggcaagatcaagagactgagagcccaggtgcaggtgagcctggaggactacatcaacgacagacagtacgacagcagaggcagattcggcgagctgctgctgctgctgcccaccctgcagagcatcacctggcagatgatcgagcagatccagttcatcaagctgttcggcatggccaagatcgacaacctgctgcaggagatgctgctgggcggcagccccagcgacgccccccacgcccaccaccccctgcacccccacctgatgcaggagcacatgggcaccaacgtgatcgtggccaacaccatgcccacccacctgagcaacggccagatgtgcgagtggcccagacccagaggccaggccgccacccccgagaccccccagcccagcccccccggcggcagcggcagcgagccctacaagctgctgcccggcgccgtggccaccatcgtgagacccctgagcgccatcccccagcccaccatcaccaagcaggaggtgatctgaggactagtccctgttcccagagcccacttttttttctttttttgaaataaaatagcctgtctttcagatctaaaaaaaaaaaaaaaaaaaaaaaaaaaaaaaaaaaaaaaaaaaaaaaaaaaaaaaaaaaaaaaaaaaaaaaaaaaaaaaaaaaaaaaaaaaaaaaaaaaa

SEQ ID NO: 4464 - RNA, 1673 nt, synthetic construct
  misc_feature 1..1673: note = mRNA a-1 (A100) (opt4) from Homo sapiens__NP_000448.3__HNF4A(1-474)(S142A_S143A_S167A_S313A_ S378A_T429A_T432A_S436A_K458R)
  source 1..1673: mol_type = other RNA
aggagagtcccgcagtcggcgtccagcggctctgcttgttcgtgtgtgtgtcgttgcaggccttattcaagcttaccatgagactgagcaagaccctggtggacatggacatggccgactacagcgccgccctggaccccgcctacaccaccctggagttcgagaacgtgcaggtgctgaccatgggcaacgacaccagccccagcgagggcaccaacctgaacgcccccaacagcctgggcgtgagcgccctgtgcgccatctgcggcgacagagccaccggcaagcactacggcgccagcagctgcgacggctgcaagggcttcttcagaagaagcgtgagaaagaaccacatgtacagctgcagattcagcagacagtgcgtggtggacaaggacaagagaaaccagtgcagatactgcagactgaagaagtgcttcagagccggcatgaagaaggaggccgtgcagaacgagagagacagaatcagcaccagaagagccgcctacgaggacagcagcctgcccagcatcaacgccctgctgcaggccgaggtgctgagcagacagatcaccgcccccgtgagcggcatcaacggcgacatcagagccaagaagatcgccagcatcgccgacgtgtgcgagagcatgaaggagcagctgctggtgctggtggagtgggccaagtacatccccgccttctgcgagctgcccctggacgaccaggtggccctgctgagagcccacgccggcgagcacctgctgctgggcgccaccaagagaagcatggtgttcaaggacgtgctgctgctgggcaacgactacatcgtgcccagacactgccccgagctggccgagatgagcagagtgagcatcagaatcctggacgagctggtgctgcccttccaggagctgcagatcgacgacaacgagtacgcctacctgaaggccatcatcttcttcgaccccgacgccaagggcctgagcgaccccggcaagatcaagagactgagagcccaggtgcaggtgagcctggaggactacatcaacgacagacagtacgacagcagaggcagattcggcgagctgctgctgctgctgcccaccctgcagagcatcacctggcagatgatcgagcagatccagttcatcaagctgttcggcatggccaagatcgacaacctgctgcaggagatgctgctgggcggcgcccccagcgacgccccccacgcccaccaccccctgcacccccacctgatgcaggagcacatgggcaccaacgtgatcgtggccaacaccatgcccacccacctgagcaacggccagatgtgcgagtggcccagacccagaggccaggccgccgcccccgaggccccccagcccgccccccccggcggcagcggcagcgagccctacaagctgctgcccggcgccgtggccaccatcgtgagacccctgagcgccatcccccagcccaccatcaccaagcaggaggtgatctgaggactagtccctgttcccagagcccacttttttttctttttttgaaataaaatagcctgtctttcagatctaaaaaaaaaaaaaaaaaaaaaaaaaaaaaaaaaaaaaaaaaaaaaaaaaaaaaaaaaaaaaaaaaaaaaaaaaaaaaaaaaaaaaaaaaaaaaaaaaaaa

SEQ ID NO: 4465 - RNA, 1673 nt, synthetic construct
  misc_feature 1..1673: note = mRNA a-1 (A100) (opt4) from Homo sapiens__NP_000448.3__HNF4A(1-474)(S142A_S143A_S148A_S167A_ S313A_S378A_T429A_T432A_S436A_K458R)
  source 1..1673: mol_type = other RNA
aggagagtcccgcagtcggcgtccagcggctctgcttgttcgtgtgtgtgtcgttgcaggccttattcaagcttaccatgagactgagcaagaccctggtggacatggacatggccgactacagcgccgccctggaccccgcctacaccaccctggagttcgagaacgtgcaggtgctgaccatgggcaacgacaccagccccagcgagggcaccaacctgaacgcccccaacagcctgggcgtgagcgccctgtgcgccatctgcggcgacagagccaccggcaagcactacggcgccagcagctgcgacggctgcaagggcttcttcagaagaagcgtgagaaagaaccacatgtacagctgcagattcagcagacagtgcgtggtggacaaggacaagagaaaccagtgcagatactgcagactgaagaagtgcttcagagccggcatgaagaaggaggccgtgcagaacgagagagacagaatcagcaccagaagagccgcctacgaggacagcgccctgcccagcatcaacgccctgctgcaggccgaggtgctgagcagacagatcaccgcccccgtgagcggcatcaacggcgacatcagagccaagaagatcgccagcatcgccgacgtgtgcgagagcatgaaggagcagctgctggtgctggtggagtgggccaagtacatccccgccttctgcgagctgcccctggacgaccaggtggccctgctgagagcccacgccggcgagcacctgctgctgggcgccaccaagagaagcatggtgttcaaggacgtgctgctgctgggcaacgactacatcgtgcccagacactgccccgagctggccgagatgagcagagtgagcatcagaatcctggacgagctggtgctgcccttccaggagctgcagatcgacgacaacgagtacgcctacctgaaggccatcatcttcttcgaccccgacgccaagggcctgagcgaccccggcaagatcaagagactgagagcccaggtgcaggtgagcctggaggactacatcaacgacagacagtacgacagcagaggcagattcggcgagctgctgctgctgctgcccaccctgcagagcatcacctggcagatgatcgagcagatccagttcatcaagctgttcggcatggccaagatcgacaacctgctgcaggagatgctgctgggcggcgcccccagcgacgccccccacgcccaccaccccctgcacccccacctgatgcaggagcacatgggcaccaacgtgatcgtggccaacaccatgcccacccacctgagcaacggccagatgtgcgagtggcccagacccagaggccaggccgccgcccccgaggccccccagcccgccccccccggcggcagcggcagcgagccctacaagctgctgcccggcgccgtggccaccatcgtgagacccctgagcgccatcccccagcccaccatcaccaagcaggaggtgatctgaggactagtccctgttcccagagcccacttttttttctttttttgaaataaaatagcctgtctttcagatctaaaaaaaaaaaaaaaaaaaaaaaaaaaaaaaaaaaaaaaaaaaaaaaaaaaaaaaaaaaaaaaaaaaaaaaaaaaaaaaaaaaaaaaaaaaaaaaaaaaa

SEQ ID NO: 4466 - RNA, 1673 nt, synthetic construct
  misc_feature 1..1673: note = mRNA a-1 (A100) (opt4) from Homo sapiens__NP_000448.3__HNF4A(1-474)(K106R_K108R_K126R_K127R_ S142A_S143A_S148A_S167A_S313A_S378A_T429A_T432A_S436A_K458R )
  source 1..1673: mol_type = other RNA
aggagagtcccgcagtcggcgtccagcggctctgcttgttcgtgtgtgtgtcgttgcaggccttattcaagcttaccatgagactgagcaagaccctggtggacatggacatggccgactacagcgccgccctggaccccgcctacaccaccctggagttcgagaacgtgcaggtgctgaccatgggcaacgacaccagccccagcgagggcaccaacctgaacgcccccaacagcctgggcgtgagcgccctgtgcgccatctgcggcgacagagccaccggcaagcactacggcgccagcagctgcgacggctgcaagggcttcttcagaagaagcgtgagaaagaaccacatgtacagctgcagattcagcagacagtgcgtggtggacagagacagaagaaaccagtgcagatactgcagactgaagaagtgcttcagagccggcatgagaagagaggccgtgcagaacgagagagacagaatcagcaccagaagagccgcctacgaggacagcgccctgcccagcatcaacgccctgctgcaggccgaggtgctgagcagacagatcaccgcccccgtgagcggcatcaacggcgacatcagagccaagaagatcgccagcatcgccgacgtgtgcgagagcatgaaggagcagctgctggtgctggtggagtgggccaagtacatccccgccttctgcgagctgcccctggacgaccaggtggccctgctgagagcccacgccggcgagcacctgctgctgggcgccaccaagagaagcatggtgttcaaggacgtgctgctgctgggcaacgactacatcgtgcccagacactgccccgagctggccgagatgagcagagtgagcatcagaatcctggacgagctggtgctgcccttccaggagctgcagatcgacgacaacgagtacgcctacctgaaggccatcatcttcttcgaccccgacgccaagggcctgagcgaccccggcaagatcaagagactgagagcccaggtgcaggtgagcctggaggactacatcaacgacagacagtacgacagcagaggcagattcggcgagctgctgctgctgctgcccaccctgcagagcatcacctggcagatgatcgagcagatccagttcatcaagctgttcggcatggccaagatcgacaacctgctgcaggagatgctgctgggcggcgcccccagcgacgccccccacgcccaccaccccctgcacccccacctgatgcaggagcacatgggcaccaacgtgatcgtggccaacaccatgcccacccacctgagcaacggccagatgtgcgagtggcccagacccagaggccaggccgccgcccccgaggccccccagcccgccccccccggcggcagcggcagcgagccctacaagctgctgcccggcgccgtggccaccatcgtgagacccctgagcgccatcccccagcccaccatcaccaagcaggaggtgatctgaggactagtccctgttcccagagcccacttttttttctttttttgaaataaaatagcctgtctttcagatctaaaaaaaaaaaaaaaaaaaaaaaaaaaaaaaaaaaaaaaaaaaaaaaaaaaaaaaaaaaaaaaaaaaaaaaaaaaaaaaaaaaaaaaaaaaaaaaaaaaa

SEQ ID NO: 4467 - RNA, 1673 nt, synthetic construct
  misc_feature 1..1673: note = mRNA a-1 (A100) (opt4) from Homo sapiens__NP_000448.3__HNF4A(1-474)(S142A_S143A_S148A_T166A_ S167A_S313A_S378A_T429A_T432A_S436A_K458R)
  source 1..1673: mol_type = other RNA
aggagagtcccgcagtcggcgtccagcggctctgcttgttcgtgtgtgtgtcgttgcaggccttattcaagcttaccatgagactgagcaagaccctggtggacatggacatggccgactacagcgccgccctggaccccgcctacaccaccctggagttcgagaacgtgcaggtgctgaccatgggcaacgacaccagccccagcgagggcaccaacctgaacgcccccaacagcctgggcgtgagcgccctgtgcgccatctgcggcgacagagccaccggcaagcactacggcgccagcagctgcgacggctgcaagggcttcttcagaagaagcgtgagaaagaaccacatgtacagctgcagattcagcagacagtgcgtggtggacaaggacaagagaaaccagtgcagatactgcagactgaagaagtgcttcagagccggcatgaagaaggaggccgtgcagaacgagagagacagaatcagcaccagaagagccgcctacgaggacagcgccctgcccagcatcaacgccctgctgcaggccgaggtgctgagcagacagatcgccgcccccgtgagcggcatcaacggcgacatcagagccaagaagatcgccagcatcgccgacgtgtgcgagagcatgaaggagcagctgctggtgctggtggagtgggccaagtacatccccgccttctgcgagctgcccctggacgaccaggtggccctgctgagagcccacgccggcgagcacctgctgctgggcgccaccaagagaagcatggtgttcaaggacgtgctgctgctgggcaacgactacatcgtgcccagacactgccccgagctggccgagatgagcagagtgagcatcagaatcctggacgagctggtgctgcccttccaggagctgcagatcgacgacaacgagtacgcctacctgaaggccatcatcttcttcgaccccgacgccaagggcctgagcgaccccggcaagatcaagagactgagagcccaggtgcaggtgagcctggaggactacatcaacgacagacagtacgacagcagaggcagattcggcgagctgctgctgctgctgcccaccctgcagagcatcacctggcagatgatcgagcagatccagttcatcaagctgttcggcatggccaagatcgacaacctgctgcaggagatgctgctgggcggcgcccccagcgacgccccccacgcccaccaccccctgcacccccacctgatgcaggagcacatgggcaccaacgtgatcgtggccaacaccatgcccacccacctgagcaacggccagatgtgcgagtggcccagacccagaggccaggccgccgcccccgaggccccccagcccgccccccccggcggcagcggcagcgagccctacaagctgctgcccggcgccgtggccaccatcgtgagacccctgagcgccatcccccagcccaccatcaccaagcaggaggtgatctgaggactagtccctgttcccagagcccacttttttttctttttttgaaataaaatagcctgtctttcagatctaaaaaaaaaaaaaaaaaaaaaaaaaaaaaaaaaaaaaaaaaaaaaaaaaaaaaaaaaaaaaaaaaaaaaaaaaaaaaaaaaaaaaaaaaaaaaaaaaaaa

SEQ ID NO: 4468 - RNA, 1673 nt, synthetic construct
  misc_feature 1..1673: note = mRNA a-1 (A100) (opt4) from Homo sapiens__NP_000448.3__HNF4A(1-474)(S87A_S142A_S143A_S148A_T 166A_S167A_S313A_S378A_T429A_T432A_S436A_K458R)
  source 1..1673: mol_type = other RNA
aggagagtcccgcagtcggcgtccagcggctctgcttgttcgtgtgtgtgtcgttgcaggccttattcaagcttaccatgagactgagcaagaccctggtggacatggacatggccgactacagcgccgccctggaccccgcctacaccaccctggagttcgagaacgtgcaggtgctgaccatgggcaacgacaccagccccagcgagggcaccaacctgaacgcccccaacagcctgggcgtgagcgccctgtgcgccatctgcggcgacagagccaccggcaagcactacggcgccagcagctgcgacggctgcaagggcttcttcagaagagccgtgagaaagaaccacatgtacagctgcagattcagcagacagtgcgtggtggacaaggacaagagaaaccagtgcagatactgcagactgaagaagtgcttcagagccggcatgaagaaggaggccgtgcagaacgagagagacagaatcagcaccagaagagccgcctacgaggacagcgccctgcccagcatcaacgccctgctgcaggccgaggtgctgagcagacagatcgccgcccccgtgagcggcatcaacggcgacatcagagccaagaagatcgccagcatcgccgacgtgtgcgagagcatgaaggagcagctgctggtgctggtggagtgggccaagtacatccccgccttctgcgagctgcccctggacgaccaggtggccctgctgagagcccacgccggcgagcacctgctgctgggcgccaccaagagaagcatggtgttcaaggacgtgctgctgctgggcaacgactacatcgtgcccagacactgccccgagctggccgagatgagcagagtgagcatcagaatcctggacgagctggtgctgcccttccaggagctgcagatcgacgacaacgagtacgcctacctgaaggccatcatcttcttcgaccccgacgccaagggcctgagcgaccccggcaagatcaagagactgagagcccaggtgcaggtgagcctggaggactacatcaacgacagacagtacgacagcagaggcagattcggcgagctgctgctgctgctgcccaccctgcagagcatcacctggcagatgatcgagcagatccagttcatcaagctgttcggcatggccaagatcgacaacctgctgcaggagatgctgctgggcggcgcccccagcgacgccccccacgcccaccaccccctgcacccccacctgatgcaggagcacatgggcaccaacgtgatcgtggccaacaccatgcccacccacctgagcaacggccagatgtgcgagtggcccagacccagaggccaggccgccgcccccgaggccccccagcccgccccccccggcggcagcggcagcgagccctacaagctgctgcccggcgccgtggccaccatcgtgagacccctgagcgccatcccccagcccaccatcaccaagcaggaggtgatctgaggactagtccctgttcccagagcccacttttttttctttttttgaaataaaatagcctgtctttcagatctaaaaaaaaaaaaaaaaaaaaaaaaaaaaaaaaaaaaaaaaaaaaaaaaaaaaaaaaaaaaaaaaaaaaaaaaaaaaaaaaaaaaaaaaaaaaaaaaaaaa

SEQ ID NO: 4469 - RNA, 1673 nt, synthetic construct
  misc_feature 1..1673: note = mRNA a-1 (A100) (opt4) from Homo sapiens__NP_000448.3__HNF4A(1-474)(S87A_K106R_K108R_K126R_K 127R_S142A_S143A_S148A_T166A_S167A_S313A_S378A_T429A_T432A_ S436A_K458R)
  source 1..1673: mol_type = other RNA
aggagagtcccgcagtcggcgtccagcggctctgcttgttcgtgtgtgtgtcgttgcaggccttattcaagcttaccatgagactgagcaagaccctggtggacatggacatggccgactacagcgccgccctggaccccgcctacaccaccctggagttcgagaacgtgcaggtgctgaccatgggcaacgacaccagccccagcgagggcaccaacctgaacgcccccaacagcctgggcgtgagcgccctgtgcgccatctgcggcgacagagccaccggcaagcactacggcgccagcagctgcgacggctgcaagggcttcttcagaagagccgtgagaaagaaccacatgtacagctgcagattcagcagacagtgcgtggtggacagagacagaagaaaccagtgcagatactgcagactgaagaagtgcttcagagccggcatgagaagagaggccgtgcagaacgagagagacagaatcagcaccagaagagccgcctacgaggacagcgccctgcccagcatcaacgccctgctgcaggccgaggtgctgagcagacagatcgccgcccccgtgagcggcatcaacggcgacatcagagccaagaagatcgccagcatcgccgacgtgtgcgagagcatgaaggagcagctgctggtgctggtggagtgggccaagtacatccccgccttctgcgagctgcccctggacgaccaggtggccctgctgagagcccacgccggcgagcacctgctgctgggcgccaccaagagaagcatggtgttcaaggacgtgctgctgctgggcaacgactacatcgtgcccagacactgccccgagctggccgagatgagcagagtgagcatcagaatcctggacgagctggtgctgcccttccaggagctgcagatcgacgacaacgagtacgcctacctgaaggccatcatcttcttcgaccccgacgccaagggcctgagcgaccccggcaagatcaagagactgagagcccaggtgcaggtgagcctggaggactacatcaacgacagacagtacgacagcagaggcagattcggcgagctgctgctgctgctgcccaccctgcagagcatcacctggcagatgatcgagcagatccagttcatcaagctgttcggcatggccaagatcgacaacctgctgcaggagatgctgctgggcggcgcccccagcgacgccccccacgcccaccaccccctgcacccccacctgatgcaggagcacatgggcaccaacgtgatcgtggccaacaccatgcccacccacctgagcaacggccagatgtgcgagtggcccagacccagaggccaggccgccgcccccgaggccccccagcccgccccccccggcggcagcggcagcgagccctacaagctgctgcccggcgccgtggccaccatcgtgagacccctgagcgccatcccccagcccaccatcaccaagcaggaggtgatctgaggactagtccctgttcccagagcccacttttttttctttttttgaaataaaatagcctgtctttcagatctaaaaaaaaaaaaaaaaaaaaaaaaaaaaaaaaaaaaaaaaaaaaaaaaaaaaaaaaaaaaaaaaaaaaaaaaaaaaaaaaaaaaaaaaaaaaaaaaaaaa

SEQ ID NO: 4470 - RNA, 1673 nt, synthetic construct
  misc_feature 1..1673: note = mRNA a-1 (A100) (opt4) from Homo sapiens__NP_000448.3__HNF4A(1-474)(S87A_K106R_K108R_K126R_K 127R)
  source 1..1673: mol_type = other RNA
aggagagtcccgcagtcggcgtccagcggctctgcttgttcgtgtgtgtgtcgttgcaggccttattcaagcttaccatgagactgagcaagaccctggtggacatggacatggccgactacagcgccgccctggaccccgcctacaccaccctggagttcgagaacgtgcaggtgctgaccatgggcaacgacaccagccccagcgagggcaccaacctgaacgcccccaacagcctgggcgtgagcgccctgtgcgccatctgcggcgacagagccaccggcaagcactacggcgccagcagctgcgacggctgcaagggcttcttcagaagagccgtgagaaagaaccacatgtacagctgcagattcagcagacagtgcgtggtggacagagacagaagaaaccagtgcagatactgcagactgaagaagtgcttcagagccggcatgagaagagaggccgtgcagaacgagagagacagaatcagcaccagaagaagcagctacgaggacagcagcctgcccagcatcaacgccctgctgcaggccgaggtgctgagcagacagatcaccagccccgtgagcggcatcaacggcgacatcagagccaagaagatcgccagcatcgccgacgtgtgcgagagcatgaaggagcagctgctggtgctggtggagtgggccaagtacatccccgccttctgcgagctgcccctggacgaccaggtggccctgctgagagcccacgccggcgagcacctgctgctgggcgccaccaagagaagcatggtgttcaaggacgtgctgctgctgggcaacgactacatcgtgcccagacactgccccgagctggccgagatgagcagagtgagcatcagaatcctggacgagctggtgctgcccttccaggagctgcagatcgacgacaacgagtacgcctacctgaaggccatcatcttcttcgaccccgacgccaagggcctgagcgaccccggcaagatcaagagactgagaagccaggtgcaggtgagcctggaggactacatcaacgacagacagtacgacagcagaggcagattcggcgagctgctgctgctgctgcccaccctgcagagcatcacctggcagatgatcgagcagatccagttcatcaagctgttcggcatggccaagatcgacaacctgctgcaggagatgctgctgggcggcagccccagcgacgccccccacgcccaccaccccctgcacccccacctgatgcaggagcacatgggcaccaacgtgatcgtggccaacaccatgcccacccacctgagcaacggccagatgtgcgagtggcccagacccagaggccaggccgccacccccgagaccccccagcccagcccccccggcggcagcggcagcgagccctacaagctgctgcccggcgccgtggccaccatcgtgaagcccctgagcgccatcccccagcccaccatcaccaagcaggaggtgatctgaggactagtccctgttcccagagcccacttttttttctttttttgaaataaaatagcctgtctttcagatctaaaaaaaaaaaaaaaaaaaaaaaaaaaaaaaaaaaaaaaaaaaaaaaaaaaaaaaaaaaaaaaaaaaaaaaaaaaaaaaaaaaaaaaaaaaaaaaaaaaa

SEQ ID NO: 4471 - RNA, 1673 nt, synthetic construct
  misc_feature 1..1673: note = mRNA a-1 (A100) (opt4) from Homo sapiens__NP_000448.3__HNF4A(1-474)(S87A_K106R_K108R_K126R_K 127R_S142A_S143A_S148A_T166A_S167A_S313A_S378A_T429A_T432A_ S436A_K458R_S461A)
  source 1..1673: mol_type = other RNA
aggagagtcccgcagtcggcgtccagcggctctgcttgttcgtgtgtgtgtcgttgcaggccttattcaagcttaccatgagactgagcaagaccctggtggacatggacatggccgactacagcgccgccctggaccccgcctacaccaccctggagttcgagaacgtgcaggtgctgaccatgggcaacgacaccagccccagcgagggcaccaacctgaacgcccccaacagcctgggcgtgagcgccctgtgcgccatctgcggcgacagagccaccggcaagcactacggcgccagcagctgcgacggctgcaagggcttcttcagaagagccgtgagaaagaaccacatgtacagctgcagattcagcagacagtgcgtggtggacagagacagaagaaaccagtgcagatactgcagactgaagaagtgcttcagagccggcatgagaagagaggccgtgcagaacgagagagacagaatcagcaccagaagagccgcctacgaggacagcgccctgcccagcatcaacgccctgctgcaggccgaggtgctgagcagacagatcgccgcccccgtgagcggcatcaacggcgacatcagagccaagaagatcgccagcatcgccgacgtgtgcgagagcatgaaggagcagctgctggtgctggtggagtgggccaagtacatccccgccttctgcgagctgcccctggacgaccaggtggccctgctgagagcccacgccggcgagcacctgctgctgggcgccaccaagagaagcatggtgttcaaggacgtgctgctgctgggcaacgactacatcgtgcccagacactgccccgagctggccgagatgagcagagtgagcatcagaatcctggacgagctggtgctgcccttccaggagctgcagatcgacgacaacgagtacgcctacctgaaggccatcatcttcttcgaccccgacgccaagggcctgagcgaccccggcaagatcaagagactgagagcccaggtgcaggtgagcctggaggactacatcaacgacagacagtacgacagcagaggcagattcggcgagctgctgctgctgctgcccaccctgcagagcatcacctggcagatgatcgagcagatccagttcatcaagctgttcggcatggccaagatcgacaacctgctgcaggagatgctgctgggcggcgcccccagcgacgccccccacgcccaccaccccctgcacccccacctgatgcaggagcacatgggcaccaacgtgatcgtggccaacaccatgcccacccacctgagcaacggccagatgtgcgagtggcccagacccagaggccaggccgccgcccccgaggccccccagcccgccccccccggcggcagcggcagcgagccctacaagctgctgcccggcgccgtggccaccatcgtgagacccctggccgccatcccccagcccaccatcaccaagcaggaggtgatctgaggactagtccctgttcccagagcccacttttttttctttttttgaaataaaatagcctgtctttcagatctaaaaaaaaaaaaaaaaaaaaaaaaaaaaaaaaaaaaaaaaaaaaaaaaaaaaaaaaaaaaaaaaaaaaaaaaaaaaaaaaaaaaaaaaaaaaaaaaaaaa

SEQ ID NO: 4472 - RNA, 1673 nt, synthetic construct
  misc_feature 1..1673: note = mRNA a-1 (A100) (opt4) from Homo sapiens__NP_000448.3__HNF4A(1-474)(S87A_K106R_K108R_K126R_K 127R_S142A_S143A_S148A_T166A_S167A_S313A_S378A_T429A_T432A_ S436A_K458R_S461E)
  source 1..1673: mol_type = other RNA
aggagagtcccgcagtcggcgtccagcggctctgcttgttcgtgtgtgtgtcgttgcaggccttattcaagcttaccatgagactgagcaagaccctggtggacatggacatggccgactacagcgccgccctggaccccgcctacaccaccctggagttcgagaacgtgcaggtgctgaccatgggcaacgacaccagccccagcgagggcaccaacctgaacgcccccaacagcctgggcgtgagcgccctgtgcgccatctgcggcgacagagccaccggcaagcactacggcgccagcagctgcgacggctgcaagggcttcttcagaagagccgtgagaaagaaccacatgtacagctgcagattcagcagacagtgcgtggtggacagagacagaagaaaccagtgcagatactgcagactgaagaagtgcttcagagccggcatgagaagagaggccgtgcagaacgagagagacagaatcagcaccagaagagccgcctacgaggacagcgccctgcccagcatcaacgccctgctgcaggccgaggtgctgagcagacagatcgccgcccccgtgagcggcatcaacggcgacatcagagccaagaagatcgccagcatcgccgacgtgtgcgagagcatgaaggagcagctgctggtgctggtggagtgggccaagtacatccccgccttctgcgagctgcccctggacgaccaggtggccctgctgagagcccacgccggcgagcacctgctgctgggcgccaccaagagaagcatggtgttcaaggacgtgctgctgctgggcaacgactacatcgtgcccagacactgccccgagctggccgagatgagcagagtgagcatcagaatcctggacgagctggtgctgcccttccaggagctgcagatcgacgacaacgagtacgcctacctgaaggccatcatcttcttcgaccccgacgccaagggcctgagcgaccccggcaagatcaagagactgagagcccaggtgcaggtgagcctggaggactacatcaacgacagacagtacgacagcagaggcagattcggcgagctgctgctgctgctgcccaccctgcagagcatcacctggcagatgatcgagcagatccagttcatcaagctgttcggcatggccaagatcgacaacctgctgcaggagatgctgctgggcggcgcccccagcgacgccccccacgcccaccaccccctgcacccccacctgatgcaggagcacatgggcaccaacgtgatcgtggccaacaccatgcccacccacctgagcaacggccagatgtgcgagtggcccagacccagaggccaggccgccgcccccgaggccccccagcccgccccccccggcggcagcggcagcgagccctacaagctgctgcccggcgccgtggccaccatcgtgagacccctggaggccatcccccagcccaccatcaccaagcaggaggtgatctgaggactagtccctgttcccagagcccacttttttttctttttttgaaataaaatagcctgtctttcagatctaaaaaaaaaaaaaaaaaaaaaaaaaaaaaaaaaaaaaaaaaaaaaaaaaaaaaaaaaaaaaaaaaaaaaaaaaaaaaaaaaaaaaaaaaaaaaaaaaaaa

SEQ ID NO: 4473 - RNA, 1673 nt, synthetic construct
  misc_feature 1..1673: note = mRNA a-1 (A100) (opt4) from Homo sapiens__NP_000448.3__HNF4A(1-474)(S87A_K106R_K108R_K126R_K 127R_S142A_S143A_S148E_T166A_S167E_S313A_S378E_T429E_T432E_ S436E_K458R_S461E)
  source 1..1673: mol_type = other RNA
aggagagtcccgcagtcggcgtccagcggctctgcttgttcgtgtgtgtgtcgttgcaggccttattcaagcttaccatgagactgagcaagaccctggtggacatggacatggccgactacagcgccgccctggaccccgcctacaccaccctggagttcgagaacgtgcaggtgctgaccatgggcaacgacaccagccccagcgagggcaccaacctgaacgcccccaacagcctgggcgtgagcgccctgtgcgccatctgcggcgacagagccaccggcaagcactacggcgccagcagctgcgacggctgcaagggcttcttcagaagagccgtgagaaagaaccacatgtacagctgcagattcagcagacagtgcgtggtggacagagacagaagaaaccagtgcagatactgcagactgaagaagtgcttcagagccggcatgagaagagaggccgtgcagaacgagagagacagaatcagcaccagaagagccgcctacgaggacagcgagctgcccagcatcaacgccctgctgcaggccgaggtgctgagcagacagatcgccgagcccgtgagcggcatcaacggcgacatcagagccaagaagatcgccagcatcgccgacgtgtgcgagagcatgaaggagcagctgctggtgctggtggagtgggccaagtacatccccgccttctgcgagctgcccctggacgaccaggtggccctgctgagagcccacgccggcgagcacctgctgctgggcgccaccaagagaagcatggtgttcaaggacgtgctgctgctgggcaacgactacatcgtgcccagacactgccccgagctggccgagatgagcagagtgagcatcagaatcctggacgagctggtgctgcccttccaggagctgcagatcgacgacaacgagtacgcctacctgaaggccatcatcttcttcgaccccgacgccaagggcctgagcgaccccggcaagatcaagagactgagagcccaggtgcaggtgagcctggaggactacatcaacgacagacagtacgacagcagaggcagattcggcgagctgctgctgctgctgcccaccctgcagagcatcacctggcagatgatcgagcagatccagttcatcaagctgttcggcatggccaagatcgacaacctgctgcaggagatgctgctgggcggcgagcccagcgacgccccccacgcccaccaccccctgcacccccacctgatgcaggagcacatgggcaccaacgtgatcgtggccaacaccatgcccacccacctgagcaacggccagatgtgcgagtggcccagacccagaggccaggccgccgagcccgaggagccccagcccgagccccccggcggcagcggcagcgagccctacaagctgctgcccggcgccgtggccaccatcgtgagacccctggaggccatcccccagcccaccatcaccaagcaggaggtgatctgaggactagtccctgttcccagagcccacttttttttctttttttgaaataaaatagcctgtctttcagatctaaaaaaaaaaaaaaaaaaaaaaaaaaaaaaaaaaaaaaaaaaaaaaaaaaaaaaaaaaaaaaaaaaaaaaaaaaaaaaaaaaaaaaaaaaaaaaaaaaaa

SEQ ID NO: 4474 - RNA, 1673 nt, synthetic construct
  misc_feature 1..1673: note = mRNA a-1 (A100) (opt4) from Homo sapiens__NP_000448.3__HNF4A(1-474)(S87A_K106R_K108R_K126R_K 127R_S142A_S143A_S148A_T166A_S167A_K179R_K180R_S313A_S378A_ T429A_T432A_S436A_K458R_S461E)
  source 1..1673: mol_type = other RNA
aggagagtcccgcagtcggcgtccagcggctctgcttgttcgtgtgtgtgtcgttgcaggccttattcaagcttaccatgagactgagcaagaccctggtggacatggacatggccgactacagcgccgccctggaccccgcctacaccaccctggagttcgagaacgtgcaggtgctgaccatgggcaacgacaccagccccagcgagggcaccaacctgaacgcccccaacagcctgggcgtgagcgccctgtgcgccatctgcggcgacagagccaccggcaagcactacggcgccagcagctgcgacggctgcaagggcttcttcagaagagccgtgagaaagaaccacatgtacagctgcagattcagcagacagtgcgtggtggacagagacagaagaaaccagtgcagatactgcagactgaagaagtgcttcagagccggcatgagaagagaggccgtgcagaacgagagagacagaatcagcaccagaagagccgcctacgaggacagcgccctgcccagcatcaacgccctgctgcaggccgaggtgctgagcagacagatcgccgcccccgtgagcggcatcaacggcgacatcagagccagaagaatcgccagcatcgccgacgtgtgcgagagcatgaaggagcagctgctggtgctggtggagtgggccaagtacatccccgccttctgcgagctgcccctggacgaccaggtggccctgctgagagcccacgccggcgagcacctgctgctgggcgccaccaagagaagcatggtgttcaaggacgtgctgctgctgggcaacgactacatcgtgcccagacactgccccgagctggccgagatgagcagagtgagcatcagaatcctggacgagctggtgctgcccttccaggagctgcagatcgacgacaacgagtacgcctacctgaaggccatcatcttcttcgaccccgacgccaagggcctgagcgaccccggcaagatcaagagactgagagcccaggtgcaggtgagcctggaggactacatcaacgacagacagtacgacagcagaggcagattcggcgagctgctgctgctgctgcccaccctgcagagcatcacctggcagatgatcgagcagatccagttcatcaagctgttcggcatggccaagatcgacaacctgctgcaggagatgctgctgggcggcgcccccagcgacgccccccacgcccaccaccccctgcacccccacctgatgcaggagcacatgggcaccaacgtgatcgtggccaacaccatgcccacccacctgagcaacggccagatgtgcgagtggcccagacccagaggccaggccgccgcccccgaggccccccagcccgccccccccggcggcagcggcagcgagccctacaagctgctgcccggcgccgtggccaccatcgtgagacccctggaggccatcccccagcccaccatcaccaagcaggaggtgatctgaggactagtccctgttcccagagcccacttttttttctttttttgaaataaaatagcctgtctttcagatctaaaaaaaaaaaaaaaaaaaaaaaaaaaaaaaaaaaaaaaaaaaaaaaaaaaaaaaaaaaaaaaaaaaaaaaaaaaaaaaaaaaaaaaaaaaaaaaaaaaa

SEQ ID NO: 4475 - RNA, 1673 nt, synthetic construct
  misc_feature 1..1673: note = mRNA a-1 (A100) (opt4) from Homo sapiens__NP_000448.3__HNF4A(1-474)(S87A_K106R_K108R_K126R_K 127R_S142A_S143A_S148A_T166A_S167A_K300R_K307R_K309R_S313A_ S378A_T429A_T432A_S436A_K458R_S461E)
  source 1..1673: mol_type = other RNA
aggagagtcccgcagtcggcgtccagcggctctgcttgttcgtgtgtgtgtcgttgcaggccttattcaagcttaccatgagactgagcaagaccctggtggacatggacatggccgactacagcgccgccctggaccccgcctacaccaccctggagttcgagaacgtgcaggtgctgaccatgggcaacgacaccagccccagcgagggcaccaacctgaacgcccccaacagcctgggcgtgagcgccctgtgcgccatctgcggcgacagagccaccggcaagcactacggcgccagcagctgcgacggctgcaagggcttcttcagaagagccgtgagaaagaaccacatgtacagctgcagattcagcagacagtgcgtggtggacagagacagaagaaaccagtgcagatactgcagactgaagaagtgcttcagagccggcatgagaagagaggccgtgcagaacgagagagacagaatcagcaccagaagagccgcctacgaggacagcgccctgcccagcatcaacgccctgctgcaggccgaggtgctgagcagacagatcgccgcccccgtgagcggcatcaacggcgacatcagagccaagaagatcgccagcatcgccgacgtgtgcgagagcatgaaggagcagctgctggtgctggtggagtgggccaagtacatccccgccttctgcgagctgcccctggacgaccaggtggccctgctgagagcccacgccggcgagcacctgctgctgggcgccaccaagagaagcatggtgttcaaggacgtgctgctgctgggcaacgactacatcgtgcccagacactgccccgagctggccgagatgagcagagtgagcatcagaatcctggacgagctggtgctgcccttccaggagctgcagatcgacgacaacgagtacgcctacctgaaggccatcatcttcttcgaccccgacgccagaggcctgagcgaccccggcagaatcagaagactgagagcccaggtgcaggtgagcctggaggactacatcaacgacagacagtacgacagcagaggcagattcggcgagctgctgctgctgctgcccaccctgcagagcatcacctggcagatgatcgagcagatccagttcatcaagctgttcggcatggccaagatcgacaacctgctgcaggagatgctgctgggcggcgcccccagcgacgccccccacgcccaccaccccctgcacccccacctgatgcaggagcacatgggcaccaacgtgatcgtggccaacaccatgcccacccacctgagcaacggccagatgtgcgagtggcccagacccagaggccaggccgccgcccccgaggccccccagcccgccccccccggcggcagcggcagcgagccctacaagctgctgcccggcgccgtggccaccatcgtgagacccctggaggccatcccccagcccaccatcaccaagcaggaggtgatctgaggactagtccctgttcccagagcccacttttttttctttttttgaaataaaatagcctgtctttcagatctaaaaaaaaaaaaaaaaaaaaaaaaaaaaaaaaaaaaaaaaaaaaaaaaaaaaaaaaaaaaaaaaaaaaaaaaaaaaaaaaaaaaaaaaaaaaaaaaaaaa

SEQ ID NO: 4476 - RNA, 1673 nt, synthetic construct
  misc_feature 1..1673: note = mRNA a-1 (A100) (opt4) from Homo sapiens__NP_000448.3__HNF4A(1-474)(S87A_K106R_K108R_K126R_K 127R_S142A_S143A_S148A_T166A_S167A_S313A_S378A_T429A_T432A_ S436A_K447R_K458R_S461E_K470R)
  source 1..1673: mol_type = other RNA
aggagagtcccgcagtcggcgtccagcggctctgcttgttcgtgtgtgtgtcgttgcaggccttattcaagcttaccatgagactgagcaagaccctggtggacatggacatggccgactacagcgccgccctggaccccgcctacaccaccctggagttcgagaacgtgcaggtgctgaccatgggcaacgacaccagccccagcgagggcaccaacctgaacgcccccaacagcctgggcgtgagcgccctgtgcgccatctgcggcgacagagccaccggcaagcactacggcgccagcagctgcgacggctgcaagggcttcttcagaagagccgtgagaaagaaccacatgtacagctgcagattcagcagacagtgcgtggtggacagagacagaagaaaccagtgcagatactgcagactgaagaagtgcttcagagccggcatgagaagagaggccgtgcagaacgagagagacagaatcagcaccagaagagccgcctacgaggacagcgccctgcccagcatcaacgccctgctgcaggccgaggtgctgagcagacagatcgccgcccccgtgagcggcatcaacggcgacatcagagccaagaagatcgccagcatcgccgacgtgtgcgagagcatgaaggagcagctgctggtgctggtggagtgggccaagtacatccccgccttctgcgagctgcccctggacgaccaggtggccctgctgagagcccacgccggcgagcacctgctgctgggcgccaccaagagaagcatggtgttcaaggacgtgctgctgctgggcaacgactacatcgtgcccagacactgccccgagctggccgagatgagcagagtgagcatcagaatcctggacgagctggtgctgcccttccaggagctgcagatcgacgacaacgagtacgcctacctgaaggccatcatcttcttcgaccccgacgccaagggcctgagcgaccccggcaagatcaagagactgagagcccaggtgcaggtgagcctggaggactacatcaacgacagacagtacgacagcagaggcagattcggcgagctgctgctgctgctgcccaccctgcagagcatcacctggcagatgatcgagcagatccagttcatcaagctgttcggcatggccaagatcgacaacctgctgcaggagatgctgctgggcggcgcccccagcgacgccccccacgcccaccaccccctgcacccccacctgatgcaggagcacatgggcaccaacgtgatcgtggccaacaccatgcccacccacctgagcaacggccagatgtgcgagtggcccagacccagaggccaggccgccgcccccgaggccccccagcccgccccccccggcggcagcggcagcgagccctacagactgctgcccggcgccgtggccaccatcgtgagacccctggaggccatcccccagcccaccatcaccagacaggaggtgatctgaggactagtccctgttcccagagcccacttttttttctttttttgaaataaaatagcctgtctttcagatctaaaaaaaaaaaaaaaaaaaaaaaaaaaaaaaaaaaaaaaaaaaaaaaaaaaaaaaaaaaaaaaaaaaaaaaaaaaaaaaaaaaaaaaaaaaaaaaaaaaa

SEQ ID NO: 4477 - RNA, 1673 nt, synthetic construct
  misc_feature 1..1673: note = mRNA a-1 (A100) (opt4) from Homo sapiens__NP_000448.3__HNF4A(1-474)(S87A_K106R_K108R_K126R_K 127R_S142A_S143A_S148A_T166A_S167A_K179R_K180R_K234R_K300R_ K307R_K309R_S313A_S378A_T429A_T432A_S436A_K447R_K458R_S461E _K470R)
  source 1..1673: mol_type = other RNA
aggagagtcccgcagtcggcgtccagcggctctgcttgttcgtgtgtgtgtcgttgcaggccttattcaagcttaccatgagactgagcaagaccctggtggacatggacatggccgactacagcgccgccctggaccccgcctacaccaccctggagttcgagaacgtgcaggtgctgaccatgggcaacgacaccagccccagcgagggcaccaacctgaacgcccccaacagcctgggcgtgagcgccctgtgcgccatctgcggcgacagagccaccggcaagcactacggcgccagcagctgcgacggctgcaagggcttcttcagaagagccgtgagaaagaaccacatgtacagctgcagattcagcagacagtgcgtggtggacagagacagaagaaaccagtgcagatactgcagactgaagaagtgcttcagagccggcatgagaagagaggccgtgcagaacgagagagacagaatcagcaccagaagagccgcctacgaggacagcgccctgcccagcatcaacgccctgctgcaggccgaggtgctgagcagacagatcgccgcccccgtgagcggcatcaacggcgacatcagagccagaagaatcgccagcatcgccgacgtgtgcgagagcatgaaggagcagctgctggtgctggtggagtgggccaagtacatccccgccttctgcgagctgcccctggacgaccaggtggccctgctgagagcccacgccggcgagcacctgctgctgggcgccaccagaagaagcatggtgttcaaggacgtgctgctgctgggcaacgactacatcgtgcccagacactgccccgagctggccgagatgagcagagtgagcatcagaatcctggacgagctggtgctgcccttccaggagctgcagatcgacgacaacgagtacgcctacctgaaggccatcatcttcttcgaccccgacgccagaggcctgagcgaccccggcagaatcagaagactgagagcccaggtgcaggtgagcctggaggactacatcaacgacagacagtacgacagcagaggcagattcggcgagctgctgctgctgctgcccaccctgcagagcatcacctggcagatgatcgagcagatccagttcatcaagctgttcggcatggccaagatcgacaacctgctgcaggagatgctgctgggcggcgcccccagcgacgccccccacgcccaccaccccctgcacccccacctgatgcaggagcacatgggcaccaacgtgatcgtggccaacaccatgcccacccacctgagcaacggccagatgtgcgagtggcccagacccagaggccaggccgccgcccccgaggccccccagcccgccccccccggcggcagcggcagcgagccctacagactgctgcccggcgccgtggccaccatcgtgagacccctggaggccatcccccagcccaccatcaccagacaggaggtgatctgaggactagtccctgttcccagagcccacttttttttctttttttgaaataaaatagcctgtctttcagatctaaaaaaaaaaaaaaaaaaaaaaaaaaaaaaaaaaaaaaaaaaaaaaaaaaaaaaaaaaaaaaaaaaaaaaaaaaaaaaaaaaaaaaaaaaaaaaaaaaaa

SEQ ID NO: 4478 - RNA, 1673 nt, synthetic construct
  misc_feature 1..1673: note = mRNA a-1 (A100) (opt4) from Homo sapiens__NP_000448.3__HNF4A(1-474)(S87A_S95A_S99A_K106R_K10 8R_K126R_K127R_S142A_S143A_S148A_T166A_S167A_S313A_S378A_T4 29A_T432A_S436A_K458R_S461E)
  source 1..1673: mol_type = other RNA
aggagagtcccgcagtcggcgtccagcggctctgcttgttcgtgtgtgtgtcgttgcaggccttattcaagcttaccatgagactgagcaagaccctggtggacatggacatggccgactacagcgccgccctggaccccgcctacaccaccctggagttcgagaacgtgcaggtgctgaccatgggcaacgacaccagccccagcgagggcaccaacctgaacgcccccaacagcctgggcgtgagcgccctgtgcgccatctgcggcgacagagccaccggcaagcactacggcgccagcagctgcgacggctgcaagggcttcttcagaagagccgtgagaaagaaccacatgtacgcctgcagattcgccagacagtgcgtggtggacagagacagaagaaaccagtgcagatactgcagactgaagaagtgcttcagagccggcatgagaagagaggccgtgcagaacgagagagacagaatcagcaccagaagagccgcctacgaggacagcgccctgcccagcatcaacgccctgctgcaggccgaggtgctgagcagacagatcgccgcccccgtgagcggcatcaacggcgacatcagagccaagaagatcgccagcatcgccgacgtgtgcgagagcatgaaggagcagctgctggtgctggtggagtgggccaagtacatccccgccttctgcgagctgcccctggacgaccaggtggccctgctgagagcccacgccggcgagcacctgctgctgggcgccaccaagagaagcatggtgttcaaggacgtgctgctgctgggcaacgactacatcgtgcccagacactgccccgagctggccgagatgagcagagtgagcatcagaatcctggacgagctggtgctgcccttccaggagctgcagatcgacgacaacgagtacgcctacctgaaggccatcatcttcttcgaccccgacgccaagggcctgagcgaccccggcaagatcaagagactgagagcccaggtgcaggtgagcctggaggactacatcaacgacagacagtacgacagcagaggcagattcggcgagctgctgctgctgctgcccaccctgcagagcatcacctggcagatgatcgagcagatccagttcatcaagctgttcggcatggccaagatcgacaacctgctgcaggagatgctgctgggcggcgcccccagcgacgccccccacgcccaccaccccctgcacccccacctgatgcaggagcacatgggcaccaacgtgatcgtggccaacaccatgcccacccacctgagcaacggccagatgtgcgagtggcccagacccagaggccaggccgccgcccccgaggccccccagcccgccccccccggcggcagcggcagcgagccctacaagctgctgcccggcgccgtggccaccatcgtgagacccctggaggccatcccccagcccaccatcaccaagcaggaggtgatctgaggactagtccctgttcccagagcccacttttttttctttttttgaaataaaatagcctgtctttcagatctaaaaaaaaaaaaaaaaaaaaaaaaaaaaaaaaaaaaaaaaaaaaaaaaaaaaaaaaaaaaaaaaaaaaaaaaaaaaaaaaaaaaaaaaaaaaaaaaaaaa

SEQ ID NO: 4479 - RNA, 1673 nt, synthetic construct
  misc_feature 1..1673: note = mRNA a-1 (A100) (opt4) from Homo sapiens__NP_000448.3__HNF4A(1-474)(S87A_K106R_K108R_K126R_K 127R_S138A_T139A_S142A_S143A_S148A_T166A_S167A_S313A_S378A_ T429A_T432A_S436A_K458R_S461E)
  source 1..1673: mol_type = other RNA
aggagagtcccgcagtcggcgtccagcggctctgcttgttcgtgtgtgtgtcgttgcaggccttattcaagcttaccatgagactgagcaagaccctggtggacatggacatggccgactacagcgccgccctggaccccgcctacaccaccctggagttcgagaacgtgcaggtgctgaccatgggcaacgacaccagccccagcgagggcaccaacctgaacgcccccaacagcctgggcgtgagcgccctgtgcgccatctgcggcgacagagccaccggcaagcactacggcgccagcagctgcgacggctgcaagggcttcttcagaagagccgtgagaaagaaccacatgtacagctgcagattcagcagacagtgcgtggtggacagagacagaagaaaccagtgcagatactgcagactgaagaagtgcttcagagccggcatgagaagagaggccgtgcagaacgagagagacagaatcgccgccagaagagccgcctacgaggacagcgccctgcccagcatcaacgccctgctgcaggccgaggtgctgagcagacagatcgccgcccccgtgagcggcatcaacggcgacatcagagccaagaagatcgccagcatcgccgacgtgtgcgagagcatgaaggagcagctgctggtgctggtggagtgggccaagtacatccccgccttctgcgagctgcccctggacgaccaggtggccctgctgagagcccacgccggcgagcacctgctgctgggcgccaccaagagaagcatggtgttcaaggacgtgctgctgctgggcaacgactacatcgtgcccagacactgccccgagctggccgagatgagcagagtgagcatcagaatcctggacgagctggtgctgcccttccaggagctgcagatcgacgacaacgagtacgcctacctgaaggccatcatcttcttcgaccccgacgccaagggcctgagcgaccccggcaagatcaagagactgagagcccaggtgcaggtgagcctggaggactacatcaacgacagacagtacgacagcagaggcagattcggcgagctgctgctgctgctgcccaccctgcagagcatcacctggcagatgatcgagcagatccagttcatcaagctgttcggcatggccaagatcgacaacctgctgcaggagatgctgctgggcggcgcccccagcgacgccccccacgcccaccaccccctgcacccccacctgatgcaggagcacatgggcaccaacgtgatcgtggccaacaccatgcccacccacctgagcaacggccagatgtgcgagtggcccagacccagaggccaggccgccgcccccgaggccccccagcccgccccccccggcggcagcggcagcgagccctacaagctgctgcccggcgccgtggccaccatcgtgagacccctggaggccatcccccagcccaccatcaccaagcaggaggtgatctgaggactagtccctgttcccagagcccacttttttttctttttttgaaataaaatagcctgtctttcagatctaaaaaaaaaaaaaaaaaaaaaaaaaaaaaaaaaaaaaaaaaaaaaaaaaaaaaaaaaaaaaaaaaaaaaaaaaaaaaaaaaaaaaaaaaaaaaaaaaaaa

SEQ ID NO: 4480 - RNA, 1673 nt, synthetic construct
  misc_feature 1..1673: note = mRNA a-1 (A100) (opt4) from Homo sapiens__NP_000448.3__HNF4A(1-474)(S87A_S95A_S99A_K106R_K10 8R_K126R_K127R_S138A_T139A_S142A_S143A_S148A_T166A_S167A_S3 13A_S378A_T429A_T432A_S436A_K458R_S461E)
  source 1..1673: mol_type = other RNA
aggagagtcccgcagtcggcgtccagcggctctgcttgttcgtgtgtgtgtcgttgcaggccttattcaagcttaccatgagactgagcaagaccctggtggacatggacatggccgactacagcgccgccctggaccccgcctacaccaccctggagttcgagaacgtgcaggtgctgaccatgggcaacgacaccagccccagcgagggcaccaacctgaacgcccccaacagcctgggcgtgagcgccctgtgcgccatctgcggcgacagagccaccggcaagcactacggcgccagcagctgcgacggctgcaagggcttcttcagaagagccgtgagaaagaaccacatgtacgcctgcagattcgccagacagtgcgtggtggacagagacagaagaaaccagtgcagatactgcagactgaagaagtgcttcagagccggcatgagaagagaggccgtgcagaacgagagagacagaatcgccgccagaagagccgcctacgaggacagcgccctgcccagcatcaacgccctgctgcaggccgaggtgctgagcagacagatcgccgcccccgtgagcggcatcaacggcgacatcagagccaagaagatcgccagcatcgccgacgtgtgcgagagcatgaaggagcagctgctggtgctggtggagtgggccaagtacatccccgccttctgcgagctgcccctggacgaccaggtggccctgctgagagcccacgccggcgagcacctgctgctgggcgccaccaagagaagcatggtgttcaaggacgtgctgctgctgggcaacgactacatcgtgcccagacactgccccgagctggccgagatgagcagagtgagcatcagaatcctggacgagctggtgctgcccttccaggagctgcagatcgacgacaacgagtacgcctacctgaaggccatcatcttcttcgaccccgacgccaagggcctgagcgaccccggcaagatcaagagactgagagcccaggtgcaggtgagcctggaggactacatcaacgacagacagtacgacagcagaggcagattcggcgagctgctgctgctgctgcccaccctgcagagcatcacctggcagatgatcgagcagatccagttcatcaagctgttcggcatggccaagatcgacaacctgctgcaggagatgctgctgggcggcgcccccagcgacgccccccacgcccaccaccccctgcacccccacctgatgcaggagcacatgggcaccaacgtgatcgtggccaacaccatgcccacccacctgagcaacggccagatgtgcgagtggcccagacccagaggccaggccgccgcccccgaggccccccagcccgccccccccggcggcagcggcagcgagccctacaagctgctgcccggcgccgtggccaccatcgtgagacccctggaggccatcccccagcccaccatcaccaagcaggaggtgatctgaggactagtccctgttcccagagcccacttttttttctttttttgaaataaaatagcctgtctttcagatctaaaaaaaaaaaaaaaaaaaaaaaaaaaaaaaaaaaaaaaaaaaaaaaaaaaaaaaaaaaaaaaaaaaaaaaaaaaaaaaaaaaaaaaaaaaaaaaaaaaa

SEQ ID NO: 4481 - RNA, 1673 nt, synthetic construct
  misc_feature 1..1673: note = mRNA a-1 (A100) (opt5) from Homo sapiens__NP_000448.3__HNF4A(1-474)
  source 1..1673: mol_type = other RNA
aggagagtcccgcagtcggcgtccagcggctctgcttgttcgtgtgtgtgtcgttgcaggccttattcaagcttaccatgagactgagcaagaccctcgtggacatggatatggccgactactccgctgccctggatcccgcgtatacaacgcttgagttcgaaaacgtccaggttctgaccatgggcaatgacacatctcctagcgaggggaccaacctcaatgctccgaactccctgggagtgtctgccctttgcgccatctgtggcgatcgggctacagggaaacactacggagccagctcctgcgacggctgtaaggggtttttccgcagatctgtgcggaaaaatcatatgtatagctgccgcttttccagacaatgtgtcgtggataaggacaaacggaaccagtgccgctactgtagactgaagaagtgcttccgggctggaatgaaaaaggaagccgttcagaatgagcgcgatagaattagcacccggcgcagctcctatgaagacagctctctcccctccatcaacgcgctgctgcaggccgaggtgctcagcagacaaattacatctcctgtctccggcatcaatggcgatattcgggctaaaaagatcgccagcatcgctgacgtgtgtgagtccatgaaagaacagctgcttgttctggtggagtgggccaagtacattcccgcgttttgcgaactccctctggatgaccaggtcgcccttctgcgcgctcacgccggggagcatctcctgctgggagctaccaagagatctatggtgttcaaagacgtgctcctgcttggcaacgattatatcgtcccccggcactgtcctgagctggccgaaatgagcagagtttccattcgcatcctcgacgagctggtgcttccgtttcaggaactgcaaattgatgacaatgagtacgcctacctcaaggctatcattttctttgatcccgacgcgaaagggctgagcgatcctggaaagatcaaacggctgagatctcaggtgcaggtctccctcgaagactatatcaacgatcgccagtacgacagccggggcagattcggggagctgcttctgctcctgcccacgcttcaatctattacctggcagatgatcgagcagattcaatttatcaagctgttcggaatggccaaaattgataatctcctgcaggaaatgctgctcggcggcagcccttccgacgctccccatgcccaccacccgctgcatcctcaccttatgcaggagcatatggggacaaacgtgatcgttgccaataccatgcccacacacctgtctaacggacagatgtgcgaatggcctcgcccccggggccaagctgccacccccgagacgcctcagccgtctccccctgggggatccggcagcgaaccctataagctcctgcctggggcggtggctacaatcgtcaagcccctgtctgccattccgcagcctaccatcacaaaacaggaggtgatttgaggactagtccctgttcccagagcccacttttttttctttttttgaaataaaatagcctgtctttcagatctaaaaaaaaaaaaaaaaaaaaaaaaaaaaaaaaaaaaaaaaaaaaaaaaaaaaaaaaaaaaaaaaaaaaaaaaaaaaaaaaaaaaaaaaaaaaaaaaaaaa

SEQ ID NO: 4482 - RNA, 1673 nt, synthetic construct
  misc_feature 1..1673: note = mRNA a-1 (A100) (opt5) from Homo sapiens__NP_000448.3__HNF4A(1-474)(S313A)
  source 1..1673: mol_type = other RNA
aggagagtcccgcagtcggcgtccagcggctctgcttgttcgtgtgtgtgtcgttgcaggccttattcaagcttaccatgagactgagcaagaccctcgtggacatggatatggccgactactccgctgccctggatcccgcgtatacaacgcttgagttcgaaaacgtccaggttctgaccatgggcaatgacacatctcctagcgaggggaccaacctcaatgctccgaactccctgggagtgtctgccctttgcgccatctgtggcgatcgggctacagggaaacactacggagccagctcctgcgacggctgtaaggggtttttccgcagatctgtgcggaaaaatcatatgtatagctgccgcttttccagacaatgtgtcgtggataaggacaaacggaaccagtgccgctactgtagactgaagaagtgcttccgggctggaatgaaaaaggaagccgttcagaatgagcgcgatagaattagcacccggagatcttcctatgaagacagctctctcccctccatcaacgcgctgctgcaggccgaggtgctcagccgccaaattacatctcctgtctccggcatcaatggcgatattcgggctaaaaagatcgccagcatcgctgacgtgtgtgagtccatgaaagaacagctgcttgttctggtggagtgggccaagtacattcccgcgttttgcgaactccctctggatgaccaggtcgcccttctgcgcgctcacgccggggagcatctcctgctgggagctaccaagagatctatggtgttcaaagacgtgctcctgcttggcaacgattatatcgtcccccggcactgtcctgagctggccgaaatgagcagagtttccattcgcatcctcgacgagctggtgcttccgtttcaggaactgcaaattgatgacaatgagtacgcctacctcaaggctatcattttctttgatcccgacgcgaaagggctgagcgatcctggaaagatcaaacggctgagagcccaggtgcaggtctctctcgaagactatatcaacgatcgccagtacgactcccggggcagattcggggagctgcttctgctcctgcccacgcttcaaagcattacctggcagatgatcgagcagattcaatttatcaagctgttcggaatggctaaaattgataatctcctgcaggaaatgctgctcggcggctctcctagcgacgctccccatgcccaccacccgctgcatcctcaccttatgcaggagcatatggggacaaacgtgatcgttgccaataccatgcccacacacctgtccaacggacagatgtgcgaatggcctcgcccccggggccaagccgcgacccccgagacgcctcagccgtctccccctgggggaagcggctccgaaccctataagctcctgcctggggctgtggccacaatcgtcaagcccctgagcgccattccgcagcctaccatcacaaaacaggaggtgatttgaggactagtccctgttcccagagcccacttttttttctttttttgaaataaaatagcctgtctttcagatctaaaaaaaaaaaaaaaaaaaaaaaaaaaaaaaaaaaaaaaaaaaaaaaaaaaaaaaaaaaaaaaaaaaaaaaaaaaaaaaaaaaaaaaaaaaaaaaaaaaa

SEQ ID NO: 4483 - RNA, 1673 nt, synthetic construct
  misc_feature 1..1673: note = mRNA a-1 (A100) (opt5) from Homo sapiens__NP_000448.3__HNF4A(1-474)(S313E)
  source 1..1673: mol_type = other RNA
aggagagtcccgcagtcggcgtccagcggctctgcttgttcgtgtgtgtgtcgttgcaggccttattcaagcttaccatgagactgagcaagaccctcgtggacatggatatggccgactactccgctgccctggatcccgcgtatacaacgcttgagttcgaaaacgtccaggttctgaccatgggcaatgacacatctcctagcgaggggaccaacctcaatgctccgaactccctgggagtgtctgccctttgcgccatctgtggcgatcgggctacagggaaacactacggagccagctcctgcgacggctgtaaggggtttttccgcagatctgtgcggaaaaatcatatgtatagctgccgcttttccagacaatgtgtcgtggataaggacaaacggaaccagtgccgctactgtagactgaagaagtgcttccgggctggaatgaaaaaggaagccgttcagaatgagcgcgatagaattagcacccggagatcttcctatgaagacagctctctcccctccatcaacgcgctgctgcaggccgaggtgctcagccgccaaattacatctcctgtctccggcatcaatggcgatattcgggctaaaaagatcgccagcatcgctgacgtgtgtgagtccatgaaagaacagctgcttgttctggtggagtgggccaagtacattcccgcgttttgcgaactccctctggatgaccaggtcgcccttctgcgcgctcacgccggggagcatctcctgctgggagctaccaagagatctatggtgttcaaagacgtgctcctgcttggcaacgattatatcgtcccccggcactgtcctgagctggccgaaatgagcagagtttccattcgcatcctcgacgagctggtgcttccgtttcaggaactgcaaattgatgacaatgagtacgcctacctcaaggctatcattttctttgatcccgacgcgaaagggctgagcgatcctggaaagatcaaacggctgagagaacaggtgcaggtctctctcgaggactatatcaacgatcgccagtacgactcccggggcagattcggggagctgcttctgctcctgcccacgcttcaaagcattacctggcagatgatcgaacagattcaatttatcaagctgttcggaatggccaaaattgataatctcctgcaggagatgctgctcggcggctctcctagcgacgctccccatgcccaccacccgctgcatcctcaccttatgcaggaacatatggggacaaacgtgatcgttgccaataccatgcccacacacctgtccaacggacagatgtgcgagtggcctcgcccccggggccaagctgccacccccgaaacgcctcagccgtctccccctgggggaagcggctccgagccctataagctcctgcctggggcggtggctacaatcgtcaagcccctgagcgccattccgcagcctaccatcacaaaacaggaggtgatttgaggactagtccctgttcccagagcccacttttttttctttttttgaaataaaatagcctgtctttcagatctaaaaaaaaaaaaaaaaaaaaaaaaaaaaaaaaaaaaaaaaaaaaaaaaaaaaaaaaaaaaaaaaaaaaaaaaaaaaaaaaaaaaaaaaaaaaaaaaaaaa

SEQ ID NO: 4484 - RNA, 1673 nt, synthetic construct
  misc_feature 1..1673: note = mRNA a-1 (A100) (opt5) from Homo sapiens__NP_000448.3__HNF4A(1-474)(S142A_S143A)
  source 1..1673: mol_type = other RNA
aggagagtcccgcagtcggcgtccagcggctctgcttgttcgtgtgtgtgtcgttgcaggccttattcaagcttaccatgagactgagcaagaccctcgtggacatggatatggccgactactccgctgccctggatcccgcgtatacaacgcttgagttcgaaaacgtccaggttctgaccatgggcaatgacacatctcctagcgaggggaccaacctcaatgctccgaactccctgggagtgtctgccctttgcgccatctgtggcgatcgggctacagggaaacactacggagccagctcctgcgacggctgtaaggggtttttccgcagatctgtgcggaaaaatcatatgtatagctgccgcttttccagacaatgtgtcgtggataaggacaaacggaaccagtgccgctactgtagactgaagaagtgcttccgggctggaatgaaaaaggaagccgttcagaatgagcgcgatagaattagcacccggcgcgcggcctatgaagactcttccctccccagcatcaacgctctgctgcaggccgaggtgctctctagacaaattacatcccctgtcagcggcatcaatggcgatattcgggctaaaaagatcgcctctatcgcggacgtgtgtgagtccatgaaagaacagctgcttgttctggtggagtgggccaagtacattcccgctttttgcgaactccctctggatgaccaggtcgcccttctgcgcgctcacgccggggagcatctcctgctgggagccaccaagagaagcatggtgttcaaagacgtgctcctgcttggcaacgattatatcgtcccccggcactgtcctgagctggctgaaatgtccagagtttctattcgcatcctcgacgagctggtgcttccgtttcaggaactgcaaattgatgacaatgagtacgcgtacctcaaggccatcattttctttgatcccgacgctaaagggctgagcgatcctggaaagatcaaacggctgagatcccaggtgcaggtcagcctcgaagactatatcaacgatcgccagtacgactctcggggcagattcggggagctgcttctgctcctgcccacgcttcaatccattacctggcagatgatcgagcagattcaatttatcaagctgttcggaatggccaaaattgataatctcctgcaggaaatgctgctcggcggcagcccttctgacgctccccatgcccaccacccgctgcatcctcaccttatgcaggagcatatggggacaaacgtgatcgttgccaataccatgcccacacacctgagcaacggacagatgtgcgaatggcctcgcccccggggccaagcggctacccccgagacgcctcagccgtctccccctgggggatccggcagcgaaccctataagctcctgcctggggccgtggccacaatcgtcaagcccctgtccgctattccgcagcctaccatcacaaaacaggaggtgatttgaggactagtccctgttcccagagcccacttttttttctttttttgaaataaaatagcctgtctttcagatctaaaaaaaaaaaaaaaaaaaaaaaaaaaaaaaaaaaaaaaaaaaaaaaaaaaaaaaaaaaaaaaaaaaaaaaaaaaaaaaaaaaaaaaaaaaaaaaaaaaa

SEQ ID NO: 4485 - RNA, 1673 nt, synthetic construct
  misc_feature 1..1673: note = mRNA a-1 (A100) (opt5) from Homo sapiens__NP_000448.3__HNF4A(1-474)(S142E_S143E)
  source 1..1673: mol_type = other RNA
aggagagtcccgcagtcggcgtccagcggctctgcttgttcgtgtgtgtgtcgttgcaggccttattcaagcttaccatgagactgagcaagaccctcgtggacatggatatggccgactactccgctgccctggatcccgcgtatacaacgcttgagttcgaaaacgtccaggttctgaccatgggcaatgacacatctcctagcgaggggaccaacctcaatgctccgaactccctgggagtgtctgccctttgcgccatctgtggcgatcgggctacagggaaacactacggagccagctcctgcgacggctgtaaggggtttttccgcagatctgtgcggaaaaatcatatgtatagctgccgcttttccagacaatgtgtcgtggataaggacaaacggaaccagtgccgctactgtagactgaagaagtgcttccgggctggaatgaaaaaggaagccgttcagaatgagcgcgatagaattagcacccggcgcgaagagtatgaggactcttccctccccagcatcaacgcgctgctgcaggccgaagtgctctctagacaaattacatcccctgtcagcggcatcaatggcgatattcgggctaaaaagatcgcctctatcgctgacgtgtgtgagtccatgaaagaacagctgcttgttctggtggagtgggccaagtacattcccgcgttttgcgagctccctctggatgaccaggtcgcccttctgcgcgctcacgccggggaacatctcctgctgggagctaccaagagaagcatggtgttcaaagacgtgctcctgcttggcaacgattatatcgtcccccggcactgtcctgagctggccgaaatgtccagagtttctattcgcatcctcgacgagctggtgcttccgtttcaggaactgcaaattgatgacaatgagtacgcctacctcaaggctatcattttctttgatcccgacgcgaaagggctgagcgatcctggaaagatcaaacggctgagatcccaggtgcaggtcagcctcgaggactatatcaacgatcgccagtacgactctcggggcagattcggggaactgcttctgctcctgcccacgcttcaatccattacctggcagatgatcgagcagattcaatttatcaagctgttcggaatggccaaaattgataatctcctgcaggaaatgctgctcggcggcagcccttctgacgctccccatgcccaccacccgctgcatcctcaccttatgcaggagcatatggggacaaacgtgatcgttgccaataccatgcccacacacctgagcaacggacagatgtgcgaatggcctcgcccccggggccaagctgccacccccgagacgcctcagccgtctccccctgggggatccggcagcgagccctataagctcctgcctggggcggtggctacaatcgtcaagcccctgtccgccattccgcagcctaccatcacaaaacaggaagtgatttgaggactagtccctgttcccagagcccacttttttttctttttttgaaataaaatagcctgtctttcagatctaaaaaaaaaaaaaaaaaaaaaaaaaaaaaaaaaaaaaaaaaaaaaaaaaaaaaaaaaaaaaaaaaaaaaaaaaaaaaaaaaaaaaaaaaaaaaaaaaaaa

SEQ ID NO: 4486 - RNA, 1673 nt, synthetic construct
  misc_feature 1..1673: note = mRNA a-1 (A100) (opt5) from Homo sapiens__NP_000448.3__HNF4A(1-474)(S143A)
  source 1..1673: mol_type = other RNA
aggagagtcccgcagtcggcgtccagcggctctgcttgttcgtgtgtgtgtcgttgcaggccttattcaagcttaccatgagactgagcaagaccctcgtggacatggatatggccgactactccgctgccctggatcccgcgtatacaacgcttgagttcgaaaacgtccaggttctgaccatgggcaatgacacatctcctagcgaggggaccaacctcaatgctccgaactccctgggagtgtctgccctttgcgccatctgtggcgatcgggctacagggaaacactacggagccagctcctgcgacggctgtaaggggtttttccgcagatctgtgcggaaaaatcatatgtatagctgccgcttttccagacaatgtgtcgtggataaggacaaacggaaccagtgccgctactgtagactgaagaagtgcttccgggctggaatgaaaaaggaagccgttcagaatgagcgcgatagaattagcacccggcgctctgcgtatgaagactccagcctcccctctatcaacgccctgctgcaggctgaggtgctctccagacaaattacaagccctgtctctggcatcaatggcgatattcgggccaaaaagatcgcttccatcgccgacgtgtgtgagagcatgaaagaacagctgcttgttctggtggagtgggcgaagtacattcccgccttttgcgaactccctctggatgaccaggtcgcccttctgcgcgcccacgctggggagcatctcctgctgggagccaccaagagatccatggtgttcaaagacgtgctcctgcttggcaacgattatatcgtcccccggcactgtcctgagctggccgaaatgtctagagttagcattcgcatcctcgacgagctggtgcttccgtttcaggaactgcaaattgatgacaatgagtacgcttacctcaaggcgatcattttctttgatcccgacgccaaagggctgtccgatcctggaaagatcaaacggctgagaagccaggtgcaggtctctctcgaagactatatcaacgatcgccagtacgactcccggggcagattcggggagctgcttctgctcctgcccacgcttcaaagcattacctggcagatgatcgagcagattcaatttatcaagctgttcggaatggctaaaattgataatctcctgcaggaaatgctgctcggcggctctcctagcgacgctccccatgcccaccacccgctgcatcctcaccttatgcaggagcatatggggacaaacgtgatcgttgctaataccatgcccacacacctgtccaacggacagatgtgcgaatggcctcgcccccggggccaagccgcgacccccgagacgcctcagccgtctccccctgggggaagcggctccgaaccctataagctcctgcctggggctgtggccacaatcgtcaagcccctgagcgccattccgcagcctaccatcacaaaacaggaggtgatttgaggactagtccctgttcccagagcccacttttttttctttttttgaaataaaatagcctgtctttcagatctaaaaaaaaaaaaaaaaaaaaaaaaaaaaaaaaaaaaaaaaaaaaaaaaaaaaaaaaaaaaaaaaaaaaaaaaaaaaaaaaaaaaaaaaaaaaaaaaaaaa

SEQ ID NO: 4487 - RNA, 1673 nt, synthetic construct
  misc_feature 1..1673: note = mRNA a-1 (A100) (opt5) from Homo sapiens__NP_000448.3__HNF4A(1-474)(T166A)
  source 1..1673: mol_type = other RNA
aggagagtcccgcagtcggcgtccagcggctctgcttgttcgtgtgtgtgtcgttgcaggccttattcaagcttaccatgagactgagcaagaccctcgtggacatggatatggccgactactccgctgccctggatcccgcgtatacaacgcttgagttcgaaaacgtccaggttctgaccatgggcaatgacacatctcctagcgaggggaccaacctcaatgctccgaactccctgggagtgtctgccctttgcgccatctgtggcgatcgggctacagggaaacactacggagccagctcctgcgacggctgtaaggggtttttccgcagatctgtgcggaaaaatcatatgtatagctgccgcttttccagacaatgtgtcgtggataaggacaaacggaaccagtgccgctactgtagactgaagaagtgcttccgggctggaatgaaaaaggaagccgttcagaatgagcgcgatagaattagcacccggcgcagctcctatgaagacagctctctcccctccatcaacgcgctgctgcaggccgaggtgctcagcagacaaattgcttctcctgtctccggcatcaatggcgatattcgggccaaaaagatcgctagcatcgccgacgtgtgtgagtccatgaaagaacagctgcttgttctggtggagtgggcgaagtacattcccgccttttgcgaactccctctggatgaccaggtcgcccttctgcgcgcccacgctggggagcatctcctgctgggagccacaaagagatctatggtgttcaaagacgtgctcctgcttggcaacgattatatcgtcccccggcactgtcctgagctggccgaaatgagcagagtttccattcgcatcctcgacgagctggtgcttccgtttcaggaactgcaaattgatgacaatgagtacgcttacctcaaggcgatcattttctttgatcccgacgccaaagggctgagcgatcctggaaagatcaaacggctgagatctcaggtgcaggtctccctcgaagactatatcaacgatcgccagtacgacagccggggcagattcggggagctgcttctgctcctgcccacccttcaatctattacgtggcagatgatcgagcagattcaatttatcaagctgttcggaatggctaaaattgataatctcctgcaggaaatgctgctcggcggcagcccttccgacgctccccatgcccaccacccgctgcatcctcaccttatgcaggagcatatggggaccaacgtgatcgttgctaatacaatgcccacccacctgtctaacggacagatgtgcgaatggcctcgcccccggggccaagccgcgacacccgagacccctcagccgtctccccctgggggatccggcagcgaaccctataagctcctgcctggggctgtggccacgatcgtcaagcccctgtctgccattccgcagcctacaatcaccaaacaggaggtgatttgaggactagtccctgttcccagagcccacttttttttctttttttgaaataaaatagcctgtctttcagatctaaaaaaaaaaaaaaaaaaaaaaaaaaaaaaaaaaaaaaaaaaaaaaaaaaaaaaaaaaaaaaaaaaaaaaaaaaaaaaaaaaaaaaaaaaaaaaaaaaaa

SEQ ID NO: 4488 - RNA, 1673 nt, synthetic construct
  misc_feature 1..1673: note = mRNA a-1 (A100) (opt5) from Homo sapiens__NP_000448.3__HNF4A(1-474)(S167E)
  source 1..1673: mol_type = other RNA
aggagagtcccgcagtcggcgtccagcggctctgcttgttcgtgtgtgtgtcgttgcaggccttattcaagcttaccatgagactgagcaagaccctcgtggacatggatatggccgactactccgctgccctggatcccgcgtatacaacgcttgagttcgaaaacgtccaggttctgaccatgggcaatgacacatctcctagcgaggggaccaacctcaatgctccgaactccctgggagtgtctgccctttgcgccatctgtggcgatcgggctacagggaaacactacggagccagctcctgcgacggctgtaaggggtttttccgcagatctgtgcggaaaaatcatatgtatagctgccgcttttccagacaatgtgtcgtggataaggacaaacggaaccagtgccgctactgtagactgaagaagtgcttccgggctggaatgaaaaaggaagccgttcagaatgagcgcgatagaattagcacccggagatcttcctatgaagacagctctctcccctccatcaacgcgctgctgcaggccgaggtgctcagccgccaaattacagagcctgtctctggcatcaatggcgatattcgggctaaaaagatcgcctccatcgctgacgtgtgtgaaagcatgaaagagcagctgcttgttctggtggaatgggccaagtacattcccgcgttttgcgagctccctctggatgaccaggtcgcccttctgcgcgctcacgccggggagcatctcctgctgggagctaccaagagatccatggtgttcaaagacgtgctcctgcttggcaacgattatatcgtcccccggcactgtcctgaactggccgagatgtctagagttagcattcgcatcctcgacgaactggtgcttccgtttcaggagctgcaaattgatgacaatgaatacgcctacctcaaggctatcattttctttgatcccgacgcgaaagggctgtccgatcctggaaagatcaaacggctgagaagccaggtgcaggtctctctcgaggactatatcaacgatcgccagtacgactcccggggcagattcggggagctgcttctgctcctgcccacgcttcaaagcattacctggcagatgatcgaacagattcaatttatcaagctgttcggaatggccaaaattgataatctcctgcaggagatgctgctcggcggctctcctagcgacgctccccatgcccaccacccgctgcatcctcaccttatgcaggaacatatggggacaaacgtgatcgttgccaataccatgcccacacacctgtccaacggacagatgtgcgagtggcctcgcccccggggccaagctgccacccccgaaacgcctcagccgtctccccctgggggaagcggctccgagccctataagctcctgcctggggcggtggctacaatcgtcaagcccctgagcgccattccgcagcctaccatcacaaaacaggaggtgatttgaggactagtccctgttcccagagcccacttttttttctttttttgaaataaaatagcctgtctttcagatctaaaaaaaaaaaaaaaaaaaaaaaaaaaaaaaaaaaaaaaaaaaaaaaaaaaaaaaaaaaaaaaaaaaaaaaaaaaaaaaaaaaaaaaaaaaaaaaaaaaa

SEQ ID NO: 4489 - RNA, 1673 nt, synthetic construct
  misc_feature 1..1673: note = mRNA a-1 (A100) (opt5) from Homo sapiens__NP_000448.3__HNF4A(1-474)(S167A)
  source 1..1673: mol_type = other RNA
aggagagtcccgcagtcggcgtccagcggctctgcttgttcgtgtgtgtgtcgttgcaggccttattcaagcttaccatgagactgagcaagaccctcgtggacatggatatggccgactactccgctgccctggatcccgcgtatacaacgcttgagttcgaaaacgtccaggttctgaccatgggcaatgacacatctcctagcgaggggaccaacctcaatgctccgaactccctgggagtgtctgccctttgcgccatctgtggcgatcgggctacagggaaacactacggagccagctcctgcgacggctgtaaggggtttttccgcagatctgtgcggaaaaatcatatgtatagctgccgcttttccagacaatgtgtcgtggataaggacaaacggaaccagtgccgctactgtagactgaagaagtgcttccgggctggaatgaaaaaggaagccgttcagaatgagcgcgatagaattagcacccggagatcttcctatgaagacagctctctcccctccatcaacgcgctgctgcaggccgaggtgctcagccgccaaattacagctcctgtctctggcatcaatggcgatattcgggccaaaaagatcgcttccatcgccgacgtgtgtgagagcatgaaagaacagctgcttgttctggtggagtgggcgaagtacattcccgccttttgcgaactccctctggatgaccaggtcgcccttctgcgcgcccacgctggggagcatctcctgctgggagccaccaagagatccatggtgttcaaagacgtgctcctgcttggcaacgattatatcgtcccccggcactgtcctgagctggccgaaatgtctagagttagcattcgcatcctcgacgagctggtgcttccgtttcaggaactgcaaattgatgacaatgagtacgcttacctcaaggcgatcattttctttgatcccgacgccaaagggctgtccgatcctggaaagatcaaacggctgagaagccaggtgcaggtctctctcgaagactatatcaacgatcgccagtacgactcccggggcagattcggggagctgcttctgctcctgcccacgcttcaaagcattacctggcagatgatcgagcagattcaatttatcaagctgttcggaatggctaaaattgataatctcctgcaggaaatgctgctcggcggctctcctagcgacgctccccatgcccaccacccgctgcatcctcaccttatgcaggagcatatggggacaaacgtgatcgttgctaataccatgcccacacacctgtccaacggacagatgtgcgaatggcctcgcccccggggccaagccgcgacccccgagacgcctcagccgtctccccctgggggaagcggctccgaaccctataagctcctgcctggggctgtggccacaatcgtcaagcccctgagcgccattccgcagcctaccatcacaaaacaggaggtgatttgaggactagtccctgttcccagagcccacttttttttctttttttgaaataaaatagcctgtctttcagatctaaaaaaaaaaaaaaaaaaaaaaaaaaaaaaaaaaaaaaaaaaaaaaaaaaaaaaaaaaaaaaaaaaaaaaaaaaaaaaaaaaaaaaaaaaaaaaaaaaaa

SEQ ID NO: 4490 - RNA, 1673 nt, synthetic construct
  misc_feature 1..1673: note = mRNA a-1 (A100) (opt5) from Homo sapiens__NP_000448.3__HNF4A(1-474)(S167A_S378A_T429A_T432A_ S436A)
  source 1..1673: mol_type = other RNA
aggagagtcccgcagtcggcgtccagcggctctgcttgttcgtgtgtgtgtcgttgcaggccttattcaagcttaccatgagactgagcaagaccctcgtggacatggatatggccgactactccgctgccctggatcccgcgtatacaacgcttgagttcgaaaacgtccaggttctgaccatgggcaatgacacatctcctagcgaggggaccaacctcaatgctccgaactccctgggagtgtctgccctttgcgccatctgtggcgatcgggctacagggaaacactacggagccagctcctgcgacggctgtaaggggtttttccgcagatctgtgcggaaaaatcatatgtatagctgccgcttttccagacaatgtgtcgtggataaggacaaacggaaccagtgccgctactgtagactgaagaagtgcttccgggctggaatgaaaaaggaagccgttcagaatgagcgcgatagaattagcacccggagatcttcctatgaagacagctctctcccctccatcaacgcgctgctgcaggccgaggtgctcagccgccaaattacagctcctgtctctggcatcaatggcgatattcgggccaaaaagatcgcttccatcgccgacgtgtgtgagagcatgaaagaacagctgcttgttctggtggagtgggcgaagtacattcccgccttttgcgaactccctctggatgaccaggtcgcccttctgcgcgcccacgctggggagcatctcctgctgggagccaccaagagatccatggtgttcaaagacgtgctcctgcttggcaacgattatatcgtcccccggcactgtcctgagctggccgaaatgtctagagttagcattcgcatcctcgacgagctggtgcttccgtttcaggaactgcaaattgatgacaatgagtacgcttacctcaaggcgatcattttctttgatcccgacgccaaagggctgtccgatcctggaaagatcaaacggctgagaagccaggtgcaggtctctctcgaagactatatcaacgatcgccagtacgactcccggggcagattcggggagctgcttctgctcctgcccacgcttcaaagcattacctggcagatgatcgagcagattcaatttatcaagctgttcggaatggctaaaattgataatctcctgcaggaaatgctgctcggcggcgccccttctgacgctccccatgctcaccacccgctgcatcctcaccttatgcaggagcatatggggacaaacgtgatcgttgccaataccatgcccacacacctgagcaacggacagatgtgcgaatggcctcgcccccggggccaagcggctgcccccgaggcccctcagccggctccccctgggggatccggctctgaaccctataagctcctgcctggggccgtggctaccatcgtcaagcccctgagcgccattccgcagcctacgatcacaaaacaggaggtgatttgaggactagtccctgttcccagagcccacttttttttctttttttgaaataaaatagcctgtctttcagatctaaaaaaaaaaaaaaaaaaaaaaaaaaaaaaaaaaaaaaaaaaaaaaaaaaaaaaaaaaaaaaaaaaaaaaaaaaaaaaaaaaaaaaaaaaaaaaaaaaaa

SEQ ID NO: 4491 - RNA, 1673 nt, synthetic construct
  misc_feature 1..1673: note = mRNA a-1 (A100) (opt5) from Homo sapiens__NP_000448.3__HNF4A(1-474)(S167E_S378E_T429E_T432E_ S436E)
  source 1..1673: mol_type = other RNA
aggagagtcccgcagtcggcgtccagcggctctgcttgttcgtgtgtgtgtcgttgcaggccttattcaagcttaccatgagactgagcaagaccctcgtggacatggatatggccgactactccgctgccctggatcccgcgtatacaacgcttgagttcgaaaacgtccaggttctgaccatgggcaatgacacatctcctagcgaggggaccaacctcaatgctccgaactccctgggagtgtctgccctttgcgccatctgtggcgatcgggctacagggaaacactacggagccagctcctgcgacggctgtaaggggtttttccgcagatctgtgcggaaaaatcatatgtatagctgccgcttttccagacaatgtgtcgtggataaggacaaacggaaccagtgccgctactgtagactgaagaagtgcttccgggctggaatgaaaaaggaagccgttcagaatgagcgcgatagaattagcacccggagatcttcctatgaagacagctctctcccctccatcaacgcgctgctgcaggccgaggtgctcagccgccaaattacagagcctgtctctggcatcaatggcgatattcgggctaaaaagatcgcctccatcgctgacgtgtgtgaaagcatgaaagagcagctgcttgttctggtggaatgggccaagtacattcccgcgttttgcgagctccctctggatgaccaggtcgcccttctgcgcgctcacgccggggagcatctcctgctgggagctaccaagagatccatggtgttcaaagacgtgctcctgcttggcaacgattatatcgtcccccggcactgtcctgaactggccgagatgtctagagttagcattcgcatcctcgacgaactggtgcttccgtttcaggagctgcaaattgatgacaatgaatacgcctacctcaaggctatcattttctttgatcccgacgcgaaagggctgtccgatcctggaaagatcaaacggctgagaagccaggtgcaggtctctctcgaggactatatcaacgatcgccagtacgactcccggggcagattcggggagctgcttctgctcctgcccacgcttcaaagcattacctggcagatgatcgaacagattcaatttatcaagctgttcggaatggccaaaattgataatctcctgcaggagatgctgctcggcggcgaaccttctgacgctccccatgcccaccacccgctgcatcctcaccttatgcaggagcatatggggacaaacgtgatcgttgccaataccatgcccacacacctgagcaacggacagatgtgcgaatggcctcgcccccggggccaagctgccgagcccgaggaacctcagccggagccccctgggggatccggctctgaaccctataagctcctgcctggggcggtggctaccatcgtcaagcccctgagcgccattccgcagcctacgatcacaaaacaggaggtgatttgaggactagtccctgttcccagagcccacttttttttctttttttgaaataaaatagcctgtctttcagatctaaaaaaaaaaaaaaaaaaaaaaaaaaaaaaaaaaaaaaaaaaaaaaaaaaaaaaaaaaaaaaaaaaaaaaaaaaaaaaaaaaaaaaaaaaaaaaaaaaaa

SEQ ID NO: 4492 - RNA, 1673 nt, synthetic construct
  misc_feature 1..1673: note = mRNA a-1 (A100) (opt5) from Homo sapiens__NP_000448.3__HNF4A(1-474)(S87A)
  source 1..1673: mol_type = other RNA
aggagagtcccgcagtcggcgtccagcggctctgcttgttcgtgtgtgtgtcgttgcaggccttattcaagcttaccatgagactgagcaagaccctcgtggacatggatatggccgactactccgctgccctggatcccgcgtatacaacgcttgagttcgaaaacgtccaggttctgaccatgggcaatgacacatctcctagcgaggggaccaacctcaatgctccgaactccctgggagtgtctgccctttgcgccatctgtggcgatcgggctacagggaaacactacggagccagctcctgcgacggctgtaaggggtttttccgcagagctgtgcggaaaaatcatatgtattcttgccgctttagcagacaatgtgtcgtggataaggacaaacggaaccagtgccgctactgtagactgaagaagtgcttccgggccggaatgaaaaaggaagcggttcagaatgagcgcgatagaatttccacccggcgcagctcttatgaagactccagcctcccctctatcaacgccctgctgcaggctgaggtgctctccagacaaattacaagccctgtctctggcatcaatggcgatattcgggccaaaaagatcgcttccatcgccgacgtgtgtgagagcatgaaagaacagctgcttgttctggtggagtgggcgaagtacattcccgccttttgcgaactccctctggatgaccaggtcgcccttctgcgcgcccacgctggggagcatctcctgctgggagccaccaagagatccatggtgttcaaagacgtgctcctgcttggcaacgattatatcgtcccccggcactgtcctgagctggccgaaatgtctagagttagcattcgcatcctcgacgagctggtgcttccgtttcaggaactgcaaattgatgacaatgagtacgcttacctcaaggcgatcattttctttgatcccgacgccaaagggctgtccgatcctggaaagatcaaacggctgagaagccaggtgcaggtctctctcgaagactatatcaacgatcgccagtacgactcccggggcagattcggggagctgcttctgctcctgcccacgcttcaaagcattacctggcagatgatcgagcagattcaatttatcaagctgttcggaatggctaaaattgataatctcctgcaggaaatgctgctcggcggctctcctagcgacgctccccatgcccaccacccgctgcatcctcaccttatgcaggagcatatggggacaaacgtgatcgttgctaataccatgcccacacacctgtccaacggacagatgtgcgaatggcctcgcccccggggccaagccgcgacccccgagacgcctcagccgtctccccctgggggaagcggctccgaaccctataagctcctgcctggggctgtggccacaatcgtcaagcccctgagcgccattccgcagcctaccatcacaaaacaggaggtgatttgaggactagtccctgttcccagagcccacttttttttctttttttgaaataaaatagcctgtctttcagatctaaaaaaaaaaaaaaaaaaaaaaaaaaaaaaaaaaaaaaaaaaaaaaaaaaaaaaaaaaaaaaaaaaaaaaaaaaaaaaaaaaaaaaaaaaaaaaaaaaaa

SEQ ID NO: 4493 - RNA, 1673 nt, synthetic construct
  misc_feature 1..1673: note = mRNA a-1 (A100) (opt5) from Homo sapiens__NP_000448.3__HNF4A(1-474)(S87E)
  source 1..1673: mol_type = other RNA
aggagagtcccgcagtcggcgtccagcggctctgcttgttcgtgtgtgtgtcgttgcaggccttattcaagcttaccatgagactgagcaagaccctcgtggacatggatatggccgactactccgctgccctggatcccgcgtatacaacgcttgagttcgaaaacgtccaggttctgaccatgggcaatgacacatctcctagcgaggggaccaacctcaatgctccgaactccctgggagtgtctgccctttgcgccatctgtggcgatcgggctacagggaaacactacggagccagctcctgcgacggctgtaaggggtttttccgcagagaagtgcggaaaaatcatatgtattcttgccgctttagcagacaatgtgtcgtggataaggacaaacggaaccagtgccgctactgtagactgaagaagtgcttccgggctggaatgaaaaaggaggccgttcagaatgaacgcgatagaatttccacccggcgcagctcttatgaggactccagcctcccctctatcaacgcgctgctgcaggccgaggtgctctccagacaaattacaagccctgtctctggcatcaatggcgatattcgggctaaaaagatcgcctccatcgctgacgtgtgtgaaagcatgaaagagcagctgcttgttctggtggaatgggccaagtacattcccgcgttttgcgagctccctctggatgaccaggtcgcccttctgcgcgctcacgccggggagcatctcctgctgggagctaccaagagatccatggtgttcaaagacgtgctcctgcttggcaacgattatatcgtcccccggcactgtcctgaactggccgagatgtctagagttagcattcgcatcctcgacgaactggtgcttccgtttcaggagctgcaaattgatgacaatgaatacgcctacctcaaggctatcattttctttgatcccgacgcgaaagggctgtccgatcctggaaagatcaaacggctgagaagccaggtgcaggtctctctcgaggactatatcaacgatcgccagtacgactcccggggcagattcggggagctgcttctgctcctgcccacgcttcaaagcattacctggcagatgatcgaacagattcaatttatcaagctgttcggaatggccaaaattgataatctcctgcaggagatgctgctcggcggctctcctagcgacgctccccatgcccaccacccgctgcatcctcaccttatgcaggaacatatggggacaaacgtgatcgttgccaataccatgcccacacacctgtccaacggacagatgtgcgagtggcctcgcccccggggccaagctgccacccccgaaacgcctcagccgtctccccctgggggaagcggctccgagccctataagctcctgcctggggcggtggctacaatcgtcaagcccctgagcgccattccgcagcctaccatcacaaaacaggaggtgatttgaggactagtccctgttcccagagcccacttttttttctttttttgaaataaaatagcctgtctttcagatctaaaaaaaaaaaaaaaaaaaaaaaaaaaaaaaaaaaaaaaaaaaaaaaaaaaaaaaaaaaaaaaaaaaaaaaaaaaaaaaaaaaaaaaaaaaaaaaaaaaa

SEQ ID NO: 4494 - RNA, 1673 nt, synthetic construct
  misc_feature 1..1673: note = mRNA a-1 (A100) (opt5) from Homo sapiens__NP_000448.3__HNF4A(1-474)(R2V)
  source 1..1673: mol_type = other RNA
aggagagtcccgcagtcggcgtccagcggctctgcttgttcgtgtgtgtgtcgttgcaggccttattcaagcttaccatggtgctgagcaagaccctcgtcgacatggatatggccgactactccgctgccctggatcccgcgtatacaacgcttgagttcgaaaacgttcaggtgctgaccatgggcaatgacacatctcctagcgaggggaccaacctcaatgctccgaactccctgggagtgtctgccctttgcgccatctgtggcgatagagctacagggaaacactacggagccagctcctgcgacggctgtaaggggtttttccggcgctctgtccggaaaaatcatatgtatagctgcagattttcccgccaatgtgtggttgataaggacaaaagaaaccagtgccggtactgtcgcctgaagaagtgcttcagagctggaatgaaaaaggaagccgtgcagaatgagcgggatcgcattagcaccagacggtcttcctatgaagacagctctctcccctccatcaacgcgctgctgcaggccgaggtcctcagccgccaaattacatctcctgtgtccggcatcaatggcgatattagagctaaaaagatcgccagcatcgctgacgtttgtgagtccatgaaagaacagctgcttgtgctggtcgagtgggccaagtacattcccgcgttttgcgaactccctctggatgaccaggtggcccttctgcgggctcacgccggggagcatctcctgctgggagctaccaagcgctctatggtgttcaaagacgtcctcctgcttggcaacgattatatcgttcccagacactgtcctgagctggccgaaatgagccgggtgtccattagaatcctcgacgagctggtgcttccgtttcaggaactgcaaattgatgacaatgagtacgcctacctcaaggctatcattttctttgatcccgacgcgaaagggctgagcgatcctggaaagatcaaacgcctgcggtctcaggtccaggtgtccctcgaagactatatcaacgatagacagtacgacagccgcggccggttcggggagctgcttctgctcctgcccacgcttcaatctattacctggcagatgatcgagcagattcaatttatcaagctgttcggaatggccaaaattgataatctcctgcaggaaatgctgctcggcggcagcccttccgacgctccccatgcccaccacccgctgcatcctcaccttatgcaggagcatatggggacaaacgttatcgtggccaataccatgcccacacacctgtctaacggacagatgtgcgaatggcctagaccccgcggccaagctgccacccccgagacgcctcagccgagccctcccgggggatccggcagcgaaccctataagctcctgcctggggcggtcgctacaatcgtgaagcccctgtctgccattccgcagcctaccatcacaaaacaggaggttatttgaggactagtccctgttcccagagcccacttttttttctttttttgaaataaaatagcctgtctttcagatctaaaaaaaaaaaaaaaaaaaaaaaaaaaaaaaaaaaaaaaaaaaaaaaaaaaaaaaaaaaaaaaaaaaaaaaaaaaaaaaaaaaaaaaaaaaaaaaaaaaa

SEQ ID NO: 4495 - RNA, 1673 nt, synthetic construct
  misc_feature 1..1673: note = mRNA a-1 (A100) (opt5) from Homo sapiens__NP_000448.3__HNF4A(1-474)(R2V_K5V)
  source 1..1673: mol_type = other RNA
aggagagtcccgcagtcggcgtccagcggctctgcttgttcgtgtgtgtgtcgttgcaggccttattcaagcttaccatggtgctgagcgtcaccctcgttgacatggatatggccgactactccgctgccctggatcccgcgtatacaacgcttgagttcgaaaacgtccaggtgctgaccatgggcaatgacacatctcctagcgaggggaccaacctcaatgctccgaactccctgggagtgtctgccctttgcgccatctgtggcgatagagctacagggaagcactacggagccagctcctgcgacggctgtaaagggtttttccggcgctctgtgagaaagaatcatatgtatagctgccggttttcccgccaatgtgttgtggataaagacaagagaaaccagtgccggtactgtcgcctgaaaaagtgcttcagagctggaatgaagaaagaagccgtccagaatgagcgggatcgcattagcaccagacggtcttcctatgaagacagctctctcccctccatcaacgcgctgctgcaggccgaggtgctcagccgccaaattacatctcctgtttccggcatcaatggcgatattagagctaagaaaatcgccagcatcgctgacgtgtgtgagtccatgaaggaacagctgcttgtcctggtggagtgggccaaatacattcccgcgttttgcgaactccctctggatgaccaggtggcccttctgcgggctcacgccggggagcatctcctgctgggagctaccaagcgctctatggtcttcaaggacgttctcctgcttggcaacgattatatcgtgcccagacactgtcctgagctggccgaaatgagccgggtgtccattagaatcctcgacgagctggtccttccgtttcaggaactgcaaattgatgacaatgagtacgcctacctcaaagctatcattttctttgatcccgacgcgaaggggctgagcgatcctggaaaaatcaagcgcctgcggtctcaggtgcaggtttccctcgaagactatatcaacgatagacagtacgacagccgcggccggttcggggagctgcttctgctcctgcccacgcttcaatctattacctggcagatgatcgagcagattcaatttatcaaactgttcggaatggccaagattgataatctcctgcaggaaatgctgctcggcggcagcccttccgacgctccccatgcccaccacccgctgcatcctcaccttatgcaggagcatatggggacaaacgtgatcgtcgccaataccatgcccacacacctgtctaacggacagatgtgcgaatggcctagaccccgcggccaagctgccacccccgagacgcctcagccgagccctcccgggggatccggcagcgaaccctataaactcctgcctggggcggtggctacaatcgttaagcccctgtctgccattccgcagcctaccatcacaaagcaggaggtgatttgaggactagtccctgttcccagagcccacttttttttctttttttgaaataaaatagcctgtctttcagatctaaaaaaaaaaaaaaaaaaaaaaaaaaaaaaaaaaaaaaaaaaaaaaaaaaaaaaaaaaaaaaaaaaaaaaaaaaaaaaaaaaaaaaaaaaaaaaaaaaaa

SEQ ID NO: 4496 - RNA, 1673 nt, synthetic construct
  misc_feature 1..1673: note = mRNA a-1 (A100) (opt5) from Homo sapiens__NP_000448.3__HNF4A(1-474)(K179R_K180R)
  source 1..1673: mol_type = other RNA
aggagagtcccgcagtcggcgtccagcggctctgcttgttcgtgtgtgtgtcgttgcaggccttattcaagcttaccatgagactgagcaagaccctcgtggacatggatatggccgactactccgctgccctggatcccgcgtatacaacgcttgagttcgaaaacgtccaggttctgaccatgggcaatgacacatctcctagcgaggggaccaacctcaatgctccgaactccctgggagtgtctgccctttgcgccatctgtggcgatcgggctacagggaaacactacggagccagctcctgcgacggctgtaaggggtttttccgcagatctgtgcggaaaaatcatatgtatagctgccgcttttccagacaatgtgtcgtggataaggacaaacggaaccagtgccgctactgtagactgaagaagtgcttccgggctggaatgaaaaaggaagccgttcagaatgagcgcgatagaattagcacccggcgcagctcctatgaagacagctctctcccctccatcaacgcgctgctgcaggccgaggtgctcagcagacaaattacatctcctgtctccggcatcaatggcgatattcgggctcgcagaatcgccagcatcgctgacgtgtgtgagtccatgaaagaacagctgcttgttctggtggagtgggccaagtacattcccgcgttttgcgaactccctctggatgaccaggtcgcccttctgcgggctcacgccggggagcatctcctgctgggagctaccaaaagatctatggtgttcaaggacgtgctcctgcttggcaacgattatatcgtcccccgccactgtcctgagctggccgaaatgagccgggtttccattagaatcctcgacgagctggtgcttccgtttcaggaactgcaaattgatgacaatgagtacgcctacctcaaggctatcattttctttgatcccgacgcgaaagggctgagcgatcctggaaagatcaaacgcctgcggtctcaggtgcaggtctccctcgaagactatatcaacgatagacagtacgacagccgcggccggttcggggagctgcttctgctcctgcccacgcttcaatctattacctggcagatgatcgagcagattcaatttatcaagctgttcggaatggccaaaattgataatctcctgcaggaaatgctgctcggcggcagcccttccgacgctccccatgcccaccacccgctgcatcctcaccttatgcaggagcatatggggacaaacgtgatcgttgccaataccatgcccacacacctgtctaacggacagatgtgcgaatggcctagaccccgcggccaagctgccacccccgagacgcctcagccgtctccccctgggggatccggcagcgaaccctataagctcctgcctggggcggtggctacaatcgtcaaacccctgtctgccattccgcagcctaccatcacaaagcaggaggtgatttgaggactagtccctgttcccagagcccacttttttttctttttttgaaataaaatagcctgtctttcagatctaaaaaaaaaaaaaaaaaaaaaaaaaaaaaaaaaaaaaaaaaaaaaaaaaaaaaaaaaaaaaaaaaaaaaaaaaaaaaaaaaaaaaaaaaaaaaaaaaaaa

SEQ ID NO: 4497 - RNA, 1673 nt, synthetic construct
  misc_feature 1..1673: note = mRNA a-1 (A100) (opt5) from Homo sapiens__NP_000448.3__HNF4A(1-474)(K234R)
  source 1..1673: mol_type = other RNA
aggagagtcccgcagtcggcgtccagcggctctgcttgttcgtgtgtgtgtcgttgcaggccttattcaagcttaccatgagactgagcaagaccctcgtggacatggatatggccgactactccgctgccctggatcccgcgtatacaacgcttgagttcgaaaacgtccaggttctgaccatgggcaatgacacatctcctagcgaggggaccaacctcaatgctccgaactccctgggagtgtctgccctttgcgccatctgtggcgatcgggctacagggaaacactacggagccagctcctgcgacggctgtaaggggtttttccgcagatctgtgcggaaaaatcatatgtatagctgccgcttttccagacaatgtgtcgtggataaggacaaacggaaccagtgccgctactgtagactgaagaagtgcttccgggctggaatgaaaaaggaagccgttcagaatgagcgcgatagaattagcacccggcgcagctcctatgaagacagctctctcccctccatcaacgcgctgctgcaggccgaggtgctcagcagacaaattacatctcctgtctccggcatcaatggcgatattcgggctaaaaagatcgccagcatcgctgacgtgtgtgagtccatgaaagaacagctgcttgttctggtggagtgggccaagtacattcccgcgttttgcgaactccctctggatgaccaggtcgcccttctgcgcgctcacgccggggagcatctcctgctgggagctaccagacggtctatggtgttcaaggacgtgctcctgcttggcaacgattatatcgtccccagacactgtcctgagctggccgaaatgagccgcgtttccattcggatcctcgacgagctggtgcttccgtttcaggaactgcaaattgatgacaatgagtacgcctacctcaaagctatcattttctttgatcccgacgcgaaggggctgagcgatcctggaaaaatcaagagactgcgctctcaggtgcaggtctccctcgaagactatatcaacgatcggcagtacgacagcagaggccgcttcggggagctgcttctgctcctgcccacgcttcaatctattacctggcagatgatcgagcagattcaatttatcaaactgttcggaatggccaagattgataatctcctgcaggaaatgctgctcggcggcagcccttccgacgctccccatgcccaccacccgctgcatcctcaccttatgcaggagcatatggggacaaacgtgatcgttgccaataccatgcccacacacctgtctaacggacagatgtgcgaatggcctcggcccagaggccaagctgccacccccgagacgcctcagccgtctccccctgggggatccggcagcgaaccctataaactcctgcctggggcggtggctacaatcgtcaagcccctgtctgccattccgcagcctaccatcacaaagcaggaggtgatttgaggactagtccctgttcccagagcccacttttttttctttttttgaaataaaatagcctgtctttcagatctaaaaaaaaaaaaaaaaaaaaaaaaaaaaaaaaaaaaaaaaaaaaaaaaaaaaaaaaaaaaaaaaaaaaaaaaaaaaaaaaaaaaaaaaaaaaaaaaaaaa

SEQ ID NO: 4498 - RNA, 1673 nt, synthetic construct
  misc_feature 1..1673: note = mRNA a-1 (A100) (opt5) from Homo sapiens__NP_000448.3__HNF4A(1-474)(K300R)
  source 1..1673: mol_type = other RNA
aggagagtcccgcagtcggcgtccagcggctctgcttgttcgtgtgtgtgtcgttgcaggccttattcaagcttaccatgagactgagcaagaccctcgtggacatggatatggccgactactccgctgccctggatcccgcgtatacaacgcttgagttcgaaaacgtccaggttctgaccatgggcaatgacacatctcctagcgaggggaccaacctcaatgctccgaactccctgggagtgtctgccctttgcgccatctgtggcgatcgggctacagggaaacactacggagccagctcctgcgacggctgtaaggggtttttccgcagatctgtgcggaaaaatcatatgtatagctgccgcttttccagacaatgtgtcgtggataaggacaaacggaaccagtgccgctactgtagactgaagaagtgcttccgggctggaatgaaaaaggaagccgttcagaatgagcgcgatagaattagcacccggcgcagctcctatgaagacagctctctcccctccatcaacgcgctgctgcaggccgaggtgctcagcagacaaattacatctcctgtctccggcatcaatggcgatattcgggctaaaaagatcgccagcatcgctgacgtgtgtgagtccatgaaagaacagctgcttgttctggtggagtgggccaagtacattcccgcgttttgcgaactccctctggatgaccaggtcgcccttctgcgcgctcacgccggggagcatctcctgctgggagctaccaagagatctatggtgttcaaagacgtgctcctgcttggcaacgattatatcgtcccccggcactgtcctgagctggccgaaatgagcagagtttccattcgcatcctcgacgagctggtgcttccgtttcaggaactgcaaattgatgacaatgagtacgcctacctcaaggctatcattttctttgatcccgacgcgcgggggctgagcgatcctggaaaaatcaagagactgcgctctcaggtgcaggtctccctcgaagactatatcaacgatcggcagtacgacagcagaggccgcttcggggagctgcttctgctcctgcccacgcttcaatctattacctggcagatgatcgagcagattcaatttatcaaactgttcggaatggccaagattgataatctcctgcaggaaatgctgctcggcggcagcccttccgacgctccccatgcccaccacccgctgcatcctcaccttatgcaggagcatatggggacaaacgtgatcgttgccaataccatgcccacacacctgtctaacggacagatgtgcgaatggcctcggcccagaggccaagctgccacccccgagacgcctcagccgtctccccctgggggatccggcagcgaaccctataaactcctgcctggggcggtggctacaatcgtcaagcccctgtctgccattccgcagcctaccatcacaaagcaggaggtgatttgaggactagtccctgttcccagagcccacttttttttctttttttgaaataaaatagcctgtctttcagatctaaaaaaaaaaaaaaaaaaaaaaaaaaaaaaaaaaaaaaaaaaaaaaaaaaaaaaaaaaaaaaaaaaaaaaaaaaaaaaaaaaaaaaaaaaaaaaaaaaaa

SEQ ID NO: 4499 - RNA, 1673 nt, synthetic construct
  misc_feature 1..1673: note = mRNA a-1 (A100) (opt5) from Homo sapiens__NP_000448.3__HNF4A(1-474)(K300R_K307R_K309R)
  source 1..1673: mol_type = other RNA
aggagagtcccgcagtcggcgtccagcggctctgcttgttcgtgtgtgtgtcgttgcaggccttattcaagcttaccatgagactgagcaagaccctcgtggacatggatatggccgactactccgctgccctggatcccgcgtatacaacgcttgagttcgaaaacgtccaggttctgaccatgggcaatgacacatctcctagcgaggggaccaacctcaatgctccgaactccctgggagtgtctgccctttgcgccatctgtggcgatcgggctacagggaaacactacggagccagctcctgcgacggctgtaaggggtttttccgcagatctgtgcggaaaaatcatatgtatagctgccgcttttccagacaatgtgtcgtggataaggacaaacggaaccagtgccgctactgtagactgaagaagtgcttccgggctggaatgaaaaaggaagccgttcagaatgagcgcgatagaattagcacccggcgcagctcctatgaagacagctctctcccctccatcaacgcgctgctgcaggccgaggtgctcagcagacaaattacatctcctgtctccggcatcaatggcgatattcgggctaaaaagatcgccagcatcgctgacgtgtgtgagtccatgaaagaacagctgcttgttctggtggagtgggccaagtacattcccgcgttttgcgaactccctctggatgaccaggtcgcccttctgcgcgctcacgccggggagcatctcctgctgggagctaccaagagatctatggtgttcaaagacgtgctcctgcttggcaacgattatatcgtcccccggcactgtcctgagctggccgaaatgagcagagtttccattcgcatcctcgacgagctggtgcttccgtttcaggaactgcaaattgatgacaatgagtacgcctacctcaaggctatcattttctttgatcccgacgcgcgggggctgagcgatcctggaagaatccgccggctgagatctcaggtgcaggtctccctcgaagactatatcaacgatcgccagtacgacagccggggcagattcggggagctgcttctgctcctgcccacgcttcaatctattacctggcagatgatcgagcagattcaatttatcaaactgttcggaatggccaagattgataatctcctgcaggaaatgctgctcggcggcagcccttccgacgctccccatgcccaccacccgctgcatcctcaccttatgcaggagcatatggggacaaacgtgatcgttgccaataccatgcccacacacctgtctaacggacagatgtgcgaatggcctcgcccccggggccaagctgccacccccgagacgcctcagccgtctccccctgggggatccggcagcgaaccctataaactcctgcctggggcggtggctacaatcgtcaagcccctgtctgccattccgcagcctaccatcacaaaacaggaggtgatttgaggactagtccctgttcccagagcccacttttttttctttttttgaaataaaatagcctgtctttcagatctaaaaaaaaaaaaaaaaaaaaaaaaaaaaaaaaaaaaaaaaaaaaaaaaaaaaaaaaaaaaaaaaaaaaaaaaaaaaaaaaaaaaaaaaaaaaaaaaaaaa

SEQ ID NO: 4500 - RNA, 1673 nt, synthetic construct
  misc_feature 1..1673: note = mRNA a-1 (A100) (opt5) from Homo sapiens__NP_000448.3__HNF4A(1-474)(K447R_K470R)
  source 1..1673: mol_type = other RNA
aggagagtcccgcagtcggcgtccagcggctctgcttgttcgtgtgtgtgtcgttgcaggccttattcaagcttaccatgagactgagcaagaccctcgtggacatggatatggccgactactccgctgccctggatcccgcgtatacaacgcttgagttcgaaaacgtccaggttctgaccatgggcaatgacacatctcctagcgaggggaccaacctcaatgctccgaactccctgggagtgtctgccctttgcgccatctgtggcgatcgggctacagggaaacactacggagccagctcctgcgacggctgtaaggggtttttccgcagatctgtgcggaaaaatcatatgtatagctgccgcttttccagacaatgtgtcgtggataaggacaaacggaaccagtgccgctactgtagactgaagaagtgcttccgggctggaatgaaaaaggaagccgttcagaatgagcgcgatagaattagcacccggcgcagctcctatgaagacagctctctcccctccatcaacgcgctgctgcaggccgaggtgctcagcagacaaattacatctcctgtctccggcatcaatggcgatattcgggctaaaaagatcgccagcatcgctgacgtgtgtgagtccatgaaagaacagctgcttgttctggtggagtgggccaagtacattcccgcgttttgcgaactccctctggatgaccaggtcgcccttctgcgcgctcacgccggggagcatctcctgctgggagctaccaagagatctatggtgttcaaagacgtgctcctgcttggcaacgattatatcgtcccccggcactgtcctgagctggccgaaatgagcagagtttccattcgcatcctcgacgagctggtgcttccgtttcaggaactgcaaattgatgacaatgagtacgcctacctcaaggctatcattttctttgatcccgacgcgaaagggctgagcgatcctggaaagatcaaacggctgagatctcaggtgcaggtctccctcgaagactatatcaacgatcgccagtacgacagccggggcagattcggggagctgcttctgctcctgcccacgcttcaatctattacctggcagatgatcgagcagattcaatttatcaagctgttcggaatggccaaaattgataatctcctgcaggaaatgctgctcggcggcagcccttccgacgctccccatgcccaccacccgctgcatcctcaccttatgcaggagcatatggggacaaacgtgatcgttgccaataccatgcccacacacctgtctaacggacagatgtgcgaatggcctcgcccccggggccaagctgccacccccgagacgcctcagccgtctccccctgggggatccggcagcgaaccctatagactcctgcctggggcggtggctacaatcgtcaagcccctgtctgccattccgcagcctaccatcacacgccaggaggtgatttgaggactagtccctgttcccagagcccacttttttttctttttttgaaataaaatagcctgtctttcagatctaaaaaaaaaaaaaaaaaaaaaaaaaaaaaaaaaaaaaaaaaaaaaaaaaaaaaaaaaaaaaaaaaaaaaaaaaaaaaaaaaaaaaaaaaaaaaaaaaaaa

SEQ ID NO: 4501 - RNA, 1673 nt, synthetic construct
  misc_feature 1..1673: note = mRNA a-1 (A100) (opt5) from Homo sapiens__NP_000448.3__HNF4A(1-474)(K458R)
  source 1..1673: mol_type = other RNA
aggagagtcccgcagtcggcgtccagcggctctgcttgttcgtgtgtgtgtcgttgcaggccttattcaagcttaccatgagactgagcaagaccctcgtggacatggatatggccgactactccgctgccctggatcccgcgtatacaacgcttgagttcgaaaacgtccaggttctgaccatgggcaatgacacatctcctagcgaggggaccaacctcaatgctccgaactccctgggagtgtctgccctttgcgccatctgtggcgatcgggctacagggaaacactacggagccagctcctgcgacggctgtaaggggtttttccgcagatctgtgcggaaaaatcatatgtatagctgccgcttttccagacaatgtgtcgtggataaggacaaacggaaccagtgccgctactgtagactgaagaagtgcttccgggctggaatgaaaaaggaagccgttcagaatgagcgcgatagaattagcacccggcgcagctcctatgaagacagctctctcccctccatcaacgcgctgctgcaggccgaggtgctcagcagacaaattacatctcctgtctccggcatcaatggcgatattcgggctaaaaagatcgccagcatcgctgacgtgtgtgagtccatgaaagaacagctgcttgttctggtggagtgggccaagtacattcccgcgttttgcgaactccctctggatgaccaggtcgcccttctgcgcgctcacgccggggagcatctcctgctgggagctaccaagagatctatggtgttcaaagacgtgctcctgcttggcaacgattatatcgtcccccggcactgtcctgagctggccgaaatgagcagagtttccattcgcatcctcgacgagctggtgcttccgtttcaggaactgcaaattgatgacaatgagtacgcctacctcaaggctatcattttctttgatcccgacgcgaaagggctgagcgatcctggaaagatcaaacggctgagatctcaggtgcaggtctccctcgaagactatatcaacgatcgccagtacgacagccggggcagattcggggagctgcttctgctcctgcccacgcttcaatctattacctggcagatgatcgagcagattcaatttatcaagctgttcggaatggccaaaattgataatctcctgcaggaaatgctgctcggcggcagcccttccgacgctccccatgcccaccacccgctgcatcctcaccttatgcaggagcatatggggacaaacgtgatcgttgccaataccatgcccacacacctgtctaacggacagatgtgcgaatggcctcgcccccggggccaagctgccacccccgagacgcctcagccgtctccccctgggggatccggcagcgaaccctataagctcctgcctggggcggtggctacaatcgtcagacccctgtctgccattccgcagcctaccatcacaaagcaggaggtgatttgaggactagtccctgttcccagagcccacttttttttctttttttgaaataaaatagcctgtctttcagatctaaaaaaaaaaaaaaaaaaaaaaaaaaaaaaaaaaaaaaaaaaaaaaaaaaaaaaaaaaaaaaaaaaaaaaaaaaaaaaaaaaaaaaaaaaaaaaaaaaaa

SEQ ID NO: 4502 - RNA, 1673 nt, synthetic construct
  misc_feature 1..1673: note = mRNA a-1 (A100) (opt5) from Homo sapiens__NP_000448.3__HNF4A(1-474)(K106R_K108R_K126R_K127R)
  source 1..1673: mol_type = other RNA
aggagagtcccgcagtcggcgtccagcggctctgcttgttcgtgtgtgtgtcgttgcaggccttattcaagcttaccatgagactgagcaagaccctcgtggacatggatatggccgactactccgctgccctggatcccgcgtatacaacgcttgagttcgaaaacgtccaggttctgaccatgggcaatgacacatctcctagcgaggggaccaacctcaatgctccgaactccctgggagtgtctgccctttgcgccatctgtggcgatcgggctacagggaaacactacggagccagctcctgcgacggctgtaaggggtttttccgcagatctgtgcggaaaaatcatatgtatagctgccgcttttccagacaatgtgtcgtggatcgggaccgcagaaaccagtgccggtactgtcgcctgaagaaatgcttcagagctggaatgcggcgcgaagccgttcagaatgagagagatcggattagcacccgcagatcttcctatgaagacagctctctcccctccatcaacgcgctgctgcaggccgaggtgctcagccggcaaattacatctcctgtctccggcatcaatggcgatattagagctaagaagatcgccagcatcgctgacgtgtgtgagtccatgaaagaacagctgcttgttctggtggagtgggccaagtacattcccgcgttttgcgaactccctctggatgaccaggtcgcccttctgcgcgctcacgccggggagcatctcctgctgggagctaccaaacggtctatggtgttcaaggacgtgctcctgcttggcaacgattatatcgtccccagacactgtcctgagctggccgaaatgagccgcgtttccattcggatcctcgacgagctggtgcttccgtttcaggaactgcaaattgatgacaatgagtacgcctacctcaaagctatcattttctttgatcccgacgcgaaggggctgagcgatcctggaaagatcaaaagactgcgctctcaggtgcaggtctccctcgaagactatatcaacgatcggcagtacgacagcagaggccgcttcggggagctgcttctgctcctgcccacgcttcaatctattacctggcagatgatcgagcagattcaatttatcaagctgttcggaatggccaaaattgataatctcctgcaggaaatgctgctcggcggcagcccttccgacgctccccatgcccaccacccgctgcatcctcaccttatgcaggagcatatggggacaaacgtgatcgttgccaataccatgcccacacacctgtctaacggacagatgtgcgaatggcctcggcccagaggccaagctgccacccccgagacgcctcagccgagccctcccgggggatccggcagcgaaccctataagctcctgcctggggcggtggctacaatcgtcaaacccctgtctgccattccgcagcctaccatcacaaagcaggaggtgatttgaggactagtccctgttcccagagcccacttttttttctttttttgaaataaaatagcctgtctttcagatctaaaaaaaaaaaaaaaaaaaaaaaaaaaaaaaaaaaaaaaaaaaaaaaaaaaaaaaaaaaaaaaaaaaaaaaaaaaaaaaaaaaaaaaaaaaaaaaaaaaa

SEQ ID NO: 4503 - RNA, 1673 nt, synthetic construct
  misc_feature 1..1673: note = mRNA a-1 (A100) (opt5) from Homo sapiens__NP_000448.3__HNF4A(1-474)(E285Q)
  source 1..1673: mol_type = other RNA
aggagagtcccgcagtcggcgtccagcggctctgcttgttcgtgtgtgtgtcgttgcaggccttattcaagcttaccatgagactgagcaagaccctcgtggacatggatatggccgactactccgctgccctggatcccgcgtatacaacgcttgagttcgaaaacgtccaggttctgaccatgggcaatgacacatctcctagcgaggggaccaacctcaatgctccgaactccctgggagtgtctgccctttgcgccatctgtggcgatcgggctacagggaaacactacggagccagctcctgcgacggctgtaaggggtttttccgcagatctgtgcggaaaaatcatatgtatagctgccgcttttccagacaatgtgtcgtggataaggacaaacggaaccagtgccgctactgtagactgaagaagtgcttccgggctggaatgaaaaaggaagccgttcagaatgagcgcgatagaattagcacccggcgcagctcctatgaagacagctctctcccctccatcaacgcgctgctgcaggccgaggtgctcagcagacaaattacatctcctgtctccggcatcaatggcgatattcgggctaaaaagatcgccagcatcgctgacgtgtgtgagtccatgaaagaacagctgcttgttctggtggagtgggccaagtacattcccgcgttttgcgaactccctctggatgaccaggtcgcccttctgcgcgctcacgccggggagcatctcctgctgggagctaccaagagatctatggtgttcaaagacgtgctcctgcttggcaacgattatatcgtcccccggcactgtcctgagctggccgaaatgagcagagtttccattcgcatcctcgacgagctggtgcttccgtttcaggaactgcaaattgatgacaatcagtacgcctacctcaaggctatcattttctttgatcccgacgcgaaagggctgagcgatcctggaaagatcaaacggctgagatctcaggtgcaggtctccctcgaggactatatcaacgatcgccaatacgacagccggggcagattcggggaactgcttctgctcctgcccacgcttcagtctattacctggcagatgatcgagcaaattcagtttatcaagctgttcggaatggccaaaattgataatctcctgcaggagatgctgctcggcggcagcccttccgacgctccccatgcccaccacccgctgcatcctcaccttatgcaggaacatatggggacaaacgtgatcgttgccaataccatgcccacacacctgtctaacggacaaatgtgcgagtggcctcgcccccggggccaggctgccacccccgaaacgcctcagccgtctccccctgggggatccggcagcgagccctataagctcctgcctggggcggtggctacaatcgtcaagcccctgtctgccattccgcagcctaccatcacaaaacaagaagtgatttgaggactagtccctgttcccagagcccacttttttttctttttttgaaataaaatagcctgtctttcagatctaaaaaaaaaaaaaaaaaaaaaaaaaaaaaaaaaaaaaaaaaaaaaaaaaaaaaaaaaaaaaaaaaaaaaaaaaaaaaaaaaaaaaaaaaaaaaaaaaaaa

SEQ ID NO: 4504 - RNA, 1673 nt, synthetic construct
  misc_feature 1..1673: note = mRNA a-1 (A100) (opt5) from Homo sapiens__NP_000448.3__HNF4A(1-474)(T166E)
  source 1..1673: mol_type = other RNA
aggagagtcccgcagtcggcgtccagcggctctgcttgttcgtgtgtgtgtcgttgcaggccttattcaagcttaccatgagactgagcaagaccctcgtggacatggatatggccgactactccgctgccctggatcccgcgtatacaacgcttgagttcgaaaacgtccaggttctgaccatgggcaatgacacatctcctagcgaggggaccaacctcaatgctccgaactccctgggagtgtctgccctttgcgccatctgtggcgatcgggctacagggaaacactacggagccagctcctgcgacggctgtaaggggtttttccgcagatctgtgcggaaaaatcatatgtatagctgccgcttttccagacaatgtgtcgtggataaggacaaacggaaccagtgccgctactgtagactgaagaagtgcttccgggctggaatgaaaaaggaagccgttcagaatgagcgcgatagaattagcacccggcgcagctcctatgaagacagctctctcccctccatcaacgcgctgctgcaggccgaggtgctcagcagacaaattgagtctcctgtctccggcatcaatggcgatattcgggctaaaaagatcgccagcatcgctgacgtgtgtgaatccatgaaagagcagctgcttgttctggtggaatgggccaagtacattcccgcgttttgcgagctccctctggatgaccaggtcgcccttctgcgcgctcacgccggggagcatctcctgctgggagctacaaagagatctatggtgttcaaagacgtgctcctgcttggcaacgattatatcgtcccccggcactgtcctgaactggccgagatgagcagagtttccattcgcatcctcgacgaactggtgcttccgtttcaggagctgcaaattgatgacaatgaatacgcctacctcaaggctatcattttctttgatcccgacgcgaaagggctgagcgatcctggaaagatcaaacggctgagatctcaggtgcaggtctccctcgaggactatatcaacgatcgccagtacgacagccggggcagattcggggagctgcttctgctcctgcccacccttcaatctattacgtggcagatgatcgaacagattcaatttatcaagctgttcggaatggccaaaattgataatctcctgcaggagatgctgctcggcggcagcccttccgacgctccccatgcccaccacccgctgcatcctcaccttatgcaggaacatatggggaccaacgtgatcgttgccaatacaatgcccacccacctgtctaacggacagatgtgcgagtggcctcgcccccggggccaagctgccacacccgaaacccctcagccgtctccccctgggggatccggcagcgagccctataagctcctgcctggggcggtggctacgatcgtcaagcccctgtctgccattccgcagcctacaatcaccaaacaggaggtgatttgaggactagtccctgttcccagagcccacttttttttctttttttgaaataaaatagcctgtctttcagatctaaaaaaaaaaaaaaaaaaaaaaaaaaaaaaaaaaaaaaaaaaaaaaaaaaaaaaaaaaaaaaaaaaaaaaaaaaaaaaaaaaaaaaaaaaaaaaaaaaaa

SEQ ID NO: 4505 - RNA, 1673 nt, synthetic construct
  misc_feature 1..1673: note = mRNA a-1 (A100) (opt5) from Homo sapiens__NP_000448.3__HNF4A(1-474)(S148A)
  source 1..1673: mol_type = other RNA
aggagagtcccgcagtcggcgtccagcggctctgcttgttcgtgtgtgtgtcgttgcaggccttattcaagcttaccatgagactgagcaagaccctcgtggacatggatatggccgactactccgctgccctggatcccgcgtatacaacgcttgagttcgaaaacgtccaggttctgaccatgggcaatgacacatctcctagcgaggggaccaacctcaatgctccgaactccctgggagtgtctgccctttgcgccatctgtggcgatcgggctacagggaaacactacggagccagctcctgcgacggctgtaaggggtttttccgcagatctgtgcggaaaaatcatatgtatagctgccgcttttccagacaatgtgtcgtggataaggacaaacggaaccagtgccgctactgtagactgaagaagtgcttccgggctggaatgaaaaaggaagccgttcagaatgagcgcgatagaattagcacccggagatcttcctatgaagacagcgcgctcccctctatcaacgccctgctgcaggctgaggtgctctcccgccaaattacaagccctgtctctggcatcaatggcgatattcgggccaaaaagatcgcttccatcgccgacgtgtgtgagagcatgaaagaacagctgcttgttctggtggagtgggcgaagtacattcccgccttttgcgaactccctctggatgaccaggtcgcccttctgcgcgcccacgctggggagcatctcctgctgggagccaccaagagatccatggtgttcaaagacgtgctcctgcttggcaacgattatatcgtcccccggcactgtcctgagctggccgaaatgtctagagttagcattcgcatcctcgacgagctggtgcttccgtttcaggaactgcaaattgatgacaatgagtacgcttacctcaaggcgatcattttctttgatcccgacgccaaagggctgtccgatcctggaaagatcaaacggctgagaagccaggtgcaggtctctctcgaagactatatcaacgatcgccagtacgactcccggggcagattcggggagctgcttctgctcctgcccacgcttcaaagcattacctggcagatgatcgagcagattcaatttatcaagctgttcggaatggctaaaattgataatctcctgcaggaaatgctgctcggcggctctcctagcgacgctccccatgcccaccacccgctgcatcctcaccttatgcaggagcatatggggacaaacgtgatcgttgctaataccatgcccacacacctgtccaacggacagatgtgcgaatggcctcgcccccggggccaagccgcgacccccgagacgcctcagccgtctccccctgggggaagcggctccgaaccctataagctcctgcctggggctgtggccacaatcgtcaagcccctgagcgccattccgcagcctaccatcacaaaacaggaggtgatttgaggactagtccctgttcccagagcccacttttttttctttttttgaaataaaatagcctgtctttcagatctaaaaaaaaaaaaaaaaaaaaaaaaaaaaaaaaaaaaaaaaaaaaaaaaaaaaaaaaaaaaaaaaaaaaaaaaaaaaaaaaaaaaaaaaaaaaaaaaaaaa

SEQ ID NO: 4506 - RNA, 1673 nt, synthetic construct
  misc_feature 1..1673: note = mRNA a-1 (A100) (opt5) from Homo sapiens__NP_000448.3__HNF4A(1-474)(S148E)
  source 1..1673: mol_type = other RNA
aggagagtcccgcagtcggcgtccagcggctctgcttgttcgtgtgtgtgtcgttgcaggccttattcaagcttaccatgagactgagcaagaccctcgtggacatggatatggccgactactccgctgccctggatcccgcgtatacaacgcttgagttcgaaaacgtccaggttctgaccatgggcaatgacacatctcctagcgaggggaccaacctcaatgctccgaactccctgggagtgtctgccctttgcgccatctgtggcgatcgggctacagggaaacactacggagccagctcctgcgacggctgtaaggggtttttccgcagatctgtgcggaaaaatcatatgtatagctgccgcttttccagacaatgtgtcgtggataaggacaaacggaaccagtgccgctactgtagactgaagaagtgcttccgggctggaatgaaaaaggaagccgttcagaatgagcgcgatagaattagcacccggagatcttcctatgaagacagcgagctcccctctatcaacgcgctgctgcaggccgaggtgctctcccgccaaattacaagccctgtctctggcatcaatggcgatattcgggctaaaaagatcgcctccatcgctgacgtgtgtgaaagcatgaaagagcagctgcttgttctggtggaatgggccaagtacattcccgcgttttgcgagctccctctggatgaccaggtcgcccttctgcgcgctcacgccggggagcatctcctgctgggagctaccaagagatccatggtgttcaaagacgtgctcctgcttggcaacgattatatcgtcccccggcactgtcctgaactggccgagatgtctagagttagcattcgcatcctcgacgaactggtgcttccgtttcaggagctgcaaattgatgacaatgaatacgcctacctcaaggctatcattttctttgatcccgacgcgaaagggctgtccgatcctggaaagatcaaacggctgagaagccaggtgcaggtctctctcgaggactatatcaacgatcgccagtacgactcccggggcagattcggggagctgcttctgctcctgcccacgcttcaaagcattacctggcagatgatcgaacagattcaatttatcaagctgttcggaatggccaaaattgataatctcctgcaggagatgctgctcggcggctctcctagcgacgctccccatgcccaccacccgctgcatcctcaccttatgcaggaacatatggggacaaacgtgatcgttgccaataccatgcccacacacctgtccaacggacagatgtgcgagtggcctcgcccccggggccaagctgccacccccgaaacgcctcagccgtctccccctgggggaagcggctccgagccctataagctcctgcctggggcggtggctacaatcgtcaagcccctgagcgccattccgcagcctaccatcacaaaacaggaggtgatttgaggactagtccctgttcccagagcccacttttttttctttttttgaaataaaatagcctgtctttcagatctaaaaaaaaaaaaaaaaaaaaaaaaaaaaaaaaaaaaaaaaaaaaaaaaaaaaaaaaaaaaaaaaaaaaaaaaaaaaaaaaaaaaaaaaaaaaaaaaaaaa

SEQ ID NO: 4507 - RNA, 1673 nt, synthetic construct
  misc_feature 1..1673: note = mRNA a-1 (A100) (opt5) from Homo sapiens__NP_000448.3__HNF4A(1-474)(S183A)
  source 1..1673: mol_type = other RNA
aggagagtcccgcagtcggcgtccagcggctctgcttgttcgtgtgtgtgtcgttgcaggccttattcaagcttaccatgagactgagcaagaccctcgtggacatggatatggccgactactccgctgccctggatcccgcgtatacaacgcttgagttcgaaaacgtccaggttctgaccatgggcaatgacacatctcctagcgaggggaccaacctcaatgctccgaactccctgggagtgtctgccctttgcgccatctgtggcgatcgggctacagggaaacactacggagccagctcctgcgacggctgtaaggggtttttccgcagatctgtgcggaaaaatcatatgtatagctgccgcttttccagacaatgtgtcgtggataaggacaaacggaaccagtgccgctactgtagactgaagaagtgcttccgggctggaatgaaaaaggaagccgttcagaatgagcgcgatagaattagcacccggagatcttcctatgaagacagctctctcccctccatcaacgcgctgctgcaggccgaggtgctcagccgccaaattacatctcctgtctccggcatcaatggcgatattcgggctaaaaagatcgccgctatcgccgacgtgtgtgagagcatgaaagaacagctgcttgttctggtggagtgggcgaagtacattcccgccttttgcgaactccctctggatgaccaggtcgcccttctgcgcgcccacgctggggagcatctcctgctgggagccaccaagagatccatggtgttcaaagacgtgctcctgcttggcaacgattatatcgtcccccggcactgtcctgagctggccgaaatgtctagagttagcattcgcatcctcgacgagctggtgcttccgtttcaggaactgcaaattgatgacaatgagtacgcttacctcaaggcgatcattttctttgatcccgacgccaaagggctgtccgatcctggaaagatcaaacggctgagaagccaggtgcaggtctctctcgaagactatatcaacgatcgccagtacgactcccggggcagattcggggagctgcttctgctcctgcccacgcttcaaagcattacctggcagatgatcgagcagattcaatttatcaagctgttcggaatggctaaaattgataatctcctgcaggaaatgctgctcggcggctctcctagcgacgctccccatgcccaccacccgctgcatcctcaccttatgcaggagcatatggggacaaacgtgatcgttgctaataccatgcccacacacctgtccaacggacagatgtgcgaatggcctcgcccccggggccaagccgcgacccccgagacgcctcagccgtctccccctgggggaagcggctccgaaccctataagctcctgcctggggctgtggccacaatcgtcaagcccctgagcgccattccgcagcctaccatcacaaaacaggaggtgatttgaggactagtccctgttcccagagcccacttttttttctttttttgaaataaaatagcctgtctttcagatctaaaaaaaaaaaaaaaaaaaaaaaaaaaaaaaaaaaaaaaaaaaaaaaaaaaaaaaaaaaaaaaaaaaaaaaaaaaaaaaaaaaaaaaaaaaaaaaaaaaa

SEQ ID NO: 4508 - RNA, 1673 nt, synthetic construct
  misc_feature 1..1673: note = mRNA a-1 (A100) (opt5) from Homo sapiens__NP_000448.3__HNF4A(1-474)(S183E)
  source 1..1673: mol_type = other RNA
aggagagtcccgcagtcggcgtccagcggctctgcttgttcgtgtgtgtgtcgttgcaggccttattcaagcttaccatgagactgagcaagaccctcgtggacatggatatggccgactactccgctgccctggatcccgcgtatacaacgcttgagttcgaaaacgtccaggttctgaccatgggcaatgacacatctcctagcgaggggaccaacctcaatgctccgaactccctgggagtgtctgccctttgcgccatctgtggcgatcgggctacagggaaacactacggagccagctcctgcgacggctgtaaggggtttttccgcagatctgtgcggaaaaatcatatgtatagctgccgcttttccagacaatgtgtcgtggataaggacaaacggaaccagtgccgctactgtagactgaagaagtgcttccgggctggaatgaaaaaggaagccgttcagaatgagcgcgatagaattagcacccggagatcttcctatgaagacagctctctcccctccatcaacgcgctgctgcaggccgaggtgctcagccgccaaattacatctcctgtctccggcatcaatggcgatattcgggctaaaaagatcgccgagatcgctgacgtgtgtgaaagcatgaaagagcagctgcttgttctggtggaatgggccaagtacattcccgcgttttgcgagctccctctggatgaccaggtcgcccttctgcgcgctcacgccggggagcatctcctgctgggagctaccaagagatccatggtgttcaaagacgtgctcctgcttggcaacgattatatcgtcccccggcactgtcctgaactggccgagatgtctagagttagcattcgcatcctcgacgaactggtgcttccgtttcaggagctgcaaattgatgacaatgaatacgcctacctcaaggctatcattttctttgatcccgacgcgaaagggctgtccgatcctggaaagatcaaacggctgagaagccaggtgcaggtctctctcgaggactatatcaacgatcgccagtacgactcccggggcagattcggggagctgcttctgctcctgcccacgcttcaaagcattacctggcagatgatcgaacagattcaatttatcaagctgttcggaatggccaaaattgataatctcctgcaggagatgctgctcggcggctctcctagcgacgctccccatgcccaccacccgctgcatcctcaccttatgcaggaacatatggggacaaacgtgatcgttgccaataccatgcccacacacctgtccaacggacagatgtgcgagtggcctcgcccccggggccaagctgccacccccgaaacgcctcagccgtctccccctgggggaagcggctccgagccctataagctcctgcctggggcggtggctacaatcgtcaagcccctgagcgccattccgcagcctaccatcacaaaacaggaggtgatttgaggactagtccctgttcccagagcccacttttttttctttttttgaaataaaatagcctgtctttcagatctaaaaaaaaaaaaaaaaaaaaaaaaaaaaaaaaaaaaaaaaaaaaaaaaaaaaaaaaaaaaaaaaaaaaaaaaaaaaaaaaaaaaaaaaaaaaaaaaaaaa

SEQ ID NO: 4509 - RNA, 1673 nt, synthetic construct
  misc_feature 1..1673: note = mRNA a-1 (A100) (opt5) from Homo sapiens__NP_000448.3__HNF4A(1-474)(S461A)
  source 1..1673: mol_type = other RNA
aggagagtcccgcagtcggcgtccagcggctctgcttgttcgtgtgtgtgtcgttgcaggccttattcaagcttaccatgagactgagcaagaccctcgtggacatggatatggccgactactccgctgccctggatcccgcgtatacaacgcttgagttcgaaaacgtccaggttctgaccatgggcaatgacacatctcctagcgaggggaccaacctcaatgctccgaactccctgggagtgtctgccctttgcgccatctgtggcgatcgggctacagggaaacactacggagccagctcctgcgacggctgtaaggggtttttccgcagatctgtgcggaaaaatcatatgtatagctgccgcttttccagacaatgtgtcgtggataaggacaaacggaaccagtgccgctactgtagactgaagaagtgcttccgggctggaatgaaaaaggaagccgttcagaatgagcgcgatagaattagcacccggcgcagctcctatgaagacagctctctcccctccatcaacgcgctgctgcaggccgaggtgctcagcagacaaattacatctcctgtctccggcatcaatggcgatattcgggctaaaaagatcgccagcatcgctgacgtgtgtgagtccatgaaagaacagctgcttgttctggtggagtgggccaagtacattcccgcgttttgcgaactccctctggatgaccaggtcgcccttctgcgcgctcacgccggggagcatctcctgctgggagctaccaagagatctatggtgttcaaagacgtgctcctgcttggcaacgattatatcgtcccccggcactgtcctgagctggccgaaatgagcagagtttccattcgcatcctcgacgagctggtgcttccgtttcaggaactgcaaattgatgacaatgagtacgcctacctcaaggctatcattttctttgatcccgacgcgaaagggctgagcgatcctggaaagatcaaacggctgagatctcaggtgcaggtctccctcgaagactatatcaacgatcgccagtacgacagccggggcagattcggggagctgcttctgctcctgcccacgcttcaatctattacctggcagatgatcgagcagattcaatttatcaagctgttcggaatggccaaaattgataatctcctgcaggaaatgctgctcggcggcagcccttccgacgctccccatgcccaccacccgctgcatcctcaccttatgcaggagcatatggggacaaacgtgatcgttgccaataccatgcccacacacctgtctaacggacagatgtgcgaatggcctcgcccccggggccaagctgccacccccgagacgcctcagccgtctccccctgggggatccggcagcgaaccctataagctcctgcctggggcggtggctacaatcgtcaagcccctggccgccattccgcagcctaccatcacaaaacaggaggtgatttgaggactagtccctgttcccagagcccacttttttttctttttttgaaataaaatagcctgtctttcagatctaaaaaaaaaaaaaaaaaaaaaaaaaaaaaaaaaaaaaaaaaaaaaaaaaaaaaaaaaaaaaaaaaaaaaaaaaaaaaaaaaaaaaaaaaaaaaaaaaaaa

SEQ ID NO: 4510 - RNA, 1673 nt, synthetic construct
  misc_feature 1..1673: note = mRNA a-1 (A100) (opt5) from Homo sapiens__NP_000448.3__HNF4A(1-474)(S461E)
  source 1..1673: mol_type = other RNA
aggagagtcccgcagtcggcgtccagcggctctgcttgttcgtgtgtgtgtcgttgcaggccttattcaagcttaccatgagactgagcaagaccctcgtggacatggatatggccgactactccgctgccctggatcccgcgtatacaacgcttgagttcgaaaacgtccaggttctgaccatgggcaatgacacatctcctagcgaggggaccaacctcaatgctccgaactccctgggagtgtctgccctttgcgccatctgtggcgatcgggctacagggaaacactacggagccagctcctgcgacggctgtaaggggtttttccgcagatctgtgcggaaaaatcatatgtatagctgccgcttttccagacaatgtgtcgtggataaggacaaacggaaccagtgccgctactgtagactgaagaagtgcttccgggctggaatgaaaaaggaagccgttcagaatgagcgcgatagaattagcacccggcgcagctcctatgaagacagctctctcccctccatcaacgcgctgctgcaggccgaggtgctcagcagacaaattacatctcctgtctccggcatcaatggcgatattcgggctaaaaagatcgccagcatcgctgacgtgtgtgagtccatgaaagaacagctgcttgttctggtggagtgggccaagtacattcccgcgttttgcgaactccctctggatgaccaggtcgcccttctgcgcgctcacgccggggagcatctcctgctgggagctaccaagagatctatggtgttcaaagacgtgctcctgcttggcaacgattatatcgtcccccggcactgtcctgagctggccgaaatgagcagagtttccattcgcatcctcgacgagctggtgcttccgtttcaggaactgcaaattgatgacaatgagtacgcctacctcaaggctatcattttctttgatcccgacgcgaaagggctgagcgatcctggaaagatcaaacggctgagatctcaggtgcaggtctccctcgaagactatatcaacgatcgccagtacgacagccggggcagattcggggagctgcttctgctcctgcccacgcttcaatctattacctggcagatgatcgagcagattcaatttatcaagctgttcggaatggccaaaattgataatctcctgcaggaaatgctgctcggcggcagcccttccgacgctccccatgcccaccacccgctgcatcctcaccttatgcaggagcatatggggacaaacgtgatcgttgccaataccatgcccacacacctgtctaacggacagatgtgcgaatggcctcgcccccggggccaagctgccacccccgagacgcctcagccgtctccccctgggggatccggcagcgaaccctataagctcctgcctggggcggtggctacaatcgtcaagcccctggaggccattccgcagcctaccatcacaaaacaggaggtgatttgaggactagtccctgttcccagagcccacttttttttctttttttgaaataaaatagcctgtctttcagatctaaaaaaaaaaaaaaaaaaaaaaaaaaaaaaaaaaaaaaaaaaaaaaaaaaaaaaaaaaaaaaaaaaaaaaaaaaaaaaaaaaaaaaaaaaaaaaaaaaaa

SEQ ID NO: 4511 - RNA, 1673 nt, synthetic construct
  misc_feature 1..1673: note = mRNA a-1 (A100) (opt5) from Homo sapiens__NP_000448.3__HNF4A(1-474)(S142A_S143A_S313A)
  source 1..1673: mol_type = other RNA
aggagagtcccgcagtcggcgtccagcggctctgcttgttcgtgtgtgtgtcgttgcaggccttattcaagcttaccatgagactgagcaagaccctcgtggacatggatatggccgactactccgctgccctggatcccgcgtatacaacgcttgagttcgaaaacgtccaggttctgaccatgggcaatgacacatctcctagcgaggggaccaacctcaatgctccgaactccctgggagtgtctgccctttgcgccatctgtggcgatcgggctacagggaaacactacggagccagctcctgcgacggctgtaaggggtttttccgcagatctgtgcggaaaaatcatatgtatagctgccgcttttccagacaatgtgtcgtggataaggacaaacggaaccagtgccgctactgtagactgaagaagtgcttccgggctggaatgaaaaaggaagccgttcagaatgagcgcgatagaattagcacccggcgcgcggcctatgaagactcttccctccccagcatcaacgctctgctgcaggccgaggtgctctctagacaaattacatcccctgtcagcggcatcaatggcgatattcgggctaaaaagatcgcctctatcgcggacgtgtgtgagtccatgaaagaacagctgcttgttctggtggagtgggccaagtacattcccgctttttgcgaactccctctggatgaccaggtcgcccttctgcgcgctcacgccggggagcatctcctgctgggagccaccaagagaagcatggtgttcaaagacgtgctcctgcttggcaacgattatatcgtcccccggcactgtcctgagctggctgaaatgtccagagtttctattcgcatcctcgacgagctggtgcttccgtttcaggaactgcaaattgatgacaatgagtacgcgtacctcaaggccatcattttctttgatcccgacgctaaagggctgagcgatcctggaaagatcaaacggctgagagcccaggtgcaggtctccctcgaagactatatcaacgatcgccagtacgacagccggggcagattcggggagctgcttctgctcctgcccacgcttcaatctattacctggcagatgatcgagcagattcaatttatcaagctgttcggaatggccaaaattgataatctcctgcaggaaatgctgctcggcggctcccctagcgacgctccccatgcccaccacccgctgcatcctcaccttatgcaggagcatatggggacaaacgtgatcgttgcgaataccatgcccacacacctgtctaacggacagatgtgcgaatggcctcgcccccggggccaagctgccacccccgagacgcctcagccgagccctcccgggggatccggctctgaaccctataagctcctgcctggggccgtggctacaatcgtcaagcccctgagcgccattccgcagcctaccatcacaaaacaggaggtgatttgaggactagtccctgttcccagagcccacttttttttctttttttgaaataaaatagcctgtctttcagatctaaaaaaaaaaaaaaaaaaaaaaaaaaaaaaaaaaaaaaaaaaaaaaaaaaaaaaaaaaaaaaaaaaaaaaaaaaaaaaaaaaaaaaaaaaaaaaaaaaaa

SEQ ID NO: 4512 - RNA, 1673 nt, synthetic construct
  misc_feature 1..1673: note = mRNA a-1 (A100) (opt5) from Homo sapiens__NP_000448.3__HNF4A(1-474)(S142A_S143A_S313A_K458R)
  source 1..1673: mol_type = other RNA
aggagagtcccgcagtcggcgtccagcggctctgcttgttcgtgtgtgtgtcgttgcaggccttattcaagcttaccatgagactgagcaagaccctcgtggacatggatatggccgactactccgctgccctggatcccgcgtatacaacgcttgagttcgaaaacgtccaggttctgaccatgggcaatgacacatctcctagcgaggggaccaacctcaatgctccgaactccctgggagtgtctgccctttgcgccatctgtggcgatcgggctacagggaaacactacggagccagctcctgcgacggctgtaaggggtttttccgcagatctgtgcggaaaaatcatatgtatagctgccgcttttccagacaatgtgtcgtggataaggacaaacggaaccagtgccgctactgtagactgaagaagtgcttccgggctggaatgaaaaaggaagccgttcagaatgagcgcgatagaattagcacccggcgcgcggcctatgaagactcttccctccccagcatcaacgctctgctgcaggccgaggtgctctctagacaaattacatcccctgtcagcggcatcaatggcgatattcgggctaaaaagatcgcctctatcgcggacgtgtgtgagtccatgaaagaacagctgcttgttctggtggagtgggccaagtacattcccgctttttgcgaactccctctggatgaccaggtcgcccttctgcgcgctcacgccggggagcatctcctgctgggagccaccaagagaagcatggtgttcaaagacgtgctcctgcttggcaacgattatatcgtcccccggcactgtcctgagctggctgaaatgtccagagtttctattcgcatcctcgacgagctggtgcttccgtttcaggaactgcaaattgatgacaatgagtacgcgtacctcaaggccatcattttctttgatcccgacgctaaagggctgagcgatcctggaaagatcaaacggctgagagcccaggtgcaggtctccctcgaagactatatcaacgatcgccagtacgacagccggggcagattcggggagctgcttctgctcctgcccacgcttcaatctattacctggcagatgatcgagcagattcaatttatcaagctgttcggaatggccaaaattgataatctcctgcaggaaatgctgctcggcggctcccctagcgacgctccccatgcccaccacccgctgcatcctcaccttatgcaggagcatatggggacaaacgtgatcgttgcgaataccatgcccacacacctgtctaacggacagatgtgcgaatggcctcgcccccggggccaagctgccacccccgagacgcctcagccgagccctcccgggggatccggctctgaaccctataagctcctgcctggggccgtggctacaatcgtcagacccctgagcgccattccgcagcctaccatcacaaagcaggaggtgatttgaggactagtccctgttcccagagcccacttttttttctttttttgaaataaaatagcctgtctttcagatctaaaaaaaaaaaaaaaaaaaaaaaaaaaaaaaaaaaaaaaaaaaaaaaaaaaaaaaaaaaaaaaaaaaaaaaaaaaaaaaaaaaaaaaaaaaaaaaaaaaa

SEQ ID NO: 4513 - RNA, 1673 nt, synthetic construct
  misc_feature 1..1673: note = mRNA a-1 (A100) (opt5) from Homo sapiens__NP_000448.3__HNF4A(1-474)(S142A_S143A_S167A_S313A_ S378A_T429A_T432A_S436A_K458R)
  source 1..1673: mol_type = other RNA
aggagagtcccgcagtcggcgtccagcggctctgcttgttcgtgtgtgtgtcgttgcaggccttattcaagcttaccatgagactgagcaagaccctcgtggacatggatatggccgactactccgctgccctggatcccgcgtatacaacgcttgagttcgaaaacgtccaggttctgaccatgggcaatgacacatctcctagcgaggggaccaacctcaatgctccgaactccctgggagtgtctgccctttgcgccatctgtggcgatcgggctacagggaaacactacggagccagctcctgcgacggctgtaaggggtttttccgcagatctgtgcggaaaaatcatatgtatagctgccgcttttccagacaatgtgtcgtggataaggacaaacggaaccagtgccgctactgtagactgaagaagtgcttccgggctggaatgaaaaaggaagccgttcagaatgagcgcgatagaattagcacccggcgcgcggcctatgaagactcttccctccccagcatcaacgctctgctgcaggccgaggtgctctctagacaaattacagctcctgtctccggcatcaatggcgatattcgggccaaaaagatcgcgagcatcgccgacgtgtgtgagtctatgaaagaacagctgcttgttctggtggagtgggctaagtacattcccgccttttgcgaactccctctggatgaccaggtcgcccttctgcgcgcccacgccggggagcatctcctgctgggagctaccaagagatccatggtgttcaaagacgtgctcctgcttggcaacgattatatcgtcccccggcactgtcctgagctggcggaaatgagcagagtttccattcgcatcctcgacgagctggtgcttccgtttcaggaactgcaaattgatgacaatgagtacgcctacctcaaggctatcattttctttgatcccgacgccaaagggctgtctgatcctggaaagatcaaacggctgagagcccaggtgcaggtcagcctcgaagactatatcaacgatcgccagtacgactcccggggcagattcggggagctgcttctgctcctgcccacgcttcaaagcattacctggcagatgatcgagcagattcaatttatcaagctgttcggaatggctaaaattgataatctcctgcaggaaatgctgctcggcggcgccccttctgacgcgccccatgctcaccacccgctgcatcctcaccttatgcaggagcatatggggacaaacgtgatcgttgccaataccatgcccacacacctgtccaacggacagatgtgcgaatggcctcgcccccggggccaagccgctgcccccgaggctcctcagccggctccccctgggggaagcggctctgaaccctataagctcctgcctggggcggtggccaccatcgtcagacccctgagcgctattccgcagcctacgatcacaaagcaggaggtgatttgaggactagtccctgttcccagagcccacttttttttctttttttgaaataaaatagcctgtctttcagatctaaaaaaaaaaaaaaaaaaaaaaaaaaaaaaaaaaaaaaaaaaaaaaaaaaaaaaaaaaaaaaaaaaaaaaaaaaaaaaaaaaaaaaaaaaaaaaaaaaaa

SEQ ID NO: 4514 - RNA, 1673 nt, synthetic construct
  misc_feature 1..1673: note = mRNA a-1 (A100) (opt5) from Homo sapiens__NP_000448.3__HNF4A(1-474)(S142A_S143A_S148A_S167A_ S313A_S378A_T429A_T432A_S436A_K458R)
  source 1..1673: mol_type = other RNA
aggagagtcccgcagtcggcgtccagcggctctgcttgttcgtgtgtgtgtcgttgcaggccttattcaagcttaccatgagactgagcaagaccctcgtggacatggatatggccgactactccgctgccctggatcccgcgtatacaacgcttgagttcgaaaacgtccaggttctgaccatgggcaatgacacatctcctagcgaggggaccaacctcaatgctccgaactccctgggagtgtctgccctttgcgccatctgtggcgatcgggctacagggaaacactacggagccagctcctgcgacggctgtaaggggtttttccgcagatctgtgcggaaaaatcatatgtatagctgccgcttttccagacaatgtgtcgtggataaggacaaacggaaccagtgccgctactgtagactgaagaagtgcttccgggctggaatgaaaaaggaagccgttcagaatgagcgcgatagaattagcacccggcgcgcggcctatgaagactctgctctcccctccatcaacgccctgctgcaggctgaggtgctcagcagacaaattacagcccctgtctctggcatcaatggcgatattcgggcgaaaaagatcgcctccatcgctgacgtgtgtgagagcatgaaagaacagctgcttgttctggtggagtgggccaagtacattcccgctttttgcgaactccctctggatgaccaggtcgcccttctgcgcgcccacgctggggagcatctcctgctgggagcgaccaagagatctatggtgttcaaagacgtgctcctgcttggcaacgattatatcgtcccccggcactgtcctgagctggccgaaatgtccagagttagcattcgcatcctcgacgagctggtgcttccgtttcaggaactgcaaattgatgacaatgagtacgcttacctcaaggccatcattttctttgatcccgacgccaaagggctgtccgatcctggaaagatcaaacggctgagagctcaggtgcaggtctctctcgaagactatatcaacgatcgccagtacgacagccggggcagattcggggagctgcttctgctcctgcccacgcttcaatccattacctggcagatgatcgagcagattcaatttatcaagctgttcggaatggccaaaattgataatctcctgcaggaaatgctgctcggcggcgcgcctagcgacgctccccatgcccaccacccgctgcatcctcaccttatgcaggagcatatggggacaaacgtgatcgttgccaataccatgcccacacacctgtctaacggacagatgtgcgaatggcctcgcccccggggccaagctgccgctcccgaggcccctcagccggcgccccctgggggatccggcagcgaaccctataagctcctgcctggggccgtggctaccatcgtcagacccctgtctgccattccgcagcctacgatcacaaagcaggaggtgatttgaggactagtccctgttcccagagcccacttttttttctttttttgaaataaaatagcctgtctttcagatctaaaaaaaaaaaaaaaaaaaaaaaaaaaaaaaaaaaaaaaaaaaaaaaaaaaaaaaaaaaaaaaaaaaaaaaaaaaaaaaaaaaaaaaaaaaaaaaaaaaa

SEQ ID NO: 4515 - RNA, 1673 nt, synthetic construct
  misc_feature 1..1673: note = mRNA a-1 (A100) (opt5) from Homo sapiens__NP_000448.3__HNF4A(1-474)(K106R_K108R_K126R_K127R_ S142A_S143A_S148A_S167A_S313A_S378A_T429A_T432A_S436A_K458R )
  source 1..1673: mol_type = other RNA
aggagagtcccgcagtcggcgtccagcggctctgcttgttcgtgtgtgtgtcgttgcaggccttattcaagcttaccatgagactgagcaagaccctcgtggacatggatatggccgactactccgctgccctggatcccgcgtatacaacgcttgagttcgaaaacgtccaggttctgaccatgggcaatgacacatctcctagcgaggggaccaacctcaatgctccgaactccctgggagtgtctgccctttgcgccatctgtggcgatcgggctacagggaaacactacggagccagctcctgcgacggctgtaaggggtttttccgcagatctgtgcggaaaaatcatatgtatagctgccgcttttccagacaatgtgtcgtggatcgggaccgcagaaaccagtgccggtactgtcgcctgaagaaatgcttcagagctggaatgcggcgcgaagccgttcagaatgagagagatcggattagcacccgcagagcggcctatgaagactctgctctcccctccatcaacgccctgctgcaggctgaggtgctcagccggcaaattacagcccctgtctctggcatcaatggcgatattagagcgaagaagatcgcctccatcgctgacgtgtgtgagagcatgaaagaacagctgcttgttctggtggagtgggccaagtacattcccgctttttgcgaactccctctggatgaccaggtcgcccttctgcgcgcccacgctggggagcatctcctgctgggagcgaccaaacggtctatggtgttcaaggacgtgctcctgcttggcaacgattatatcgtccccagacactgtcctgagctggccgaaatgtcccgcgttagcattcggatcctcgacgagctggtgcttccgtttcaggaactgcaaattgatgacaatgagtacgcttacctcaaagccatcattttctttgatcccgacgccaaggggctgtccgatcctggaaagatcaaaagactgcgcgctcaggtgcaggtctctctcgaagactatatcaacgatcggcagtacgacagcagaggccgcttcggggagctgcttctgctcctgcccacgcttcaatccattacctggcagatgatcgagcagattcaatttatcaagctgttcggaatggccaaaattgataatctcctgcaggaaatgctgctcggcggcgcgcctagcgacgctccccatgcccaccacccgctgcatcctcaccttatgcaggagcatatggggacaaacgtgatcgttgccaataccatgcccacacacctgtctaacggacagatgtgcgaatggcctcggcccagaggccaagctgccgctcccgaggcccctcagccggcgccccctgggggatccggcagcgaaccctataagctcctgcctggggccgtggctaccatcgtccgccccctgtctgccattccgcagcctacgatcacaaaacaggaggtgatttgaggactagtccctgttcccagagcccacttttttttctttttttgaaataaaatagcctgtctttcagatctaaaaaaaaaaaaaaaaaaaaaaaaaaaaaaaaaaaaaaaaaaaaaaaaaaaaaaaaaaaaaaaaaaaaaaaaaaaaaaaaaaaaaaaaaaaaaaaaaaaa

SEQ ID NO: 4516 - RNA, 1673 nt, synthetic construct
  misc_feature 1..1673: note = mRNA a-1 (A100) (opt5) from Homo sapiens__NP_000448.3__HNF4A(1-474)(S142A_S143A_S148A_T166A_ S167A_S313A_S378A_T429A_T432A_S436A_K458R)
  source 1..1673: mol_type = other RNA
aggagagtcccgcagtcggcgtccagcggctctgcttgttcgtgtgtgtgtcgttgcaggccttattcaagcttaccatgagactgagcaagaccctcgtggacatggatatggccgactactccgctgccctggatcccgcgtatacaacgcttgagttcgaaaacgtccaggttctgaccatgggcaatgacacatctcctagcgaggggaccaacctcaatgctccgaactccctgggagtgtctgccctttgcgccatctgtggcgatcgggctacagggaaacactacggagccagctcctgcgacggctgtaaggggtttttccgcagatctgtgcggaaaaatcatatgtatagctgccgcttttccagacaatgtgtcgtggataaggacaaacggaaccagtgccgctactgtagactgaagaagtgcttccgggctggaatgaaaaaggaagccgttcagaatgagcgcgatagaattagcacccggcgcgcggcctatgaagactctgctctcccctccatcaacgccctgctgcaggctgaggtgctcagcagacaaattgccgcgcctgtctctggcatcaatggcgatattcgggccaaaaagatcgcttccatcgccgacgtgtgtgagagcatgaaagaacagctgcttgttctggtggagtgggctaagtacattcccgccttttgcgaactccctctggatgaccaggtcgcccttctgcgcgctcacgcgggggagcatctcctgctgggagccacaaagagatctatggtgttcaaagacgtgctcctgcttggcaacgattatatcgtcccccggcactgtcctgagctggctgaaatgtccagagttagcattcgcatcctcgacgagctggtgcttccgtttcaggaactgcaaattgatgacaatgagtacgcctacctcaaggccatcattttctttgatcccgacgctaaagggctgtccgatcctggaaagatcaaacggctgagagcccaggtgcaggtctctctcgaagactatatcaacgatcgccagtacgacagccggggcagattcggggagctgcttctgctcctgcccacccttcaatccattacgtggcagatgatcgagcagattcaatttatcaagctgttcggaatggcgaaaattgataatctcctgcaggaaatgctgctcggcggcgctcctagcgacgctccccatgcccaccacccgctgcatcctcaccttatgcaggagcatatggggaccaacgtgatcgttgccaatacaatgcccacccacctgtctaacggacagatgtgcgaatggcctcgcccccggggccaagccgctgcccccgaggcgcctcagccggctccccctgggggatccggcagcgaaccctataagctcctgcctggggccgtggccacaatcgtcagacccctgtctgctattccgcagcctaccatcacgaagcaggaggtgatttgaggactagtccctgttcccagagcccacttttttttctttttttgaaataaaatagcctgtctttcagatctaaaaaaaaaaaaaaaaaaaaaaaaaaaaaaaaaaaaaaaaaaaaaaaaaaaaaaaaaaaaaaaaaaaaaaaaaaaaaaaaaaaaaaaaaaaaaaaaaaaa

SEQ ID NO: 4517 - RNA, 1673 nt, synthetic construct
  misc_feature 1..1673: note = mRNA a-1 (A100) (opt5) from Homo sapiens__NP_000448.3__HNF4A(1-474)(S87A_S142A_S143A_S148A_T 166A_S167A_S313A_S378A_T429A_T432A_S436A_K458R)
  source 1..1673: mol_type = other RNA
aggagagtcccgcagtcggcgtccagcggctctgcttgttcgtgtgtgtgtcgttgcaggccttattcaagcttaccatgagactgagcaagaccctcgtggacatggatatggccgactactccgctgccctggatcccgcgtatacaacgcttgagttcgaaaacgtccaggttctgaccatgggcaatgacacatctcctagcgaggggaccaacctcaatgctccgaactccctgggagtgtctgccctttgcgccatctgtggcgatcgggctacagggaaacactacggagccagctcctgcgacggctgtaaggggtttttccgcagagctgtgcggaaaaatcatatgtattcttgccgctttagcagacaatgtgtcgtggataaggacaaacggaaccagtgccgctactgtagactgaagaagtgcttccgggccggaatgaaaaaggaagcggttcagaatgagcgcgatagaatttccacccggcgcgccgcttatgaagacagcgccctcccctctatcaacgctctgctgcaggccgaggtgctctccagacaaattgcggcccctgtcagcggcatcaatggcgatattcgggctaaaaagatcgcctctatcgctgacgtgtgtgagtccatgaaagaacagctgcttgttctggtggagtgggccaagtacattcccgccttttgcgaactccctctggatgaccaggtcgcccttctgcgcgcgcacgccggggagcatctcctgctgggagctacaaagagaagcatggtgttcaaagacgtgctcctgcttggcaacgattatatcgtcccccggcactgtcctgagctggccgaaatgtctagagtttccattcgcatcctcgacgagctggtgcttccgtttcaggaactgcaaattgatgacaatgagtacgcctacctcaaggctatcattttctttgatcccgacgccaaagggctgagcgatcctggaaagatcaaacggctgagagctcaggtgcaggtctccctcgaagactatatcaacgatcgccagtacgactctcggggcagattcggggagctgcttctgctcctgcccacccttcaaagcattacgtggcagatgatcgagcagattcaatttatcaagctgttcggaatggcgaaaattgataatctcctgcaggaaatgctgctcggcggcgccccttccgacgctccccatgctcaccacccgctgcatcctcaccttatgcaggagcatatggggaccaacgtgatcgttgccaatacaatgcccacccacctgagcaacggacagatgtgcgaatggcctcgcccccggggccaagctgccgcgcccgaggcccctcagccggctccccctgggggatctggctccgaaccctataagctcctgcctggggccgtggctacaatcgtcagacccctgagcgccattccgcagcctaccatcacgaagcaggaggtgatttgaggactagtccctgttcccagagcccacttttttttctttttttgaaataaaatagcctgtctttcagatctaaaaaaaaaaaaaaaaaaaaaaaaaaaaaaaaaaaaaaaaaaaaaaaaaaaaaaaaaaaaaaaaaaaaaaaaaaaaaaaaaaaaaaaaaaaaaaaaaaaa

SEQ ID NO: 4518 - RNA, 1673 nt, synthetic construct
  misc_feature 1..1673: note = mRNA a-1 (A100) (opt5) from Homo sapiens__NP_000448.3__HNF4A(1-474)(S87A_K106R_K108R_K126R_K 127R_S142A_S143A_S148A_T166A_S167A_S313A_S378A_T429A_T432A_ S436A_K458R)
  source 1..1673: mol_type = other RNA
aggagagtcccgcagtcggcgtccagcggctctgcttgttcgtgtgtgtgtcgttgcaggccttattcaagcttaccatgagactgagcaagaccctcgtggacatggatatggccgactactccgctgccctggatcccgcgtatacaacgcttgagttcgaaaacgtccaggttctgaccatgggcaatgacacatctcctagcgaggggaccaacctcaatgctccgaactccctgggagtgtctgccctttgcgccatctgtggcgatcgggctacagggaaacactacggagccagctcctgcgacggctgtaaggggtttttccgcagagctgtgcggaaaaatcatatgtattcttgccgctttagcagacaatgtgtcgtggatcgggaccgcagaaaccagtgccggtactgtcgcctgaagaaatgcttcagagccggaatgcggcgcgaagcggttcagaatgagagagatcggatttccacccgcagagccgcttatgaagacagcgccctcccctctatcaacgctctgctgcaggccgaggtgctctcccggcaaattgcggcccctgtcagcggcatcaatggcgatattagagctaagaagatcgcctctatcgctgacgtgtgtgagtccatgaaagaacagctgcttgttctggtggagtgggccaagtacattcccgccttttgcgaactccctctggatgaccaggtcgcccttctgcgcgcgcacgccggggagcatctcctgctgggagctacaaaacggagcatggtgttcaaggacgtgctcctgcttggcaacgattatatcgtccccagacactgtcctgagctggccgaaatgtctcgcgtttccattcggatcctcgacgagctggtgcttccgtttcaggaactgcaaattgatgacaatgagtacgcctacctcaaagctatcattttctttgatcccgacgccaaggggctgagcgatcctggaaagatcaaaagactgcgcgctcaggtgcaggtctccctcgaagactatatcaacgatcggcagtacgactctagaggccgcttcggggagctgcttctgctcctgcccacccttcaaagcattacgtggcagatgatcgagcagattcaatttatcaagctgttcggaatggcgaaaattgataatctcctgcaggaaatgctgctcggcggcgccccttccgacgctccccatgctcaccacccgctgcatcctcaccttatgcaggagcatatggggaccaacgtgatcgttgccaatacaatgcccacccacctgagcaacggacagatgtgcgaatggcctcggcccagaggccaagctgccgcgcccgaggcccctcagccggctccccctgggggatctggctccgaaccctataagctcctgcctggggccgtggctacaatcgtccgccccctgagcgccattccgcagcctaccatcacgaaacaggaggtgatttgaggactagtccctgttcccagagcccacttttttttctttttttgaaataaaatagcctgtctttcagatctaaaaaaaaaaaaaaaaaaaaaaaaaaaaaaaaaaaaaaaaaaaaaaaaaaaaaaaaaaaaaaaaaaaaaaaaaaaaaaaaaaaaaaaaaaaaaaaaaaaa

SEQ ID NO: 4519 - RNA, 1673 nt, synthetic construct
  misc_feature 1..1673: note = mRNA a-1 (A100) (opt5) from Homo sapiens__NP_000448.3__HNF4A(1-474)(S87A_K106R_K108R_K126R_K 127R)
  source 1..1673: mol_type = other RNA
aggagagtcccgcagtcggcgtccagcggctctgcttgttcgtgtgtgtgtcgttgcaggccttattcaagcttaccatgagactgagcaagaccctcgtggacatggatatggccgactactccgctgccctggatcccgcgtatacaacgcttgagttcgaaaacgtccaggttctgaccatgggcaatgacacatctcctagcgaggggaccaacctcaatgctccgaactccctgggagtgtctgccctttgcgccatctgtggcgatcgggctacagggaaacactacggagccagctcctgcgacggctgtaaggggtttttccgcagagctgtgcggaaaaatcatatgtattcttgccgctttagcagacaatgtgtcgtggatcgggaccgcagaaaccagtgccggtactgtcgcctgaagaaatgcttcagagccggaatgcggcgcgaagcggttcagaatgagagagatcggatttccacccgcagaagctcttatgaagactccagcctcccctctatcaacgccctgctgcaggctgaggtgctctcccggcaaattacaagccctgtctctggcatcaatggcgatattagagccaagaagatcgcttccatcgccgacgtgtgtgagagcatgaaagaacagctgcttgttctggtggagtgggcgaagtacattcccgccttttgcgaactccctctggatgaccaggtcgcccttctgcgcgcccacgctggggagcatctcctgctgggagccaccaaacggtccatggtgttcaaggacgtgctcctgcttggcaacgattatatcgtccccagacactgtcctgagctggccgaaatgtctcgcgttagcattcggatcctcgacgagctggtgcttccgtttcaggaactgcaaattgatgacaatgagtacgcttacctcaaagcgatcattttctttgatcccgacgccaaggggctgtccgatcctggaaagatcaaaagactgcgcagccaggtgcaggtctctctcgaagactatatcaacgatcggcagtacgactccagaggccgcttcggggagctgcttctgctcctgcccacgcttcaaagcattacctggcagatgatcgagcagattcaatttatcaagctgttcggaatggctaaaattgataatctcctgcaggaaatgctgctcggcggctctcctagcgacgctccccatgcccaccacccgctgcatcctcaccttatgcaggagcatatggggacaaacgtgatcgttgctaataccatgcccacacacctgtccaacggacagatgtgcgaatggcctcggcccagaggccaagccgcgacccccgagacgcctcagccgtctccccctgggggaagcggctccgaaccctataagctcctgcctggggctgtggccacaatcgtcaaacccctgagcgccattccgcagcctaccatcacaaagcaggaggtgatttgaggactagtccctgttcccagagcccacttttttttctttttttgaaataaaatagcctgtctttcagatctaaaaaaaaaaaaaaaaaaaaaaaaaaaaaaaaaaaaaaaaaaaaaaaaaaaaaaaaaaaaaaaaaaaaaaaaaaaaaaaaaaaaaaaaaaaaaaaaaaaa

SEQ ID NO: 4520 - RNA, 1673 nt, synthetic construct
  misc_feature 1..1673: note = mRNA a-1 (A100) (opt5) from Homo sapiens__NP_000448.3__HNF4A(1-474)(S87A_K106R_K108R_K126R_K 127R_S142A_S143A_S148A_T166A_S167A_S313A_S378A_T429A_T432A_ S436A_K458R_S461A)
  source 1..1673: mol_type = other RNA
aggagagtcccgcagtcggcgtccagcggctctgcttgttcgtgtgtgtgtcgttgcaggccttattcaagcttaccatgagactgagcaagaccctcgtggacatggatatggccgactactccgctgccctggatcccgcgtatacaacgcttgagttcgaaaacgtccaggttctgaccatgggcaatgacacatctcctagcgaggggaccaacctcaatgctccgaactccctgggagtgtctgccctttgcgccatctgtggcgatcgggctacagggaaacactacggagccagctcctgcgacggctgtaaggggtttttccgcagagctgtgcggaaaaatcatatgtattcttgccgctttagcagacaatgtgtcgtggatcgggaccgcagaaaccagtgccggtactgtcgcctgaagaaatgcttcagagccggaatgcggcgcgaagcggttcagaatgagagagatcggatttccacccgcagagccgcttatgaagacagcgccctcccctctatcaacgctctgctgcaggccgaggtgctctcccggcaaattgcggcccctgtcagcggcatcaatggcgatattagagctaagaagatcgcctctatcgctgacgtgtgtgagtccatgaaagaacagctgcttgttctggtggagtgggccaagtacattcccgccttttgcgaactccctctggatgaccaggtcgcccttctgcgcgcgcacgccggggagcatctcctgctgggagctacaaaacggagcatggtgttcaaggacgtgctcctgcttggcaacgattatatcgtccccagacactgtcctgagctggccgaaatgtctcgcgtttccattcggatcctcgacgagctggtgcttccgtttcaggaactgcaaattgatgacaatgagtacgcctacctcaaagctatcattttctttgatcccgacgccaaggggctgagcgatcctggaaagatcaaaagactgcgcgctcaggtgcaggtctccctcgaagactatatcaacgatcggcagtacgactctagaggccgcttcggggagctgcttctgctcctgcccacccttcaaagcattacgtggcagatgatcgagcagattcaatttatcaagctgttcggaatggcgaaaattgataatctcctgcaggaaatgctgctcggcggcgccccttccgacgctccccatgctcaccacccgctgcatcctcaccttatgcaggagcatatggggaccaacgtgatcgttgccaatacaatgcccacccacctgagcaacggacagatgtgcgaatggcctcggcccagaggccaagctgccgcgcccgaggcccctcagccggctccccctgggggatctggctccgaaccctataagctcctgcctggggccgtggctacaatcgtccgccccctggccgcgattccgcagcctaccatcacgaaacaggaggtgatttgaggactagtccctgttcccagagcccacttttttttctttttttgaaataaaatagcctgtctttcagatctaaaaaaaaaaaaaaaaaaaaaaaaaaaaaaaaaaaaaaaaaaaaaaaaaaaaaaaaaaaaaaaaaaaaaaaaaaaaaaaaaaaaaaaaaaaaaaaaaaaa

SEQ ID NO: 4521 - RNA, 1673 nt, synthetic construct
  misc_feature 1..1673: note = mRNA a-1 (A100) (opt5) from Homo sapiens__NP_000448.3__HNF4A(1-474)(S87A_K106R_K108R_K126R_K 127R_S142A_S143A_S148A_T166A_S167A_S313A_S378A_T429A_T432A_ S436A_K458R_S461E)
  source 1..1673: mol_type = other RNA
aggagagtcccgcagtcggcgtccagcggctctgcttgttcgtgtgtgtgtcgttgcaggccttattcaagcttaccatgagactgagcaagaccctcgtggacatggatatggccgactactccgctgccctggatcccgcgtatacaacgcttgagttcgaaaacgtccaggttctgaccatgggcaatgacacatctcctagcgaggggaccaacctcaatgctccgaactccctgggagtgtctgccctttgcgccatctgtggcgatcgggctacagggaaacactacggagccagctcctgcgacggctgtaaggggtttttccgcagagctgtgcggaaaaatcatatgtattcttgccgctttagcagacaatgtgtcgtggatcgggaccgcagaaaccagtgccggtactgtcgcctgaagaaatgcttcagagccggaatgcggcgcgaagcggttcagaatgagagagatcggatttccacccgcagagccgcttatgaagacagcgccctcccctctatcaacgctctgctgcaggccgaggtgctctcccggcaaattgcggcccctgtcagcggcatcaatggcgatattagagctaagaagatcgcctctatcgctgacgtgtgtgagtccatgaaagaacagctgcttgttctggtggagtgggccaagtacattcccgccttttgcgaactccctctggatgaccaggtcgcccttctgcgcgcgcacgccggggagcatctcctgctgggagctacaaaacggagcatggtgttcaaggacgtgctcctgcttggcaacgattatatcgtccccagacactgtcctgagctggccgaaatgtctcgcgtttccattcggatcctcgacgagctggtgcttccgtttcaggaactgcaaattgatgacaatgagtacgcctacctcaaagctatcattttctttgatcccgacgccaaggggctgagcgatcctggaaagatcaaaagactgcgcgctcaggtgcaggtctccctcgaagactatatcaacgatcggcagtacgactctagaggccgcttcggggagctgcttctgctcctgcccacccttcaaagcattacgtggcagatgatcgagcagattcaatttatcaagctgttcggaatggcgaaaattgataatctcctgcaggaaatgctgctcggcggcgccccttccgacgctccccatgctcaccacccgctgcatcctcaccttatgcaggagcatatggggaccaacgtgatcgttgccaatacaatgcccacccacctgagcaacggacagatgtgcgaatggcctcggcccagaggccaagctgccgcgcccgaggcccctcagccggctccccctgggggatctggctccgaaccctataagctcctgcctggggccgtggctacaatcgtccgccccctggaggccattccgcagcctaccatcacgaaacaggaggtgatttgaggactagtccctgttcccagagcccacttttttttctttttttgaaataaaatagcctgtctttcagatctaaaaaaaaaaaaaaaaaaaaaaaaaaaaaaaaaaaaaaaaaaaaaaaaaaaaaaaaaaaaaaaaaaaaaaaaaaaaaaaaaaaaaaaaaaaaaaaaaaaa

SEQ ID NO: 4522 - RNA, 1673 nt, synthetic construct
  misc_feature 1..1673: note = mRNA a-1 (A100) (opt5) from Homo sapiens__NP_000448.3__HNF4A(1-474)(S87A_K106R_K108R_K126R_K 127R_S142A_S143A_S148E_T166A_S167E_S313A_S378E_T429E_T432E_ S436E_K458R_S461E)
  source 1..1673: mol_type = other RNA
aggagagtcccgcagtcggcgtccagcggctctgcttgttcgtgtgtgtgtcgttgcaggccttattcaagcttaccatgagactgagcaagaccctcgtggacatggatatggccgactactccgctgccctggatcccgcgtatacaacgcttgagttcgaaaacgtccaggttctgaccatgggcaatgacacatctcctagcgaggggaccaacctcaatgctccgaactccctgggagtgtctgccctttgcgccatctgtggcgatcgggctacagggaaacactacggagccagctcctgcgacggctgtaaggggtttttccgcagagctgtgcggaaaaatcatatgtattcttgccgctttagcagacaatgtgtcgtggatcgggaccgcagaaaccagtgccggtactgtcgcctgaagaaatgcttcagagccggaatgcggcgcgaagcggttcagaatgagagagatcggatttccacccgcagagccgcttatgaagacagcgagctcccctctatcaacgccctgctgcaggctgaggtgctctcccggcaaattgccgaacctgtcagcggcatcaatggcgatattagagcgaagaagatcgcctctatcgctgacgtgtgtgagtccatgaaagaacagctgcttgttctggtggagtgggccaagtacattcccgctttttgcgagctccctctggatgaccaggtcgcccttctgcgcgcccacgctggggaacatctcctgctgggagcgacaaaacggagcatggtgttcaaggacgtgctcctgcttggcaacgattatatcgtccccagacactgtcctgagctggccgaaatgtctcgcgtttccattcggatcctcgacgagctggtgcttccgtttcaggaactgcaaattgatgacaatgagtacgcttacctcaaagccatcattttctttgatcccgacgccaaggggctgagcgatcctggaaagatcaaaagactgcgcgctcaggtgcaggtctccctcgaggactatatcaacgatcggcagtacgactctagaggccgcttcggggaactgcttctgctcctgcccacccttcaaagcattacgtggcagatgatcgagcagattcaatttatcaagctgttcggaatggccaaaattgataatctcctgcaggaaatgctgctcggcggcgagccttccgacgcgccccatgctcaccacccgctgcatcctcaccttatgcaggaacatatggggaccaacgtgatcgttgccaatacaatgcccacccacctgagcaacggacagatgtgcgagtggcctcggcccagaggccaagccgctgagcccgaggaacctcagccggaaccccctgggggatctggctccgagccctataagctcctgcctggggccgtggctacaatcgtccgccccctggaagccattccgcagcctaccatcacgaaacaggaggtgatttgaggactagtccctgttcccagagcccacttttttttctttttttgaaataaaatagcctgtctttcagatctaaaaaaaaaaaaaaaaaaaaaaaaaaaaaaaaaaaaaaaaaaaaaaaaaaaaaaaaaaaaaaaaaaaaaaaaaaaaaaaaaaaaaaaaaaaaaaaaaaaa

SEQ ID NO: 4523 - RNA, 1673 nt, synthetic construct
  misc_feature 1..1673: note = mRNA a-1 (A100) (opt5) from Homo sapiens__NP_000448.3__HNF4A(1-474)(S87A_K106R_K108R_K126R_K 127R_S142A_S143A_S148A_T166A_S167A_K179R_K180R_S313A_S378A_ T429A_T432A_S436A_K458R_S461E)
  source 1..1673: mol_type = other RNA
aggagagtcccgcagtcggcgtccagcggctctgcttgttcgtgtgtgtgtcgttgcaggccttattcaagcttaccatgagactgagcaagaccctcgtggacatggatatggccgactactccgctgccctggatcccgcgtatacaacgcttgagttcgaaaacgtccaggttctgaccatgggcaatgacacatctcctagcgaggggaccaacctcaatgctccgaactccctgggagtgtctgccctttgcgccatctgtggcgatcgggctacagggaaacactacggagccagctcctgcgacggctgtaaggggtttttccgcagagctgtgcggaaaaatcatatgtattcttgccgctttagcagacaatgtgtcgtggatcgggaccgcagaaaccagtgccggtactgtcgcctgaagaaatgcttcagagccggaatgcggcgcgaagcggttcagaatgagagagatcggatttccacccgcagagccgcttatgaagacagcgccctcccctctatcaacgctctgctgcaggccgaggtgctctcccggcaaattgcggcccctgtcagcggcatcaatggcgatattagagctcgccggatcgcctctatcgctgacgtgtgtgagtccatgaaggaacagctgcttgttctggtggagtgggccaagtacattcccgccttttgcgaactccctctggatgaccaggtcgcccttctgagagcgcacgccggggagcatctcctgctgggagctacaaaacgcagcatggtgttcaaggacgtgctcctgcttggcaacgattatatcgtcccccggcactgtcctgagctggccgaaatgtctagagtttccattcgcatcctcgacgagctggtgcttccgtttcaggaactgcaaattgatgacaatgagtacgcctacctcaaagctatcattttctttgatcccgacgccaaggggctgagcgatcctggaaaaatcaagcggctgagagctcaggtgcaggtctccctcgaagactatatcaacgatcgccagtacgactctcggggcagattcggggagctgcttctgctcctgcccacccttcaaagcattacgtggcagatgatcgagcagattcaatttatcaagctgttcggaatggcgaaaattgataatctcctgcaggaaatgctgctcggcggcgccccttccgacgctccccatgctcaccacccgctgcatcctcaccttatgcaggagcatatggggaccaacgtgatcgttgccaatacaatgcccacccacctgagcaacggacagatgtgcgaatggcctcgcccccggggccaagctgccgcgcccgaggcccctcagccggctccccctgggggatctggctccgaaccctataagctcctgcctggggccgtggctacaatcgtcagacccctggaggccattccgcagcctaccatcacgaaacaggaggtgatttgaggactagtccctgttcccagagcccacttttttttctttttttgaaataaaatagcctgtctttcagatctaaaaaaaaaaaaaaaaaaaaaaaaaaaaaaaaaaaaaaaaaaaaaaaaaaaaaaaaaaaaaaaaaaaaaaaaaaaaaaaaaaaaaaaaaaaaaaaaaaaa

SEQ ID NO: 4524 - RNA, 1673 nt, synthetic construct
  misc_feature 1..1673: note = mRNA a-1 (A100) (opt5) from Homo sapiens__NP_000448.3__HNF4A(1-474)(S87A_K106R_K108R_K126R_K 127R_S142A_S143A_S148A_T166A_S167A_K300R_K307R_K309R_S313A_ S378A_T429A_T432A_S436A_K458R_S461E)
  source 1..1673: mol_type = other RNA
aggagagtcccgcagtcggcgtccagcggctctgcttgttcgtgtgtgtgtcgttgcaggccttattcaagcttaccatgagactgagcaagaccctcgtggacatggatatggccgactactccgctgccctggatcccgcgtatacaacgcttgagttcgaaaacgtccaggttctgaccatgggcaatgacacatctcctagcgaggggaccaacctcaatgctccgaactccctgggagtgtctgccctttgcgccatctgtggcgatcgggctacagggaaacactacggagccagctcctgcgacggctgtaaggggtttttccgcagagctgtgcggaaaaatcatatgtattcttgccgctttagcagacaatgtgtcgtggatcgggaccgcagaaaccagtgccggtactgtcgcctgaagaaatgcttcagagccggaatgcggcgcgaagcggttcagaatgagagagatcggatttccacccgcagagccgcttatgaagacagcgccctcccctctatcaacgctctgctgcaggccgaggtgctctcccggcaaattgcggcccctgtcagcggcatcaatggcgatattagagctaagaagatcgcctctatcgctgacgtgtgtgagtccatgaaagaacagctgcttgttctggtggagtgggccaagtacattcccgccttttgcgaactccctctggatgaccaggtcgcccttctgcgcgcgcacgccggggagcatctcctgctgggagctacaaaacggagcatggtgttcaaggacgtgctcctgcttggcaacgattatatcgtccccagacactgtcctgagctggccgaaatgtctcgcgtttccattcggatcctcgacgagctggtgcttccgtttcaggaactgcaaattgatgacaatgagtacgcctacctcaaagctatcattttctttgatcccgacgccagagggctgagcgatcctggacgcatccggagactgcgcgctcaggtgcaggtctccctcgaagactatatcaacgatcggcagtacgactctagaggccgcttcggggagctgcttctgctcctgcccacccttcaaagcattacgtggcagatgatcgagcagattcaatttatcaagctgttcggaatggcgaagattgataatctcctgcaggaaatgctgctcggcggcgccccttccgacgctccccatgctcaccacccgctgcatcctcaccttatgcaggagcatatggggaccaacgtgatcgttgccaatacaatgcccacccacctgagcaacggacagatgtgcgaatggcctcggcccagaggccaagctgccgcgcccgaggcccctcagccggctccccctgggggatctggctccgaaccctataaactcctgcctggggccgtggctacaatcgtccggcccctggaggccattccgcagcctaccatcacgaagcaggaggtgatttgaggactagtccctgttcccagagcccacttttttttctttttttgaaataaaatagcctgtctttcagatctaaaaaaaaaaaaaaaaaaaaaaaaaaaaaaaaaaaaaaaaaaaaaaaaaaaaaaaaaaaaaaaaaaaaaaaaaaaaaaaaaaaaaaaaaaaaaaaaaaaa

SEQ ID NO: 4525 - RNA, 1673 nt, synthetic construct
  misc_feature 1..1673: note = mRNA a-1 (A100) (opt5) from Homo sapiens__NP_000448.3__HNF4A(1-474)(S87A_K106R_K108R_K126R_K 127R_S142A_S143A_S148A_T166A_S167A_S313A_S378A_T429A_T432A_ S436A_K447R_K458R_S461E_K470R)
  source 1..1673: mol_type = other RNA
aggagagtcccgcagtcggcgtccagcggctctgcttgttcgtgtgtgtgtcgttgcaggccttattcaagcttaccatgagactgagcaagaccctcgtggacatggatatggccgactactccgctgccctggatcccgcgtatacaacgcttgagttcgaaaacgtccaggttctgaccatgggcaatgacacatctcctagcgaggggaccaacctcaatgctccgaactccctgggagtgtctgccctttgcgccatctgtggcgatcgggctacagggaaacactacggagccagctcctgcgacggctgtaaggggtttttccgcagagctgtgcggaaaaatcatatgtattcttgccgctttagcagacaatgtgtcgtggatcgggaccgcagaaaccagtgccggtactgtcgcctgaagaaatgcttcagagccggaatgcggcgcgaagcggttcagaatgagagagatcggatttccacccgcagagccgcttatgaagacagcgccctcccctctatcaacgctctgctgcaggccgaggtgctctcccggcaaattgcggcccctgtcagcggcatcaatggcgatattagagctaagaagatcgcctctatcgctgacgtgtgtgagtccatgaaagaacagctgcttgttctggtggagtgggccaagtacattcccgccttttgcgaactccctctggatgaccaggtcgcccttctgcgcgcgcacgccggggagcatctcctgctgggagctacaaaacggagcatggtgttcaaggacgtgctcctgcttggcaacgattatatcgtccccagacactgtcctgagctggccgaaatgtctcgcgtttccattcggatcctcgacgagctggtgcttccgtttcaggaactgcaaattgatgacaatgagtacgcctacctcaaagctatcattttctttgatcccgacgccaaggggctgagcgatcctggaaagatcaaaagactgcgcgctcaggtgcaggtctccctcgaagactatatcaacgatcggcagtacgactctagaggccgcttcggggagctgcttctgctcctgcccacccttcaaagcattacgtggcagatgatcgagcagattcaatttatcaagctgttcggaatggcgaaaattgataatctcctgcaggaaatgctgctcggcggcgccccttccgacgctccccatgctcaccacccgctgcatcctcaccttatgcaggagcatatggggaccaacgtgatcgttgccaatacaatgcccacccacctgagcaacggacagatgtgcgaatggcctcggcccagaggccaagctgccgcgcccgaggcccctcagccggctccccctgggggatctggctccgaaccctatcgcctcctgcctggggccgtggctacaatcgtccggcccctggaggccattccgcagcctaccatcacgagacaggaggtgatttgaggactagtccctgttcccagagcccacttttttttctttttttgaaataaaatagcctgtctttcagatctaaaaaaaaaaaaaaaaaaaaaaaaaaaaaaaaaaaaaaaaaaaaaaaaaaaaaaaaaaaaaaaaaaaaaaaaaaaaaaaaaaaaaaaaaaaaaaaaaaaa

SEQ ID NO: 4526 - RNA, 1673 nt, synthetic construct
  misc_feature 1..1673: note = mRNA a-1 (A100) (opt5) from Homo sapiens__NP_000448.3__HNF4A(1-474)(S87A_K106R_K108R_K126R_K 127R_S142A_S143A_S148A_T166A_S167A_K179R_K180R_K234R_K300R_ K307R_K309R_S313A_S378A_T429A_T432A_S436A_K447R_K458R_S461E _K470R)
  source 1..1673: mol_type = other RNA
aggagagtcccgcagtcggcgtccagcggctctgcttgttcgtgtgtgtgtcgttgcaggccttattcaagcttaccatgagactgagcaagaccctcgtggacatggatatggccgactactccgctgccctggatcccgcgtatacaacgcttgagttcgaaaacgtccaggttctgaccatgggcaatgacacatctcctagcgaggggaccaacctcaatgctccgaactccctgggagtgtctgccctttgcgccatctgtggcgatcgggctacagggaaacactacggagccagctcctgcgacggctgtaaggggtttttccgcagagctgtgcggaaaaatcatatgtattcttgccgctttagcagacaatgtgtcgtggatcgggaccgcagaaaccagtgccggtactgtcgcctgaagaaatgcttcagagccggaatgcggcgcgaagcggttcagaatgagagagatcggatttccacccgcagagccgcttatgaagacagcgccctcccctctatcaacgctctgctgcaggccgaggtgctctcccggcaaattgcggcccctgtcagcggcatcaatggcgatattagagctcgccggatcgcctctatcgctgacgtgtgtgagtccatgaaggaacagctgcttgttctggtggagtgggccaagtacattcccgccttttgcgaactccctctggatgaccaggtcgcccttctgagagcgcacgccggggagcatctcctgctgggagctacacgccggagcatggtgttcaaagacgtgctcctgcttggcaacgattatatcgtccccagacactgtcctgagctggccgaaatgtctcgcgtttccattcggatcctcgacgagctggtgcttccgtttcaggaactgcaaattgatgacaatgagtacgcctacctcaaggctatcattttctttgatcccgacgccagagggctgagcgatcctggacgcatccggagactgcgcgctcaggtgcaggtctccctcgaagactatatcaacgatcggcagtacgactctagaggccggttcggggagctgcttctgctcctgcccacccttcaaagcattacgtggcagatgatcgagcagattcaatttatcaaactgttcggaatggcgaagattgataatctcctgcaggaaatgctgctcggcggcgccccttccgacgctccccatgctcaccacccgctgcatcctcaccttatgcaggagcatatggggaccaacgtgatcgttgccaatacaatgcccacccacctgagcaacggacagatgtgcgaatggcctcgccccagaggccaagctgccgcgcccgaggcccctcagccggctccccctgggggatctggctccgaaccctatcggctcctgcctggggccgtggctacaatcgtcagacccctggaggccattccgcagcctaccatcacgcgccaggaggtgatttgaggactagtccctgttcccagagcccacttttttttctttttttgaaataaaatagcctgtctttcagatctaaaaaaaaaaaaaaaaaaaaaaaaaaaaaaaaaaaaaaaaaaaaaaaaaaaaaaaaaaaaaaaaaaaaaaaaaaaaaaaaaaaaaaaaaaaaaaaaaaaa

SEQ ID NO: 4527 - RNA, 1673 nt, synthetic construct
  misc_feature 1..1673: note = mRNA a-1 (A100) (opt5) from Homo sapiens__NP_000448.3__HNF4A(1-474)(S87A_S95A_S99A_K106R_K10 8R_K126R_K127R_S142A_S143A_S148A_T166A_S167A_S313A_S378A_T4 29A_T432A_S436A_K458R_S461E)
  source 1..1673: mol_type = other RNA
aggagagtcccgcagtcggcgtccagcggctctgcttgttcgtgtgtgtgtcgttgcaggccttattcaagcttaccatgagactgagcaagaccctcgtggacatggatatggccgactactccgctgccctggatcccgcgtatacaacgcttgagttcgaaaacgtccaggttctgaccatgggcaatgacacatctcctagcgaggggaccaacctcaatgctccgaactccctgggagtgtctgccctttgcgccatctgtggcgatcgggctacagggaaacactacggagccagctcctgcgacggctgtaaggggtttttccgcagagctgtgcggaaaaatcatatgtatgcctgccgctttgcgagacaatgtgtcgtggatcgggaccgcagaaaccagtgccggtactgtcgcctgaagaaatgcttcagagccggaatgcggcgcgaagctgttcagaatgagagagatcggatttctacccgcagagccgcttatgaagacagcgccctcccctccatcaacgcgctgctgcaggccgaggtgctcagccggcaaattgctgcccctgtctctggcatcaatggcgatattagagctaagaagatcgcctccatcgccgacgtgtgtgagagcatgaaagaacagctgcttgttctggtggagtgggctaagtacattcccgcgttttgcgaactccctctggatgaccaggtcgcccttctgcgcgctcacgccggggagcatctcctgctgggagccacaaaacggtctatggtgttcaaggacgtgctcctgcttggcaacgattatatcgtccccagacactgtcctgagctggctgaaatgtcccgcgttagcattcggatcctcgacgagctggtgcttccgtttcaggaactgcaaattgatgacaatgagtacgcctacctcaaagcgatcattttctttgatcccgacgctaaggggctgtctgatcctggaaagatcaaaagactgcgcgcccaggtgcaggtctccctcgaagactatatcaacgatcggcagtacgacagcagaggccgcttcggggagctgcttctgctcctgcccacccttcaatccattacgtggcagatgatcgagcagattcaatttatcaagctgttcggaatggccaaaattgataatctcctgcaggaaatgctgctcggcggcgctccttctgacgctccccatgcccaccacccgctgcatcctcaccttatgcaggagcatatggggaccaacgtgatcgttgccaatacaatgcccacccacctgagcaacggacagatgtgcgaatggcctcggcccagaggccaagcggccgctcccgaggcccctcagccggctccccctgggggatccggcagcgaaccctataagctcctgcctggggccgtggcgacaatcgtccgccccctggaggccattccgcagcctaccatcacgaaacaggaggtgatttgaggactagtccctgttcccagagcccacttttttttctttttttgaaataaaatagcctgtctttcagatctaaaaaaaaaaaaaaaaaaaaaaaaaaaaaaaaaaaaaaaaaaaaaaaaaaaaaaaaaaaaaaaaaaaaaaaaaaaaaaaaaaaaaaaaaaaaaaaaaaaa

SEQ ID NO: 4528 - RNA, 1673 nt, synthetic construct
  misc_feature 1..1673: note = mRNA a-1 (A100) (opt5) from Homo sapiens__NP_000448.3__HNF4A(1-474)(S87A_K106R_K108R_K126R_K 127R_S138A_T139A_S142A_S143A_S148A_T166A_S167A_S313A_S378A_ T429A_T432A_S436A_K458R_S461E)
  source 1..1673: mol_type = other RNA
aggagagtcccgcagtcggcgtccagcggctctgcttgttcgtgtgtgtgtcgttgcaggccttattcaagcttaccatgagactgagcaagaccctcgtggacatggatatggccgactactccgctgccctggatcccgcgtatacaacgcttgagttcgaaaacgtccaggttctgaccatgggcaatgacacatctcctagcgaggggaccaacctcaatgctccgaactccctgggagtgtctgccctttgcgccatctgtggcgatcgggctacagggaaacactacggagccagctcctgcgacggctgtaaggggtttttccgcagagctgtgcggaaaaatcatatgtattcttgccgctttagcagacaatgtgtcgtggatcgggaccgcagaaaccagtgccggtactgtcgcctgaagaaatgcttcagagccggaatgcggcgcgaagcggttcagaatgagagagatcggattgccgctcgcagagccgcttatgaagactccgccctccccagcatcaacgcgctgctgcaggccgaggtgctctctcggcaaattgctgcccctgtctccggcatcaatggcgatattagagctaagaagatcgccagcatcgccgacgtgtgtgagtctatgaaagaacagctgcttgttctggtggagtgggctaagtacattcccgcgttttgcgaactccctctggatgaccaggtcgcccttctgcgcgctcacgccggggagcatctcctgctgggagccaccaaacggtccatggtgttcaaggacgtgctcctgcttggcaacgattatatcgtccccagacactgtcctgagctggctgaaatgagccgcgtttctattcggatcctcgacgagctggtgcttccgtttcaggaactgcaaattgatgacaatgagtacgcctacctcaaagcgatcattttctttgatcccgacgctaaggggctgtccgatcctggaaagatcaaaagactgcgcgcccaggtgcaggtcagcctcgaagactatatcaacgatcggcagtacgactccagaggccgcttcggggagctgcttctgctcctgcccacacttcaatctattacctggcagatgatcgagcagattcaatttatcaagctgttcggaatggccaaaattgataatctcctgcaggaaatgctgctcggcggcgctcctagcgacgctccccatgcccaccacccgctgcatcctcaccttatgcaggagcatatggggacgaacgtgatcgttgccaataccatgcccacacacctgtccaacggacagatgtgcgaatggcctcggcccagaggccaagcggccgctcccgaggcccctcagccggctccccctgggggaagcggctctgaaccctataagctcctgcctggggccgtggcgaccatcgtccgccccctggaggccattccgcagcctacaatcaccaaacaggaggtgatttgaggactagtccctgttcccagagcccacttttttttctttttttgaaataaaatagcctgtctttcagatctaaaaaaaaaaaaaaaaaaaaaaaaaaaaaaaaaaaaaaaaaaaaaaaaaaaaaaaaaaaaaaaaaaaaaaaaaaaaaaaaaaaaaaaaaaaaaaaaaaaa

SEQ ID NO: 4529 - RNA, 1673 nt, synthetic construct
  misc_feature 1..1673: note = mRNA a-1 (A100) (opt5) from Homo sapiens__NP_000448.3__HNF4A(1-474)(S87A_S95A_S99A_K106R_K10 8R_K126R_K127R_S138A_T139A_S142A_S143A_S148A_T166A_S167A_S3 13A_S378A_T429A_T432A_S436A_K458R_S461E)
  source 1..1673: mol_type = other RNA
aggagagtcccgcagtcggcgtccagcggctctgcttgttcgtgtgtgtgtcgttgcaggccttattcaagcttaccatgagactgagcaagaccctcgtggacatggatatggccgactactccgctgccctggatcccgcgtatacaacgcttgagttcgaaaacgtccaggttctgaccatgggcaatgacacatctcctagcgaggggaccaacctcaatgctccgaactccctgggagtgtctgccctttgcgccatctgtggcgatcgggctacagggaaacactacggagccagctcctgcgacggctgtaaggggtttttccgcagagctgtgcggaaaaatcatatgtatgcctgccgctttgcgagacaatgtgtcgtggatcgggaccgcagaaaccagtgccggtactgtcgcctgaagaaatgcttcagagccggaatgcggcgcgaagctgttcagaatgagagagatcggattgccgctcgcagagccgcgtatgaagactctgccctccccagcatcaacgctctgctgcaggccgaggtgctctcccggcaaattgctgcccctgtcagcggcatcaatggcgatattagagccaagaagatcgcttctatcgcggacgtgtgtgagtccatgaaagaacagctgcttgttctggtggagtgggccaagtacattcccgctttttgcgaactccctctggatgaccaggtcgcccttctgcgcgcccacgctggggagcatctcctgctgggagccaccaaacggagcatggtgttcaaggacgtgctcctgcttggcaacgattatatcgtccccagacactgtcctgagctggcggaaatgtctcgcgtttccattcggatcctcgacgagctggtgcttccgtttcaggaactgcaaattgatgacaatgagtacgcttacctcaaagccatcattttctttgatcccgacgccaaggggctgagcgatcctggaaagatcaaaagactgcgcgctcaggtgcaggtctctctcgaagactatatcaacgatcggcagtacgactccagaggccgcttcggggagctgcttctgctcctgcccacacttcaaagcattacctggcagatgatcgagcagattcaatttatcaagctgttcggaatggccaaaattgataatctcctgcaggaaatgctgctcggcggcgctccttccgacgcgccccatgcccaccacccgctgcatcctcaccttatgcaggagcatatggggacgaacgtgatcgttgccaataccatgcccacacacctgtctaacggacagatgtgcgaatggcctcggcccagaggccaagctgccgctcccgaggcccctcagccggcgccccctgggggaagcggctccgaaccctataagctcctgcctggggccgtggctaccatcgtccgccccctggaggccattccgcagcctacaatcaccaaacaggaggtgatttgaggactagtccctgttcccagagcccacttttttttctttttttgaaataaaatagcctgtctttcagatctaaaaaaaaaaaaaaaaaaaaaaaaaaaaaaaaaaaaaaaaaaaaaaaaaaaaaaaaaaaaaaaaaaaaaaaaaaaaaaaaaaaaaaaaaaaaaaaaaaaa

SEQ ID NO: 4530 - RNA, 1673 nt, synthetic construct
  misc_feature 1..1673: note = mRNA a-1 (A100) (opt11) from Homo sapiens__NP_000448.3__HNF4A(1-474)
  source 1..1673: mol_type = other RNA
aggagagtcccgcagtcggcgtccagcggctctgcttgttcgtgtgtgtgtcgttgcaggccttattcaagcttaccatgcgtctttccaaaacactcgtagacatggacatggcagactacagcgccgccctcgacccagcctacaccaccctcgaatttgaaaacgtccaagtcctaactatgggaaacgacacatcaccctcagaaggtacaaacctcaacgcccccaactcgctaggcgtctccgcactatgcgcaatctgcggcgaccgtgccaccggcaaacactacggagcctcatcctgcgacggttgtaaaggcttcttccgacgcagcgtcagaaaaaaccacatgtactcctgccgcttctcccgtcaatgcgtcgtcgacaaagacaaacgcaaccaatgccggtactgccgcctaaaaaaatgcttccgcgcaggcatgaaaaaagaagcagtccaaaacgaacgcgaccgcatatcaacccgtcgatcatcatacgaagactcctccctccccagcatcaacgccctcctccaagcagaagtactaagccggcaaataacatccccagtcagcggcatcaacggagacatacgagccaaaaaaatagcttcaatcgccgacgtctgcgaatccatgaaagagcaactactggtcctcgtcgaatgggctaaatacatcccggccttctgcgaactccccctcgacgatcaagtcgcccttctaagagcccacgccggcgaacacctcctcttaggcgcaaccaaacgcagcatggtattcaaagacgtactgctcctcggcaacgattacatcgtcccacgacattgccccgagctcgcagaaatgtcccgagtctccatccgcatactcgacgaactcgtactccccttccaagaactccaaatagacgacaatgaatacgcatacctcaaagcaatcatcttcttcgaccccgacgccaaaggactcagcgacccaggcaaaatcaaacgcctacgatcacaagtacaagtttcacttgaagactacatcaacgacagacaatacgactcaagaggtcgtttcggagaactactcctactactaccaaccctccaaagcataacctggcaaatgatagaacaaatacaatttataaaactcttcggcatggccaaaatcgacaatctcctacaagaaatgctcctcggaggaagcccctcagatgccccacacgcccaccacccactacacccccacctcatgcaagagcacatgggtaccaacgtcatagtcgccaacacaatgcccacccacctctcaaacggccaaatgtgcgaatggccgcgcccacgcggacaagccgccacccccgaaaccccacagccaagcccacccggtggctccggcagcgaaccctacaaactcctacccggcgccgttgcaacaatagtcaaacccctatccgccataccccaaccaacgatcaccaaacaagaagtcatctagggactagtccctgttcccagagcccacttttttttctttttttgaaataaaatagcctgtctttcagatctaaaaaaaaaaaaaaaaaaaaaaaaaaaaaaaaaaaaaaaaaaaaaaaaaaaaaaaaaaaaaaaaaaaaaaaaaaaaaaaaaaaaaaaaaaaaaaaaaaaa

SEQ ID NO: 4531 - RNA, 1673 nt, synthetic construct
  misc_feature 1..1673: note = mRNA a-1 (A100) (opt11) from Homo sapiens__NP_000448.3__HNF4A(1-474)(S313A)
  source 1..1673: mol_type = other RNA
aggagagtcccgcagtcggcgtccagcggctctgcttgttcgtgtgtgtgtcgttgcaggccttattcaagcttaccatgcgtctctcaaaaaccctagtcgacatggacatggccgactattctgcagccctagacccagcctacaccaccctcgaattcgaaaacgtacaagtactcaccatgggcaacgatacctccccatctgaaggcaccaacctcaacgcacccaactctctcggagtctccgccctatgcgcaatctgcggcgaccgagccactggaaaacactacggcgcctcctcttgcgacggatgcaaaggcttcttccgaagatcagtccgaaaaaaccacatgtactcatgccgcttctcgcgccaatgcgtcgtcgacaaagacaaacgtaaccaatgcagatactgccgactcaaaaaatgcttccgcgccggcatgaaaaaagaagccgtccagaacgaacgcgaccgcatctcaaccagacgctcgagctacgaagactcctccctaccctccatcaacgccctactccaagcagaagtactatcccgccaaataacctcccccgtcagcggcatcaacggcgacatcagagccaaaaaaatcgcctcaatcgccgacgtatgcgagagcatgaaagaacagctccttgtcctagtagaatgggccaaatacatcccagccttctgcgaactccccctcgacgaccaagtcgccctactcagagcccacgccggcgaacacctcctcctcggcgctaccaagcgatctatggtattcaaggatgtacttctactcggaaacgactacatcgtaccacgccactgcccagaactagccgaaatgtcccgcgtatccatccgaatcctcgatgaactcgtactccccttccaagaactacaaattgacgacaatgaatacgcctacttaaaagccatcatattcttcgaccccgacgccaaaggtctgtccgacccaggcaaaatcaaacgactacgggcccaagtccaagtatcactcgaagactacatcaacgaccgccaatacgactcacgcggccgcttcggcgagctcctcctccttctcccaaccctacaatccataacctggcaaatgatcgaacaaatccaattcataaaactcttcggcatggcaaaaattgacaaccttctccaagaaatgctcctgggcggatccccctccgacgccccacacgcccatcaccccctccacccccacctaatgcaggaacacatgggcacaaatgtcatagtagccaacactatgcccacacatctctcaaacggccagatgtgtgaatggccacgcccacgaggacaagcagccacacccgaaacaccacaaccctcccccccaggcggctccggatccgaaccctacaaactcctacccggcgccgtcgccacaatcgtcaaacccctatccgccatcccccaacccacgatcaccaaacaagaagtcatctaaggactagtccctgttcccagagcccacttttttttctttttttgaaataaaatagcctgtctttcagatctaaaaaaaaaaaaaaaaaaaaaaaaaaaaaaaaaaaaaaaaaaaaaaaaaaaaaaaaaaaaaaaaaaaaaaaaaaaaaaaaaaaaaaaaaaaaaaaaaaaa

SEQ ID NO: 4532 - RNA, 1673 nt, synthetic construct
  misc_feature 1..1673: note = mRNA a-1 (A100) (opt11) from Homo sapiens__NP_000448.3__HNF4A(1-474)(S313E)
  source 1..1673: mol_type = other RNA
aggagagtcccgcagtcggcgtccagcggctctgcttgttcgtgtgtgtgtcgttgcaggccttattcaagcttaccatgcgcctgtccaaaaccctcgtcgacatggacatggctgactactccgccgccctcgaccccgcatacaccacactcgaattcgaaaacgtccaggtcctcaccatgggaaacgacacctccccctcagaaggaaccaacctaaacgctcccaactcccttggcgtctccgccctctgcgcaatatgcggagaccgcgccaccggaaaacactacggcgcctcatcctgcgacggttgcaaaggcttcttccgccgatccgtccgcaaaaaccacatgtattcctgccgcttctcgcgacagtgcgtagtcgacaaagataaacgaaaccaatgccgatactgccgccttaaaaaatgcttccgcgccggaatgaaaaaagaagcagtccaaaacgaacgagaccgcatcagcacccgtaggagctcatacgaggactcgagcctcccctcgatcaacgccttactccaagccgaagtactgtcccgccagatcacctcacccgtctccggcatcaacggagacatcagagccaaaaaaatagcatcgatcgccgacgtatgcgagtccatgaaagaacaactcctagtactagtcgaatgggccaaatacatcccagcattctgcgaactacccctagatgatcaagtagccctactacgagcccacgccggcgaacacctcctcctcggggccaccaaacgatcaatggtcttcaaagacgtcctcctcctcggcaacgactacatcgtaccccgccactgcccagaactcgcagaaatgtcacgcgtctcaatccgcatcctggacgaacttgtactcccattccaagaactacaaatagacgacaacgaatacgcatacctgaaagcaatcatctttttcgaccccgacgccaaaggcctatctgaccccggtaaaataaaacgcctccgcgaacaagtacaagtctctctcgaagactacatcaacgaccgccagtacgacagccggggacgcttcggcgaacttctcctcctcctccccactctacaaagcatcacctggcaaatgatcgaacaaatacaattcatcaaactcttcggaatggcaaaaatcgacaacctcctccaagaaatgctcctcggcggctccccgagcgacgcccctcacgcccaccacccactccacccccacctaatgcaagagcacatgggaaccaacgtcatagtcgcaaacacaatgcccacccacctctccaacggccaaatgtgcgaatggccccgcccacgcggccaagccgccacacccgaaacaccccaaccatcacccccaggcggatcaggatccgagccctacaaactcctcccaggcgccgtcgccacaatcgtcaaacccctcagcgccataccacaaccaacaataacgaaacaagaagtcatataaggactagtccctgttcccagagcccacttttttttctttttttgaaataaaatagcctgtctttcagatctaaaaaaaaaaaaaaaaaaaaaaaaaaaaaaaaaaaaaaaaaaaaaaaaaaaaaaaaaaaaaaaaaaaaaaaaaaaaaaaaaaaaaaaaaaaaaaaaaaaa

SEQ ID NO: 4533 - RNA, 1673 nt, synthetic construct
  misc_feature 1..1673: note = mRNA a-1 (A100) (opt11) from Homo sapiens__NP_000448.3__HNF4A(1-474)(S142A_S143A)
  source 1..1673: mol_type = other RNA
aggagagtcccgcagtcggcgtccagcggctctgcttgttcgtgtgtgtgtcgttgcaggccttattcaagcttaccatgcgcctatcaaaaacactggtcgacatggacatggcagactattctgccgccctggaccccgcctacactacactcgagttcgaaaacgtccaagtactcaccatgggaaacgacacctccccctccgaaggcaccaacttaaacgcccccaactcccttggggtctccgctctctgcgcaatctgcggagacagagccaccggtaaacactacggagcctcctcctgcgacggatgcaaaggcttcttccgccgctcagtacgcaaaaaccacatgtatagttgccgcttctctcgccagtgcgtggtcgacaaagacaaacgcaaccaatgccgatactgccgcctcaaaaagtgcttccgcgccggaatgaagaaagaagctgtccaaaacgaacgcgaccgcatctcaacccgcagagcggcatacgaagacagctcgctaccctccataaacgccctccttcaagccgaagtcctatcccgacagatcacctcccccgtctctggaataaacggcgacatccgcgcaaagaaaatcgcctccatcgccgacgtatgcgaatccatgaaagaacaactcctagtgctagtagaatgggccaaatacatacccgccttctgcgagctccccctagacgaccaagtagccctactccgcgcacacgcaggcgaacacctcctcctcggcgccaccaaacgatcaatggtcttcaaagacgtactactcctcggcaatgactacatcgtcccacgacactgccccgaattagcagaaatgtcgcgagtctccatacgcatcctagacgaactcgtactccctttccaagaactacaaatcgatgacaacgaatacgcatacctcaaagccatcatcttcttcgacccagacgccaaaggcctttccgatcccggcaaaatcaaaagactacgctcacaagtacaagtctccctcgaagattacatcaacgaccgccaatacgactcacgcggccgcttcggagaactcctactactcctcccaaccctacaatccatcacctggcaaatgatcgaacaaatccagttcattaaactcttcggaatggccaaaatcgataacctcctacaagaaatgctcctaggcggcagtccatccgacgcgccccacgcacaccatccactccacccccacctcatgcaagaacacatgggcaccaacgtaatcgtcgcaaacaccatgcccacacacctttcaaacggccaaatgtgcgaatggccgcgcccccgcggccaagcagccaccccagaaaccccacaaccatcacccccaggcggcagcggctcagaaccctataaactcctccccggcgccgtagccacaatcgtcaaacctctctccgcaatcccccaacccaccatcaccaaacaagaagtcatctaaggactagtccctgttcccagagcccacttttttttctttttttgaaataaaatagcctgtctttcagatctaaaaaaaaaaaaaaaaaaaaaaaaaaaaaaaaaaaaaaaaaaaaaaaaaaaaaaaaaaaaaaaaaaaaaaaaaaaaaaaaaaaaaaaaaaaaaaaaaaaa

SEQ ID NO: 4534 - RNA, 1673 nt, synthetic construct
  misc_feature 1..1673: note = mRNA a-1 (A100) (opt11) from Homo sapiens__NP_000448.3__HNF4A(1-474)(S142E_S143E)
  source 1..1673: mol_type = other RNA
aggagagtcccgcagtcggcgtccagcggctctgcttgttcgtgtgtgtgtcgttgcaggccttattcaagcttaccatgcgcctatccaaaaccctagtcgacatggacatggcagactactccgccgccctcgacccagcatacaccacactcgaattcgaaaacgtccaagtgctaaccatgggcaacgacaccagcccgtccgaaggcacaaacctcaacgcccccaactcccttggtgtctcagccctctgcgcaatctgcggcgaccgtgccaccggtaaacactatggcgcctcatcctgcgacggctgcaaaggcttcttcagacgatcggtacgcaaaaaccacatgtactcatgtcgcttctcccgacaatgtgtagtggacaaagacaaaagaaaccaatgccgctactgccgcctcaaaaaatgcttccgcgcaggcatgaaaaaagaagccgtccagaatgaacgagaccgcataagcacccgccgagaagaatatgaagactcctcacttccctcaatcaacgccctactccaagccgaagtactatcacggcaaatcacaagccccgtctcaggaataaacggagacatccgcgccaaaaaaattgcctccatcgcggacgtatgcgaaagcatgaaagaacaactactcgtactcgtcgaatgggcaaaatacatccccgcattctgcgaactccccctcgacgaccaagtagccctgctcagagcacacgccggagaacaccttctcctcggcgccaccaaacgctccatggtcttcaaagacgtcctcctcctagggaacgactacatagtaccacgacactgcccagaactagccgaaatgtccagagtatcaatccgaatcctcgacgaactcgtcctccccttccaagaactacaaatcgacgacaacgaatacgcctacctaaaagccatcatattcttcgatcccgacgcaaaaggcctctccgaccccggcaaaatcaagcgactacgatcacaagtacaagtctccctggaagactacatcaacgaccgccaatacgacagccgcggaagattcggcgaactcctgctactactccccaccctacaatccatcacctggcaaatgatagaacaaatacaattcatcaaactcttcggcatggctaaaatcgacaacctcctacaagaaatgctactaggcggcagcccctcagacgccccccacgcccaccaccccctccacccccacctcatgcaggaacacatgggcaccaacgtcatcgtcgccaacacaatgcccacccatctctccaacggccaaatgtgcgaatggcctaggccacgtggtcaagcagcaacccccgaaaccccccaaccctccccaccaggcggttcaggatccgaaccctacaaactactcccaggcgccgtagccaccattgtcaagccgctcagcgctataccccaacccaccataaccaaacaagaagtcatataaggactagtccctgttcccagagcccacttttttttctttttttgaaataaaatagcctgtctttcagatctaaaaaaaaaaaaaaaaaaaaaaaaaaaaaaaaaaaaaaaaaaaaaaaaaaaaaaaaaaaaaaaaaaaaaaaaaaaaaaaaaaaaaaaaaaaaaaaaaaaa

SEQ ID NO: 4535 - RNA, 1673 nt, synthetic construct
  misc_feature 1..1673: note = mRNA a-1 (A100) (opt11) from Homo sapiens__NP_000448.3__HNF4A(1-474)(S143A)
  source 1..1673: mol_type = other RNA
aggagagtcccgcagtcggcgtccagcggctctgcttgttcgtgtgtgtgtcgttgcaggccttattcaagcttaccatgcgactctccaagaccctcgtagacatggatatggcagactacagcgccgccctagatccagcttacaccaccctcgaattcgaaaacgttcaagtcctaacgatgggcaacgacacctcaccatcagaaggcaccaacctcaacgcccccaactccctcggagtctcagccctctgcgcaatctgcggcgaccgcgccaccggcaaacactacggagcctcgtcctgcgacggatgcaaaggattcttcaggcgctccgtacggaaaaaccacatgtactcttgtcgtttctcccgccaatgcgtagtcgacaaagacaaacgcaaccaatgccgctactgtcgcctcaaaaaatgcttccgcgccggcatgaagaaagaagccgtccaaaacgaacgcgaccgcatctccacccgcaggtccgcctacgaagactccagcctaccctccatcaacgcactactccaagccgaagtcctctcccgccaaatcacgtctcccgtctcaggaatcaacggcgacatccgcgctaagaaaatagcatctatcgccgacgtctgtgaatccatgaaagaacaactactcgtactggtagaatgggccaaatacatccccgccttctgcgaacttcccctcgacgaccaagttgcactcctccgagcccacgccggggaacacctactcctcggagccaccaaacgctcaatggtcttcaaagacgtactcctcctcggcaacgactacatcgtgccacgccactgccccgaactagccgaaatgtcccgggtctccattcgaatcctcgacgaactcgtcctccccttccaagaactccaaatagacgacaacgaatacgcttacctcaaagcaataatcttcttcgacccagatgccaaaggcctcagcgacccgggcaagattaaacgcctccgctctcaagtccaagtctcccttgaagactacatcaacgaccgccaatacgactcccgcggtcgattcggggaactactcctactcctcccaacactacaatccatcacctggcaaatgatcgaacaaatccaattcatcaaactcttcggcatggccaaaatcgacaacctcctacaggaaatgctcctaggaggcagcccctccgacgccccccacgcccaccaccccctccacccccacctaatgcaagaacatatgggaaccaacgtaatcgtcgcaaacacaatgcccacccacctctccaacggccaaatgtgcgaatggccccgcccccgcggtcaagcagccacacccgaaacccctcaaccctccccgcccggaggcagcggctccgaaccatacaaactcctcccaggcgccgtagccaccatcgtaaaacccctatcggccataccccaacccacaatcaccaaacaagaagtaatctaaggactagtccctgttcccagagcccacttttttttctttttttgaaataaaatagcctgtctttcagatctaaaaaaaaaaaaaaaaaaaaaaaaaaaaaaaaaaaaaaaaaaaaaaaaaaaaaaaaaaaaaaaaaaaaaaaaaaaaaaaaaaaaaaaaaaaaaaaaaaaa

SEQ ID NO: 4536 - RNA, 1673 nt, synthetic construct
  misc_feature 1..1673: note = mRNA a-1 (A100) (opt11) from Homo sapiens__NP_000448.3__HNF4A(1-474)(T166A)
  source 1..1673: mol_type = other RNA
aggagagtcccgcagtcggcgtccagcggctctgcttgttcgtgtgtgtgtcgttgcaggccttattcaagcttaccatgaggctcagcaaaactctagtcgacatggacatggccgactactcagccgcactcgaccccgcatataccacactagagttcgaaaacgtccaagttctcaccatgggaaacgacacttccccctcagaaggcacaaacctcaacgcacccaactccctaggagtctccgccctatgcgcgatctgtggcgaccgagcaaccggcaagcattacggcgcatcctcctgcgacggatgcaaaggcttcttccgccgatccgtccgaaagaaccacatgtactcctgccgattctcccgccaatgcgtagttgacaaagacaaacgcaatcaatgccgatactgccgcctcaagaaatgcttccgagcaggaatgaagaaagaagccgtccaaaacgaacgcgatcgcatatccacccgccgctcctcctacgaagactcctccctcccctccatcaacgcactcctccaagcggaagtactctcacgccaaatcgcgtccccagtctccggcataaacggagacatccgcgccaagaaaatagcctcaatcgctgacgtctgcgaatctatgaaagaacagctcctcgtcctagtcgaatgggccaaatacatccccgccttctgcgaactcccactagacgaccaagtggcactcctccgcgcccacgccggcgaacacctactactcggagccaccaaacgctccatggtgttcaaagacgtactactcctcggaaatgactacatcgtcccccgacactgccccgaactcgccgaaatgtccagggtctccatccgcatcctcgacgaactggtcctcccattccaagaactccaaatcgacgacaacgaatacgcctacctaaaagccatcatcttcttcgaccccgacgccaaaggcctatccgacccgggcaaaatcaaacgactccgctcccaagtccaagtctcactcgaagactacatcaacgatagacagtacgactcacgcggtagattcggagaactcctactcctactccccacactccaatccataacctggcaaatgatagaacaaatacaattcatcaaactcttcggcatggccaaaatcgacaacctactccaggaaatgctcttaggcggctccccatccgacgccccacacgcccaccaccccctccacccccacctcatgcaagaacacatgggcaccaatgtcatagtagcaaacaccatgcccacacacctctccaacggacaaatgtgcgaatggccccgcccacgcggtcaggccgccacccccgaaaccccacaaccctccccacccggaggctccggatcagaaccctacaaactcctccccggcgccgtcgcaaccatcgttaaaccactatccgccataccccaacccaccatcaccaaacaagaggtcatataaggactagtccctgttcccagagcccacttttttttctttttttgaaataaaatagcctgtctttcagatctaaaaaaaaaaaaaaaaaaaaaaaaaaaaaaaaaaaaaaaaaaaaaaaaaaaaaaaaaaaaaaaaaaaaaaaaaaaaaaaaaaaaaaaaaaaaaaaaaaaa

SEQ ID NO: 4537 - RNA, 1673 nt, synthetic construct
  misc_feature 1..1673: note = mRNA a-1 (A100) (opt11) from Homo sapiens__NP_000448.3__HNF4A(1-474)(S167E)
  source 1..1673: mol_type = other RNA
aggagagtcccgcagtcggcgtccagcggctctgcttgttcgtgtgtgtgtcgttgcaggccttattcaagcttaccatgcgcctctccaaaaccctcgtcgacatggacatggcagactactctgcagctctcgaccccgcctataccacgctcgaattcgaaaacgtacaagtcctcaccatgggaaacgacacctccccctctgaaggcaccaacctcaacgcacccaacagccttggcgtcagcgccttatgcgccatttgcggagaccgcgccaccggcaaacactacggagcatcctcatgcgacggctgcaaaggcttcttccgccgatcagtccgaaaaaaccacatgtactcctgccgcttctctcgccagtgcgtagtcgataaagataaaagaaatcaatgccgctactgccgcctcaaaaaatgcttccgcgccggcatgaaaaaagaagcagttcaaaacgaacgcgaccgaatctccacccgccgctcatcctacgaagactcttccctcccctctataaacgccctcctccaagccgaagtactctcacgccaaatcaccgaacctgtctccggcattaacggagacatacgcgccaagaaaatagccagcatcgccgacgtctgcgaatcaatgaaagaacaactcctcgtcctagtcgaatgggccaaatacatccccgcattctgcgaacttcccctcgacgaccaagtcgccctcctccgtgcccatgcaggcgaacacctcctcctcggcgccaccaaacgctccatggtctttaaagacgtcctcctcctgggcaacgactacatcgtcccccgacactgcccagaactcgccgagatgagccgcgtgtccatacgcatactcgacgaactcgtcctccccttccaagaactccagatagacgataacgaatacgcatacctaaaagccataatattcttcgaccccgacgctaaaggtctctcagacccaggaaaaatcaaacgtctcagaagccaagtccaagtctcactcgaagactacatcaacgaccgccaatacgactctcgcggccgcttcggcgaactcctcttattactcccaacactccaatcaatcacctggcaaatgatcgaacaaatacaatttatcaaactcttcggcatggctaaaatcgacaatctcctccaagaaatgctcctcggaggctccccctcagatgccccccacgcccaccacccccttcatccccacttaatgcaagaacatatgggcaccaacgtcatcgtagccaacaccatgcccacacacctatccaacggccaaatgtgcgaatggccccgcccccgaggacaagccgccaccccagaaacaccccaaccctccccccccggaggcagcggctccgaaccatacaaactcctcccaggtgccgtcgccactatcgtcaaacccctctcagccatcccccaaccaaccatcacaaagcaagaagtcatctaaggactagtccctgttcccagagcccacttttttttctttttttgaaataaaatagcctgtctttcagatctaaaaaaaaaaaaaaaaaaaaaaaaaaaaaaaaaaaaaaaaaaaaaaaaaaaaaaaaaaaaaaaaaaaaaaaaaaaaaaaaaaaaaaaaaaaaaaaaaaaa

SEQ ID NO: 4538 - RNA, 1673 nt, synthetic construct
  misc_feature 1..1673: note = mRNA a-1 (A100) (opt11) from Homo sapiens__NP_000448.3__HNF4A(1-474)(S167A)
  source 1..1673: mol_type = other RNA
aggagagtcccgcagtcggcgtccagcggctctgcttgttcgtgtgtgtgtcgttgcaggccttattcaagcttaccatgcggctctcaaaaaccctagtcgacatggacatggccgactactcagctgccctagaccccgcatacaccacactagaattcgaaaatgtccaagtactaaccatgggcaacgacacctcaccctccgaaggtaccaacctcaacgcgcccaactccctcggcgtctcagccctctgcgccatctgcggcgaccgcgcgaccggcaaacactacggtgcctcctcatgcgacggatgcaaaggcttcttccgacgctcagtccgcaaaaaccacatgtactcctgccgcttctcacgacaatgcgtcgttgacaaagacaaacgcaaccaatgccgctactgccgcctcaaaaaatgcttccgcgcaggaatgaaaaaagaagcagttcaaaacgaacgcgaccgcatctcaacccgcagatcatcatacgaagactcatccctaccatcaataaacgccctcctacaagccgaagtcctctccagacaaatcaccgcccccgtctcaggcataaacggcgacatccgtgcaaaaaaaatcgcctccatcgctgacgtctgcgaatccatgaaagaacaactccttgtcctcgtcgaatgggccaaatacattcctgccttctgcgaactccccctcgacgaccaagtcgcactactcagagcccacgcaggcgaacacctcctcctcggagcaacaaaacgctccatggtcttcaaagacgtcctcctactcggaaatgactacatcgtccccagacactgccccgaactcgctgaaatgtcaagagtctccatacgaatactagacgaactagtcctacccttccaagaactgcaaatagacgacaacgaatacgcctacctcaaagccatcatattcttcgaccccgacgccaagggactctcagaccccggcaaaatcaaacgcctacgctcccaagtgcaagtcagcctcgaagactacataaacgatcgccagtacgactcacgaggacgattcggagaactcctcctcctcctcccaacactccagtccatcacctggcaaatgatcgaacaaatccaatttatcaaactcttcggcatggccaaaatcgacaacctactacaagaaatgctcctcggaggatccccctcagacgccccccacgcccaccaccctctccacccccacctaatgcaagaacacatggggaccaacgtaatcgtcgccaataccatgccaactcatctatcaaacggtcaaatgtgcgaatggccccgcccccggggacaagccgccacccccgagacaccgcaaccctccccccctggcggatccggctcagaaccctataaactactccccggcgcggtcgccaccatagtcaaaccactctctgccatcccccaaccaaccataaccaaacaagaagtcatctaaggactagtccctgttcccagagcccacttttttttctttttttgaaataaaatagcctgtctttcagatctaaaaaaaaaaaaaaaaaaaaaaaaaaaaaaaaaaaaaaaaaaaaaaaaaaaaaaaaaaaaaaaaaaaaaaaaaaaaaaaaaaaaaaaaaaaaaaaaaaaa

SEQ ID NO: 4539 - RNA, 1673 nt, synthetic construct
  misc_feature 1..1673: note = mRNA a-1 (A100) (opt11) from Homo sapiens__NP_000448.3__HNF4A(1-474)(S167A_S378A_T429A_T432A_ S436A)
  source 1..1673: mol_type = other RNA
aggagagtcccgcagtcggcgtccagcggctctgcttgttcgtgtgtgtgtcgttgcaggccttattcaagcttaccatgcgcctctccaaaaccctcgttgacatggatatggcggactactccgccgcactcgacccagcctacaccaccctagaatttgaaaacgtccaagtactaaccatgggcaacgacacaagcccctccgaaggcacaaatctcaacgcccccaactcactaggcgtctcagccctatgtgctatctgcggcgaccgcgccaccggcaaacactacggcgcatcatcatgtgacggatgcaaaggattcttccgacgctccgtccgaaagaaccacatgtactcctgccgattcagcagacaatgtgttgtcgacaaagacaaacgcaaccaatgtcgctactgccgcctcaaaaaatgctttagagccggaatgaaaaaagaagccgtccaaaacgaacgcgaccgcatctccacacgccgaagctcatacgaagactcatctctcccctccatcaacgcactcctccaagccgaagtcctatctcgccaaatcaccgcacccgtctccggcatcaacggcgacatacgcgccaaaaaaatagcctccatagcagacgtatgcgaatccatgaaagagcaactcctcgtgctagtcgaatgggccaaatacatccccgccttctgcgagctcccactagacgaccaagtcgccctcctccgcgcccacgccggcgaacacctgctcctaggcgccaccaaaagaagcatggtattcaaagacgtcctactcctcggcaacgactatatagtccctcgccactgtccagaactcgcagaaatgtccagagtcagcatccgaatcctcgacgaactcgtcctacccttccaagaactacaaatcgacgacaacgaatacgcctaccttaaagccatcatcttcttcgaccccgacgccaaaggcctatccgaccccggcaaaatcaaacgcttacgatcccaagtccaggtcagcctcgaagactacataaacgaccgccaatacgactcacgcggccgcttcggcgaactactcctcctcctcccaaccctccaaagcatcacctggcaaatgatagaacaaatacaattcatcaaacttttcggcatggccaaaatcgacaaccttttacaagaaatgctactcggtggcgcgcccagcgacgctccgcacgcccaccaccccctccacccacacctcatgcaggaacacatgggcaccaacgtaatagtcgccaacacaatgccaacccacctctcaaacggccagatgtgcgaatggccccgaccccgaggccaagccgcagccccagaagccccccaaccagcccccccaggaggatccggctcagaaccctataaactcttacccggtgccgtcgcgaccattgtcaaacccctctccgccataccccagcccacaatcaccaaacaagaagtcatctaaggactagtccctgttcccagagcccacttttttttctttttttgaaataaaatagcctgtctttcagatctaaaaaaaaaaaaaaaaaaaaaaaaaaaaaaaaaaaaaaaaaaaaaaaaaaaaaaaaaaaaaaaaaaaaaaaaaaaaaaaaaaaaaaaaaaaaaaaaaaaa

SEQ ID NO: 4540 - RNA, 1673 nt, synthetic construct
  misc_feature 1..1673: note = mRNA a-1 (A100) (opt11) from Homo sapiens__NP_000448.3__HNF4A(1-474)(S167E_S378E_T429E_T432E_ S436E)
  source 1..1673: mol_type = other RNA
aggagagtcccgcagtcggcgtccagcggctctgcttgttcgtgtgtgtgtcgttgcaggccttattcaagcttaccatgcgactatctaaaactctcgtagacatggacatggccgactactcggccgccctcgaccccgcatacaccacgctcgagttcgaaaacgttcaagtcctcacaatgggcaacgacacctccccctcagaaggcaccaacctcaacgctccaaactccctaggggtctccgcactctgcgcaatctgcggcgaccgtgccaccggcaaacattacggcgcctcatcctgcgacggctgcaaaggattcttccggcgatccgtccgaaagaaccacatgtacagctgcagattcagccgacaatgcgtcgtggacaaagataaacgcaaccaatgccgctactgccgactcaagaaatgcttccgcgcaggcatgaagaaagaagcagtacaaaacgaacgcgaccgcatctcaacaagacgtagctcctacgaagactcaagcctcccatccatcaacgccctcctccaagccgaagtactctcacgtcaaatcaccgaacccgtgtcaggaatcaacggcgacatccgcgccaagaaaatcgcctccatcgcagacgtctgcgaatccatgaaagaacaactcctcgtcctggtcgaatgggctaaatacatccccgcattctgcgaactccccctagatgaccaagtcgccctactgcgcgcccacgcaggcgaacatctattactcggcgccaccaaacgcagcatggtattcaaagacgtcctcctcctcggcaacgactacatagtcccacgccactgcccagaactggccgaaatgagccgagtctctatccgcatactcgacgagctagtcctccccttccaagaactccaaattgacgacaacgaatacgcctacctcaaagccatcatattcttcgaccccgacgcgaaaggcctatccgaccccggtaaaatcaaaagactacgctcacaagtccaagtctcccttgaagactacatcaacgaccgccagtacgacagccgcggccgcttcggcgaactacttctcctcctccccaccctccaatccatcacctggcaaatgatcgaacaaatccaattcataaaactattcggaatggccaaaatcgacaacctcctgcaagaaatgctcctcggaggcgaaccctcagacgcaccccacgcccatcaccccctccatccacacttaatgcaagaacacatgggcaccaacgtaatcgtagccaacactatgcccacccacctatccaatggccaaatgtgcgaatggcccagaccaagaggacaagccgccgaacccgaagaaccacaaccagaacctcccggtggatccggctcagaaccctacaaactactccccggagccgtagctaccatcgtcaagcccctatcagccatcccccaacccacaatcaccaaacaggaagtcatctaaggactagtccctgttcccagagcccacttttttttctttttttgaaataaaatagcctgtctttcagatctaaaaaaaaaaaaaaaaaaaaaaaaaaaaaaaaaaaaaaaaaaaaaaaaaaaaaaaaaaaaaaaaaaaaaaaaaaaaaaaaaaaaaaaaaaaaaaaaaaaa

SEQ ID NO: 4541 - RNA, 1673 nt, synthetic construct
  misc_feature 1..1673: note = mRNA a-1 (A100) (opt11) from Homo sapiens__NP_000448.3__HNF4A(1-474)(S87A)
  source 1..1673: mol_type = other RNA
aggagagtcccgcagtcggcgtccagcggctctgcttgttcgtgtgtgtgtcgttgcaggccttattcaagcttaccatgcgcctaagcaaaacattagtcgacatggacatggccgactactccgccgcactcgacccagcatacaccacattagagttcgaaaacgtccaagtcctcacaatgggcaacgacacctcaccctcagagggcaccaatctcaacgccccaaactcactcggagtaagtgcactatgcgcgatctgcggcgaccgcgccaccggcaaacactacggcgcatcctcctgcgacggctgcaaaggattcttccgacgcgccgtccgcaaaaaccacatgtactcatgccgcttctcacgccagtgcgtcgtagacaaagacaaacgcaatcaatgccgctactgccgactcaagaaatgcttccgcgccggaatgaagaaagaagcagtacaaaacgaacgcgaccgaatctccacccgccgctcctcctacgaagattcctccctcccctccatcaacgccctactccaagccgaagtactctcccgccaaatcacctctccagtttccggcataaacggcgacatacgagcaaagaaaattgcatctatcgccgacgtctgcgaatcgatgaaagagcaactcctagtactcgtagaatgggccaaatacatccccgcattctgcgaactcccacttgacgaccaagtcgcccttctccgagcacacgccggcgaacatctcctgctcggcgctacaaaaagaagcatggtcttcaaagacgtcctcctactcggcaacgactacatcgtcccccgccactgccccgaactagccgaaatgagccgagtctccatcagaatcctcgacgaactcgtactccccttccaagaactccaaatagacgacaacgaatatgcatacctcaaagcaatcatattcttcgaccccgacgccaaaggactttccgaccccggcaaaataaaacgcctccgatcccaagtacaggtctccctcgaagactacatcaacgacagacaatacgacagccgtggacgattcggagagttactcctactacttcccacccttcagtcaatcacctggcaaatgatagaacaaatccaattcatcaaactgttcggaatggctaaaatcgacaacctgctacaagaaatgctcctcggcggctcccctagcgacgccccacacgcacaccaccccctccacccacacctcatgcaagagcacatgggcacaaacgtaatagtagccaacacaatgcccacccacctctcgaacggccaaatgtgcgaatggccccgcccccgcggacaagccgcaaccccagaaacaccccaaccttcacccccaggcggctccggatccgaaccctacaaactactccccggagccgtagcaaccatagtcaaaccgctcagcgccatcccccaacccacaataaccaaacaagaagtcatctagggactagtccctgttcccagagcccacttttttttctttttttgaaataaaatagcctgtctttcagatctaaaaaaaaaaaaaaaaaaaaaaaaaaaaaaaaaaaaaaaaaaaaaaaaaaaaaaaaaaaaaaaaaaaaaaaaaaaaaaaaaaaaaaaaaaaaaaaaaaaa

SEQ ID NO: 4542 - RNA, 1673 nt, synthetic construct
  misc_feature 1..1673: note = mRNA a-1 (A100) (opt11) from Homo sapiens__NP_000448.3__HNF4A(1-474)(S87E)
  source 1..1673: mol_type = other RNA
aggagagtcccgcagtcggcgtccagcggctctgcttgttcgtgtgtgtgtcgttgcaggccttattcaagcttaccatgcgcctatccaaaaccctagtcgacatggacatggcagactattcagccgcactagatcccgcctatacaacactcgaattcgaaaacgtgcaggtcctcaccatgggcaacgacacctccccctccgaaggaaccaacctaaacgcaccaaattccctcggcgtctccgccctttgcgccatatgtggggaccgcgcaacaggaaaacactacggcgcctcctcctgcgacggatgcaaaggattcttccgacgcgaagtcagaaaaaaccacatgtactcatgtcgattctcccgccagtgcgtcgtcgacaaagacaaaagaaaccaatgcagatactgtcgcctaaaaaaatgcttccgcgccggaatgaaaaaggaagcagtacagaacgaacgcgaccgcatctccaccagacgctcctcctacgaagactcatccctgccctcgatcaacgcacttctccaagccgaggtcctatcaagacaaatcacttctccagtatccggcatcaatggcgacatccgcgccaaaaaaatcgcctcaatcgccgacgtctgcgagtccatgaaagaacaactactagtccttgtagaatgggctaaatatattcccgccttctgcgaacttcccctagacgaccaagtagcactcctccgcgctcacgccggcgagcacctactactcggcgcaaccaaaagatcaatggtcttcaaagacgtcctcctcctgggcaacgactacatcgtcccccgacactgccccgaactcgcggaaatgtcccgcgtcagcatccgcatcctcgacgaactcgtactccccttccaagaactacaaatcgacgacaacgaatacgcctacctcaaagcgataatcttcttcgacccagacgccaaaggtctatccgacccaggaaaaatcaaacgtctccgctctcaagtacaagtctctctcgaagactacataaacgaccgccaatacgactccagaggccggttcggcgaactcctcctcctactccccacactccaaagcatcacctggcaaatgatcgaacaaatccaattcataaaactattcggcatggccaaaatagacaacctgctacaagaaatgctcctcggaggttccccctcagacgccccccacgcccaccacccccttcacccacacctaatgcaagaacacatgggcactaacgtaatagtagccaacacaatgcccacccacctctccaacggccaaatgtgtgaatggccaagaccacgcggacaagccgcaacccctgagaccccccagccctccccacccggcggctctggcagcgaaccctacaaactgctacccggggccgtcgccacaatcgtaaaaccactctcggcaatcccccaacccaccatcaccaaacaagaagttatctaaggactagtccctgttcccagagcccacttttttttctttttttgaaataaaatagcctgtctttcagatctaaaaaaaaaaaaaaaaaaaaaaaaaaaaaaaaaaaaaaaaaaaaaaaaaaaaaaaaaaaaaaaaaaaaaaaaaaaaaaaaaaaaaaaaaaaaaaaaaaaa

SEQ ID NO: 4543 - RNA, 1673 nt, synthetic construct
  misc_feature 1..1673: note = mRNA a-1 (A100) (opt11) from Homo sapiens__NP_000448.3__HNF4A(1-474)(R2V)
  source 1..1673: mol_type = other RNA
aggagagtcccgcagtcggcgtccagcggctctgcttgttcgtgtgtgtgtcgttgcaggccttattcaagcttaccatggtactctccaagaccctagtcgacatggacatggccgactactccgccgccctagacccagcctacaccactctagagttcgaaaacgtccaagtcctcacaatgggaaacgacacctccccctccgaaggcacaaacctcaacgcccccaactccctcggcgtctccgccctatgcgccatatgcggagaccgagccaccggcaagcactacggcgcttcctcctgcgacggatgcaaaggcttcttccggagaagcgtccggaaaaaccacatgtattcctgccgattctcacgccaatgcgtagtcgacaaagacaaacgcaaccaatgccgctactgccgccttaagaaatgtttcagagccggaatgaagaaagaagccgtccaaaacgaacgcgaccgcataagcacccgccgctcctcatacgaagacagcagcctcccctccatcaacgccctcctccaagcagaagtgctctcccgacaaatcaccagccccgtaagcggaatcaacggcgacatacgcgccaagaaaatcgcctccatcgccgacgtctgcgaatcaatgaaagaacaactactcgtccttgtagaatgggccaaatacatccccgccttctgcgagctcccactcgacgaccaagtcgccctcctccgcgcacacgccggtgaacatctcctactaggagcaaccaaacgatcaatggtattcaaagacgtcctcctcctcggtaacgactacatagtcccaagacactgccccgaactagccgaaatgtcacgcgtctccatccgcatcctagacgaactcgtccttccctttcaagaactacaaatcgacgacaacgaatacgcctacctcaaagccatcatcttcttcgacccagacgcaaaaggactctcagaccccggcaaaatcaaacgcctccgctcccaagtccaagtcagcctcgaagactacatcaacgacagacaatacgactcacgaggccgcttcggagaactactactcttgctccccacactacaatcgataacctggcaaatgatcgaacaaatccaatttatcaaactattcggaatggcaaaaatagacaaccttctgcaagaaatgctccttggcggctctccctctgacgctccccacgcccaccaccccctccacccccaccttatgcaagaacacatgggaaccaacgtcatcgtagccaacacaatgcccacccacctatcaaacggccaaatgtgcgaatggccacggccacgcggccaagccgcaacacccgaaaccccacaaccctcacccccaggcggctccggctcagagccgtacaaactactacccggcgccgtagccaccatcgtgaaacctctctccgccatccctcaacccacaatcaccaaacaagaggtcatctaaggactagtccctgttcccagagcccacttttttttctttttttgaaataaaatagcctgtctttcagatctaaaaaaaaaaaaaaaaaaaaaaaaaaaaaaaaaaaaaaaaaaaaaaaaaaaaaaaaaaaaaaaaaaaaaaaaaaaaaaaaaaaaaaaaaaaaaaaaaaaa

SEQ ID NO: 4544 - RNA, 1673 nt, synthetic construct
  misc_feature 1..1673: note = mRNA a-1 (A100) (opt11) from Homo sapiens__NP_000448.3__HNF4A(1-474)(R2V_K5V)
  source 1..1673: mol_type = other RNA
aggagagtcccgcagtcggcgtccagcggctctgcttgttcgtgtgtgtgtcgttgcaggccttattcaagcttaccatggtcctcagcgtcaccctcgtcgacatggacatggccgactactccgcagccctcgaccccgcctacaccacactagaatttgaaaacgtccaagtcctgaccatgggcaacgacacctccccctcagaaggtaccaacctcaacgcacccaactcgctcggcgtatcagccctttgtgccatctgcggtgatcgcgcaaccggaaaacactacggcgcatcctcatgcgacggctgcaaaggcttcttccgccgatccgtccgtaaaaaccatatgtactcctgtcgattctcccgccaatgtgtcgtagataaagacaaacgcaaccaatgcagatactgccgcctaaaaaaatgcttccgggcaggtatgaagaaagaagcagtccaaaacgaacgcgaccgcatcagcacccgccgctcctcctacgaagactcgtccctcccatccatcaacgccctactccaagccgaagtcttatcccgacaaatcacttcccccgtctccggcataaacggcgacatccgcgcaaaaaaaatcgcctccatagccgacgtctgcgaatcaatgaaagaacaactcctagtccttgtcgaatgggccaaatacatccccgcattctgcgaactcccactcgatgaccaggtagccctcctccgcgcccacgcgggtgaacacctcctcctcggggccaccaaacgctccatggtattcaaagacgtcctcctcctcggaaacgactacatcgtcccacgccattgccccgagctagccgaaatgtctagagtctccatacgcatcctcgacgaactcgtactccccttccaagaactccaaattgatgacaacgaatacgcctacctcaaagcaatcatcttcttcgaccccgacgccaaagggctctccgacccaggaaaaatcaaacgcctcagatcccaagtccaggtatcactcgaagactacatcaacgaccgacaatacgactcccgaggccgtttcggcgaactcctactcctcttaccaaccctacaatccatcacatggcaaatgatcgaacaaattcaattcatcaaactcttcggaatggccaaaatcgacaatctcctacaagaaatgctcctcggaggatcaccctcagacgccccacacgcccaccaccctttacatccccacctaatgcaagaacacatgggaaccaacgtcatcgtagccaacaccatgccaacacacctctcaaacggacaaatgtgcgagtggcccagaccccgaggccaagccgccacaccagaaacaccccagccctcaccacccggcggctcaggctccgaaccctacaaactactccccggagccgtcgccaccatcgtcaagccactatcagcaatcccacaacccaccatcaccaaacaagaagtaatctaaggactagtccctgttcccagagcccacttttttttctttttttgaaataaaatagcctgtctttcagatctaaaaaaaaaaaaaaaaaaaaaaaaaaaaaaaaaaaaaaaaaaaaaaaaaaaaaaaaaaaaaaaaaaaaaaaaaaaaaaaaaaaaaaaaaaaaaaaaaaaa

SEQ ID NO: 4545 - RNA, 1673 nt, synthetic construct
  misc_feature 1..1673: note = mRNA a-1 (A100) (opt11) from Homo sapiens__NP_000448.3__HNF4A(1-474)(K179R_K180R)
  source 1..1673: mol_type = other RNA
aggagagtcccgcagtcggcgtccagcggctctgcttgttcgtgtgtgtgtcgttgcaggccttattcaagcttaccatgcgcctctccaaaacacttgtcgacatggacatggccgactactccgccgcactcgaccccgcctacaccacccttgaattcgaaaacgtccaagtcctcaccatgggaaacgacacctccccctccgaaggaaccaacctaaacgcccccaactccctaggcgtctccgccctctgcgcaatatgcggagaccgcgcaaccggcaaacattacggcgcttcctcctgtgacggttgcaaaggatttttccgccgatccgtccgtaaaaaccacatgtactcctgccgcttcagccgacaatgcgtggtagataaagacaaacgcaaccaatgccgttactgccgactcaaaaaatgcttccgagccggaatgaaaaaagaagcagtccaaaacgaacgcgaccgcatctctacacgcagatcttcatatgaagatagcagcctccccagcatcaacgccctcctccaagccgaagtcctctcccgacaaatcacctccccagtaagcggcataaatggcgacatccgtgcccggcgcatcgcatcaatcgccgacgtatgcgaatcaatgaaagaacaactactagtcctcgtcgaatgggcaaaatacatacccgcattctgcgaactccccctcgacgaccaagtagccctcctacgcgcccacgccggagaacacctactcctcggggccacgaaacgatccatggtcttcaaagacgtcctactcctcggaaatgactacatagtccccaggcactgccccgaactcgccgaaatgtcccgcgtctcaattcgaatcctagacgaactcgtcctacccttccaagaactccaaatagacgacaacgaatacgcttacctcaaagccattatcttcttcgacccagacgccaaaggactctccgacccgggaaaaataaaacgactacgcagccaagtccaagtctccttagaagactacatcaacgaccgccagtacgactcccgcggccgattcggagagcttctcctactcctccccaccctccaatccatcacatggcaaatgatcgaacaaatccaattcataaaactcttcggcatggccaaaatcgataatctactccaagaaatgctcctcggcgggtccccatcagacgccccccacgcacaccacccgctgcacccacacctaatgcaagaacacatgggaacaaacgtcatcgtcgccaacacaatgcccacccacctctcaaacggacagatgtgcgaatggccccgcccacgcggccaagcggcaacccccgaaacaccacagccctccccccccggcggcagcggctcagaaccctacaaactcctcccaggagcagtcgccaccatagtcaagcccctctcagccatcccacaaccaaccatcaccaaacaagaagtaatatagggactagtccctgttcccagagcccacttttttttctttttttgaaataaaatagcctgtctttcagatctaaaaaaaaaaaaaaaaaaaaaaaaaaaaaaaaaaaaaaaaaaaaaaaaaaaaaaaaaaaaaaaaaaaaaaaaaaaaaaaaaaaaaaaaaaaaaaaaaaaa

SEQ ID NO: 4546 - RNA, 1673 nt, synthetic construct
  misc_feature 1..1673: note = mRNA a-1 (A100) (opt11) from Homo sapiens__NP_000448.3__HNF4A(1-474)(K234R)
  source 1..1673: mol_type = other RNA
aggagagtcccgcagtcggcgtccagcggctctgcttgttcgtgtgtgtgtcgttgcaggccttattcaagcttaccatgcgcctatctaaaacacttgtagacatggacatggccgactactcagccgcactcgaccccgcctacaccaccttagagttcgagaacgtccaagtcctcacgatgggcaatgacacctccccatccgaaggcaccaaccttaacgcacccaactccctcggagtatccgccctctgcgccatctgcggcgaccgcgccacaggcaaacactacggagcctcatcctgcgacggctgcaaaggcttcttccgacgctccgtcagaaaaaaccacatgtactcctgccgattctcccgtcaatgcgtagtcgacaaagacaaacgcaaccaatgccgatactgccgcctcaaaaagtgcttccgagccggcatgaaaaaagaagccgtccagaacgagcgcgaccgaatctccacaagaagatcatcatacgaagactcctccctcccctccatcaacgccctactccaagccgaagtcctctccagacaaatcacaagccccgtatccggtatcaacggcgacataagagccaaaaaaatcgcctccatagccgacgtctgcgaatccatgaaagaacaactcctcgtgctcgtagaatgggccaaatacattcccgccttctgcgaactccctctcgacgaccaggtcgctctactcagggctcacgccggcgaacacctcctcctcggcgcaacccgccgctccatggtattcaaagacgtcctactactcggaaacgactacatcgttccccgccactgcccagagctcgctgaaatgtctcgcgtctccatccgcatcctcgacgaactcgtcctcccattccaagaactccaaatcgacgacaacgaatacgcctacctaaaagccataatcttcttcgaccccgacgcaaaaggactctccgacccagggaaaattaaacgactccgctcccaagtacaggtaagcctcgaagactacatcaacgaccgccaatacgattcccgaggccgcttcggcgaacttctcctactactacccaccctacagtccatcacctggcaaatgatcgaacaaatccaattcatcaaacttttcggaatggccaaaatcgacaacctcctccaagaaatgctcctcggcggctccccctccgacgccccccacgcacaccaccccctccacccacaccttatgcaagaacatatgggcacaaacgtcatcgtcgccaacaccatgcccacccacctctctaacggccaaatgtgcgaatggccccgcccaagaggccaagccgccaccccagaaaccccgcaacctagcccacccggcggctccggcagcgaaccctacaaactattacccggagcagtggccacgatcgtaaagcccctcagcgcaatcccacaaccaacaatcactaaacaagaagtcatctaaggactagtccctgttcccagagcccacttttttttctttttttgaaataaaatagcctgtctttcagatctaaaaaaaaaaaaaaaaaaaaaaaaaaaaaaaaaaaaaaaaaaaaaaaaaaaaaaaaaaaaaaaaaaaaaaaaaaaaaaaaaaaaaaaaaaaaaaaaaaaa

SEQ ID NO: 4547 - RNA, 1673 nt, synthetic construct
  misc_feature 1..1673: note = mRNA a-1 (A100) (opt11) from Homo sapiens__NP_000448.3__HNF4A(1-474)(K300R)
  source 1..1673: mol_type = other RNA
aggagagtcccgcagtcggcgtccagcggctctgcttgttcgtgtgtgtgtcgttgcaggccttattcaagcttaccatgcgcctctcaaaaaccctagtagacatggacatggcagactactccgccgccctcgaccccgcatacaccaccctcgagttcgaaaacgtacaagtcctcactatgggaaacgacacctccccctcggaaggcaccaacctcaacgcccccaactcccttggggtcagtgcactatgcgccatctgcggcgatagagccaccggaaagcactacggcgcctcctcatgcgacggctgcaaaggcttcttccgccgatccgtccgcaaaaaccacatgtactcatgcagattcagcagacaatgcgtcgtcgacaaagacaagagaaaccagtgccgatactgccgcctcaagaaatgtttccgcgccggcatgaagaaagaagcagtccaaaacgaacgcgaccgcatctccacccgccgctcatcctacgaagactccagcctaccctccataaatgccctactccaagcagaagtcctctcccgccaaataacctccccagtatccggaatcaacggcgacatccgcgccaagaaaatcgcctcaatagcagacgtctgcgaatccatgaaagaacaactacttgtcttagtagaatgggccaaatacatccccgccttttgcgaactaccccttgacgaccaagtcgccctcctccgcgcacacgccggcgaacacctattactaggcgccactaaacgctccatggtcttcaaagacgtactcctcctcggcaacgactatatcgtcccccgacactgccccgaactcgccgaaatgtcccgcgtctcaatacgaatcctcgacgaactcgtcctccccttccaagaactacagatcgacgacaacgaatacgcctacctcaaagcaatcatcttcttcgaccccgacgcccgcggcctatccgaccctggcaaaatcaaacgcctgcgctcccaagtacaagtgtccctcgaagactacatcaacgaccgacagtacgattcccgaggccgattcggcgaactcctcctcctactcccaacactccaatccatcacctggcaaatgatcgaacaaatccaattcattaaactcttcggcatggcaaaaatcgacaacctcctacaagaaatgctcctcggtgggtccccctccgatgctccccacgcccaccaccccctccacccccacctcatgcaggaacacatgggcaccaacgtcatcgtcgccaacacaatgccaacccacctctcaaacggacaaatgtgtgaatggccccgaccccgaggccaagcagccacacccgaaacaccccaaccctcacccccaggcggctccggctcagaaccctacaaactactcccaggagccgtcgccaccatcgtaaaaccactaagcgccataccccaaccaactatcacaaaacaggaggtcatctaaggactagtccctgttcccagagcccacttttttttctttttttgaaataaaatagcctgtctttcagatctaaaaaaaaaaaaaaaaaaaaaaaaaaaaaaaaaaaaaaaaaaaaaaaaaaaaaaaaaaaaaaaaaaaaaaaaaaaaaaaaaaaaaaaaaaaaaaaaaaaa

SEQ ID NO: 4548 - RNA, 1673 nt, synthetic construct
  misc_feature 1..1673: note = mRNA a-1 (A100) (opt11) from Homo sapiens__NP_000448.3__HNF4A(1-474)(K300R_K307R_K309R)
  source 1..1673: mol_type = other RNA
aggagagtcccgcagtcggcgtccagcggctctgcttgttcgtgtgtgtgtcgttgcaggccttattcaagcttaccatgcgcctcagcaaaacactcgttgacatggatatggccgactactccgccgcactagatcccgcctataccacactcgaattcgaaaacgttcaagtactcaccatgggcaacgacacctccccatccgaaggcaccaacctcaacgccccaaactccctcggtgtatccgcactctgcgcaatctgcggcgaccgcgctacaggcaaacactacggcgcatcctcctgcgacggatgcaagggcttcttccgccgctcagtccggaaaaaccacatgtactcttgccgcttctcacgtcagtgcgtggtcgacaaagacaaacgcaaccaatgccgctactgccgactcaaaaaatgcttccgcgccggaatgaaaaaagaagcagtacaaaacgaacgagaccgcatcagcacccgtcgctccagctacgaagactcttcacttccctccatcaacgccctcctccaagccgaagtcctctcacgccaaatcacgtcccccgtctccggcataaacggcgacatccgagcaaaaaaaatcgcctccatcgcagacgtatgcgaatccatgaaagaacagctcctagtcctcgtcgaatgggccaaatacatcccagcattctgcgaacttcccctagacgaccaagtcgcccttctcagagcacacgctggggaacacctcctactaggcgcaacaaaacgctccatggtcttcaaagacgtactactcctcggcaacgactacatagtccctcgccactgccccgaactcgcagaaatgtcccgagtctcaatacgaatactagacgaactagtcctccctttccaagaactacaaatcgacgacaacgaatacgcttacctaaaagccatcattttcttcgacccagacgcccgcgggctctccgaccccggccgcatacgacgccttcgctcccaagtccaagtatcattagaagactacatcaacgaccgccaatacgactcccgcggccgcttcggagaactcctactcctcctacccacactccagtccatcacctggcaaatgatcgaacaaatccaattcattaaactattcggcatggccaaaatcgacaacctactccaagaaatgctcctcggcggaagcccctctgacgcccctcacgcacaccaccccctacacccacacttgatgcaggaacacatggggaccaacgtcatcgtcgccaacaccatgcccacacatctctcaaatggccaaatgtgcgaatggccacgacctcgcggtcaagctgctaccccagaaaccccccaaccttccccacccggcggttcaggctcggaaccctacaaactccttcccggcgccgtcgccacaatagtcaaaccactatccgcaatcccccaacccacaattaccaaacaagaagtaatctagggactagtccctgttcccagagcccacttttttttctttttttgaaataaaatagcctgtctttcagatctaaaaaaaaaaaaaaaaaaaaaaaaaaaaaaaaaaaaaaaaaaaaaaaaaaaaaaaaaaaaaaaaaaaaaaaaaaaaaaaaaaaaaaaaaaaaaaaaaaaa

SEQ ID NO: 4549 - RNA, 1673 nt, synthetic construct
  misc_feature 1..1673: note = mRNA a-1 (A100) (opt11) from Homo sapiens__NP_000448.3__HNF4A(1-474)(K447R_K470R)
  source 1..1673: mol_type = other RNA
aggagagtcccgcagtcggcgtccagcggctctgcttgttcgtgtgtgtgtcgttgcaggccttattcaagcttaccatgcgcctctccaaaaccctcgtcgatatggacatggccgactactccgccgcccttgaccccgcctacaccaccctagaattcgaaaacgtacaagtactcacaatgggcaacgacacctccccatccgaaggaacaaacctcaacgctcccaacagcttaggtgtctccgccctctgcgccatctgcggagatcgcgccaccggcaaacactacggcgcctcatcatgcgacggctgcaaaggcttcttccgacgctcagtccgcaaaaaccacatgtactcctgcagattctcaagacaatgtgtcgttgacaaagacaaacgaaaccaatgccgatactgccgccttaaaaaatgcttccgcgcaggaatgaaaaaagaagcagtccagaacgaacgcgaccgcatatccacccgccgttccagctacgaagacagctcactcccttcaatcaacgccctactacaagccgaagtcctctcccgacaaataacctcacccgtatccggcatcaacggagacatacgcgccaaaaaaatagcctcaatcgccgacgtctgcgaatccatgaaagaacaactcctagtcctagtcgaatgggccaaatacatacccgcattctgcgaactccccctagacgaccaggtagccctcctccgagcccacgccggcgagcacctcttacttggcgcaaccaaacgctccatggtattcaaggacgtcctactcctaggcaatgactacatcgtcccccgccactgccccgaactcgctgaaatgtcccgagtctcaatcagaattctagatgaactagtcctacccttccaagaactccaaatagacgacaacgaatacgcatacctcaaagccatcatattcttcgaccccgatgccaaaggtctaagcgaccccggaaaaataaagcgactacggtcgcaagtacaagtctccctggaagactacataaacgaccgccaatacgacagccgcggacgattcggagaactactcctactcctccccactctccaatccataacatggcaaatgatcgaacaaatccaattcatcaaactattcggcatggccaaaatcgacaatcttttacaggaaatgctacttggaggatccccatccgacgcccctcacgcgcaccacccactccacccacacctcatgcaagaacacatgggcaccaacgtgatagtagcaaacaccatgcccacccacctctccaacggccaaatgtgcgagtggccacgaccacggggccaagccgccaccccagagacaccacaaccctcaccccccggaggctccggctccgaaccctaccgactactgccaggagccgtcgcaaccatcgtaaaaccactcagcgccatcccccaacccaccatcacccggcaagaagtcatctaaggactagtccctgttcccagagcccacttttttttctttttttgaaataaaatagcctgtctttcagatctaaaaaaaaaaaaaaaaaaaaaaaaaaaaaaaaaaaaaaaaaaaaaaaaaaaaaaaaaaaaaaaaaaaaaaaaaaaaaaaaaaaaaaaaaaaaaaaaaaaa

SEQ ID NO: 4550 - RNA, 1673 nt, synthetic construct
  misc_feature 1..1673: note = mRNA a-1 (A100) (opt11) from Homo sapiens__NP_000448.3__HNF4A(1-474)(K458R)
  source 1..1673: mol_type = other RNA
aggagagtcccgcagtcggcgtccagcggctctgcttgttcgtgtgtgtgtcgttgcaggccttattcaagcttaccatgcgactttccaaaaccctagtcgacatggacatggccgactactctgccgccctcgacccagcttacacaacattagagttcgaaaacgtccaagtcctgaccatgggaaacgacacaagcccatctgaaggaactaacctcaacgcccccaactccctaggagtatccgctctctgcgccatctgcggagaccgcgccaccgggaaacactacggcgcctcctcatgcgacggatgcaaaggcttcttccgccgctcagtccgcaaaaaccacatgtactcctgtcgattctcccgacaatgcgtcgtcgacaaagacaaacgcaaccaatgccgatactgccgcctcaagaaatgcttcagagccggcatgaagaaagaagccgtacaaaacgaacgagaccgcatctccacacgccgtagctcctacgaagactcaagcctcccctcaatcaacgccctacttcaggccgaagtcctctcccgacaaattaccagcccagtctccggcatcaacggcgacatccgagccaagaaaatcgcatcaatagccgatgtctgcgaaagcatgaaagaacaactccttgtcctcgtagaatgggccaaatacatccccgccttctgcgaactacccctcgatgaccaagtagccctactcagagcccacgccggcgaacacctcctcctcggcgccaccaaacgcagcatggtcttcaaagatgtactcctcctcggcaacgactacatcgtcccccgacactgccccgaacttgcagaaatgagcagagtctcaatccgcatcctcgacgaactcgtactaccattccaagaactccagatcgacgacaacgaatacgcctacctgaaagcaattatcttcttcgaccccgacgccaaaggcctctcagaccccggcaaaattaaacgcctcagaagtcaagtccaagtatccctcgaagactatatcaatgaccgccaatacgactcccgcgggcgcttcggcgaactcctcctccttctcccaaccctccaatcaatcacctggcaaatgatcgaacaaatccaattcataaaattattcggaatggccaaaatcgacaacctactccaggaaatgctcctcggcgggtccccctccgacgccccacacgcccaccaccccctccacccccacctaatgcaagaacatatgggcaccaacgtcatcgtcgcaaacaccatgccaacccacctctcaaacggacaaatgtgcgaatggccccgtccccgaggccaggccgccacccccgaaacccctcaaccctcgcctcccggaggctccggctcagaaccctacaaactcctcccaggtgcagttgcaacaatagtcagacccctctccgccatcccccagcccacaataacaaaacaagaagtcatctaaggactagtccctgttcccagagcccacttttttttctttttttgaaataaaatagcctgtctttcagatctaaaaaaaaaaaaaaaaaaaaaaaaaaaaaaaaaaaaaaaaaaaaaaaaaaaaaaaaaaaaaaaaaaaaaaaaaaaaaaaaaaaaaaaaaaaaaaaaaaaa

SEQ ID NO: 4551 - RNA, 1673 nt, synthetic construct
  misc_feature 1..1673: note = mRNA a-1 (A100) (opt11) from Homo sapiens__NP_000448.3__HNF4A(1-474)(K106R_K108R_K126R_K127R)
  source 1..1673: mol_type = other RNA
aggagagtcccgcagtcggcgtccagcggctctgcttgttcgtgtgtgtgtcgttgcaggccttattcaagcttaccatgcgactgtccaaaaccttagtcgacatggacatggcagactactcagccgccctcgacccagcatatacaacactagagttcgaaaacgtccaggtccttaccatgggcaacgacacctcaccctccgaaggcaccaacctcaacgctcccaactccctaggcgtctcagccctctgcgcgatatgcggagaccgagccaccggtaaacactacggcgcttcgagctgcgacggctgcaaaggcttcttccgtcgctcagtccgcaaaaaccacatgtactcatgccgattctcacgccaatgcgtagtagaccgcgaccgccgcaaccagtgccgatactgccgtcttaagaaatgcttccgcgccggcatgcgcagagaagcagtccaaaacgaacgcgaccgcatctcaacccggcgcagctcttacgaagactcaagccttccctcaatcaacgccctactacaagccgaagtcctaagccgccaaatcacttcacccgtatccggaataaacggcgacatccgagccaagaaaatagcctccatcgccgacgtctgcgaaagcatgaaagaacaactcctcgtcttagtcgaatgggccaaatacatccccgcattctgcgaactcccactggacgaccaagtagccctgctccgagcccacgccggcgaacacctcctcctcggcgccacgaaacgaagcatggtcttcaaagacgtccttctccttggcaacgactacatcgtcccacgccactgcccagagctagccgaaatgtcacgagtctcaatccgcatactcgacgagctagtactcccattccaagaactacaaatagacgacaacgaatacgcctatctcaaagcgatcatattcttcgaccccgacgccaaaggcctctccgacccaggcaaaatcaaacgcctccgctcccaagtccaggtgtcccttgaagactacataaacgatcgccaatacgactcacgaggaagattcggcgaactccttcttcttctccccacactccagtcaatcacatggcaaatgatcgaacagatacaattcatcaaacttttcggcatggccaaaatagacaacctcctacaggaaatgctactaggaggatccccatcagacgcaccccacgcccaccaccccctacacccccacctcatgcaagaacacatgggcaccaacgtcatagtcgccaacaccatgcccacccacctaagcaacggacaaatgtgcgagtggccccgcccacgcggccaagccgccacccccgaaacaccacaaccaagcccacccggcggctccggctccgaaccatacaaacttctcccaggcgctgtagccaccatcgtaaaaccactctcagccataccccaacccactatcaccaaacaagaggttatctagggactagtccctgttcccagagcccacttttttttctttttttgaaataaaatagcctgtctttcagatctaaaaaaaaaaaaaaaaaaaaaaaaaaaaaaaaaaaaaaaaaaaaaaaaaaaaaaaaaaaaaaaaaaaaaaaaaaaaaaaaaaaaaaaaaaaaaaaaaaaa

SEQ ID NO: 4552 - RNA, 1673 nt, synthetic construct
  misc_feature 1..1673: note = mRNA a-1 (A100) (opt11) from Homo sapiens__NP_000448.3__HNF4A(1-474)(E285Q)
  source 1..1673: mol_type = other RNA
aggagagtcccgcagtcggcgtccagcggctctgcttgttcgtgtgtgtgtcgttgcaggccttattcaagcttaccatgcgactctccaaaacacttgtcgacatggacatggccgactactccgccgccctcgatcccgcatacaccaccctcgagttcgaaaacgtccaagtcctcaccatgggaaatgacacctcgccatccgaaggcacgaacctaaatgcccccaactcccttggcgtctccgcactctgcgccatctgcggcgaccgcgcaaccgggaaacactacggcgcctcatcctgcgacggctgcaaaggattcttccgtcgatctgtacgcaaaaaccacatgtactcttgccgattcagccgacaatgcgtcgttgacaaagacaaacgcaaccaatgccgctactgccgactcaaaaagtgcttccgcgcaggtatgaaaaaggaagcagtacaaaacgaacgagaccgcatttccacccgacgatcatcctatgaagactcctccctcccctcaatcaacgccctacttcaagccgaagtcctctcccgacaaataacctcccccgtcagcggcatcaacggcgacatcagagccaagaaaatcgcaagcatcgcagacgtatgcgagtcaatgaaagaacaactcctcgtcctagtcgaatgggcaaaatacatccccgccttctgcgaactcccactagacgaccaagtagccctcctccgcgcccacgccggagaacacctcctcctaggcgccactaaacgctccatggtcttcaaagacgtcctcctcctaggcaatgattacatcgttccccgacattgccccgaactagccgaaatgtcccgagtatccatccgcatcctcgacgaactcgtcctaccattccaagaactacaaatcgacgacaaccaatatgcatacctaaaagcaatcatcttcttcgaccccgacgccaaaggccttagcgacccaggcaaaatcaagcgactacgcagccaagtacaagtatccctagaagattacatcaacgatcgccaatacgactcccgcggccggttcggcgaactcctcctcctcctccccactctacaatccataacctggcaaatgatagaacaaatccaattcatcaagttattcggcatggccaaaatagacaacctcctccaagaaatgctactcggcggctccccatccgacgccccacacgcccatcaccccctccacccacaccttatgcaagaacacatgggcaccaacgtaatagtcgccaacaccatgccaacccacctctccaacggacaaatgtgcgaatggccacggccacgcggacaagccgccacaccggaaacaccacaacccagcccacccggcggttccggctccgaaccctacaaactactacccggcgcagtcgccaccatcgtcaaaccgctctcagccatccctcaaccaaccatcaccaaacaagaagtcatataaggactagtccctgttcccagagcccacttttttttctttttttgaaataaaatagcctgtctttcagatctaaaaaaaaaaaaaaaaaaaaaaaaaaaaaaaaaaaaaaaaaaaaaaaaaaaaaaaaaaaaaaaaaaaaaaaaaaaaaaaaaaaaaaaaaaaaaaaaaaaa

SEQ ID NO: 4553 - RNA, 1673 nt, synthetic construct
  misc_feature 1..1673: note = mRNA a-1 (A100) (opt11) from Homo sapiens__NP_000448.3__HNF4A(1-474)(T166E)
  source 1..1673: mol_type = other RNA
aggagagtcccgcagtcggcgtccagcggctctgcttgttcgtgtgtgtgtcgttgcaggccttattcaagcttaccatgcgcctatccaaaaccctcgtcgacatggacatggccgactactcagccgcactcgaccccgcatataccactctcgagttcgaaaacgtacaagtcctcaccatggggaacgacactagcccctccgaaggcaccaacctcaacgcaccaaactccttaggggtttcagccctatgcgccatatgcggcgatagagcaacaggaaaacactacggcgcctcatcatgcgatggctgcaaaggcttcttccgccgatccgtccgaaagaaccacatgtactcatgccgcttctcacgacaatgcgtcgtcgacaaagacaagcgaaaccaatgccgctactgccgcctaaagaaatgcttccgcgccggcatgaagaaagaagcagtacaaaacgaacgcgatcgcatctccacccgcagatcgtcctacgaagacagcagcctccccagcatcaacgccctcctccaagctgaagtcctctcccgccaaatcgaatcacccgtctcaggcatcaacggtgatatccgcgcaaagaaaatagcctccatcgccgacgtctgcgaatccatgaaagaacaactcctagtcctagtagaatgggccaaatacatcccagcattctgcgagctccccctggacgatcaagtcgctctcctccgcgcccacgccggcgaacacctcctactcggagcaaccaaacgcagtatggtattcaaagacgtcctactactcggtaacgactacatagtaccccgccactgcccagaactcgccgaaatgtcccgtgtctccatacgcatcctagacgaactcgtcctccccttccaagaactacaaatcgacgacaacgaatacgcctacctaaaagccatcatcttcttcgaccccgacgctaaaggcctctccgatccaggcaaaatcaaacgcctacgaagccaagtccaagtttccctcgaagactacatcaacgacagacaatacgactcccgcggccgcttcggcgaactactcctcctacttccaacactccaaagcataacgtggcaaatgatagaacaaatccaattcatcaaactcttcggcatggctaaaatagacaacctcctccaggaaatgctccttggaggctccccctccgacgcaccccacgcccaccacccactccaccctcacctcatgcaagaacacatgggcacaaacgtaatcgttgccaacactatgcccacccacctatccaacggacaaatgtgcgaatggccccgaccccgcggccaagccgccaccccagagactccccaaccctcgccacccggagggtccggctccgaaccctacaaactactccccggagcagtagcaacaatcgtaaaaccactctccgccataccccaacccactatcaccaaacaagaagtcatctaaggactagtccctgttcccagagcccacttttttttctttttttgaaataaaatagcctgtctttcagatctaaaaaaaaaaaaaaaaaaaaaaaaaaaaaaaaaaaaaaaaaaaaaaaaaaaaaaaaaaaaaaaaaaaaaaaaaaaaaaaaaaaaaaaaaaaaaaaaaaaa

SEQ ID NO: 4554 - RNA, 1673 nt, synthetic construct
  misc_feature 1..1673: note = mRNA a-1 (A100) (opt11) from Homo sapiens__NP_000448.3__HNF4A(1-474)(S148A)
  source 1..1673: mol_type = other RNA
aggagagtcccgcagtcggcgtccagcggctctgcttgttcgtgtgtgtgtcgttgcaggccttattcaagcttaccatgcgactatctaaaacactcgtcgacatggacatggccgactactccgcggccctggaccccgcctacaccacgctagaattcgaaaacgtccaagtattaacaatgggaaacgacacctctccctccgaaggcaccaacctcaacgcacccaactccctcggagtctccgccctctgcgccatctgtggcgaccgagcaaccgggaaacattacggcgcatcctcctgcgacggctgcaaaggcttcttccgccgatccgtcagaaaaaaccacatgtactcgtgccgattctcacgccaatgcgtagttgacaaagacaaacgcaaccaatgccgctactgccgccttaaaaaatgcttccgcgccggaatgaaaaaagaggccgtacaaaatgaacgcgaccgaatcagcacacgccgctcttcatacgaagactccgcactcccatccatcaacgccctactacaagccgaagtcctcagccggcaaatcacatccccagtgtccggtattaacggagacatacgcgccaagaaaatagcctccatagcagacgtctgcgagtcaatgaaagaacaactcctcgtactcgtagaatgggcaaaatacatccccgccttctgcgaacttcccctcgacgaccaagtcgcactcctccgcgcccacgccggcgaacatctcctactaggagccaccaaacgttcaatggtcttcaaagacgtcctgctactcggcaacgactatatcgtccccagacactgccccgaactagcagaaatgtccagagtctcaatacgaatcctagacgaactcgtcctcccattccaagaactacaaatcgacgacaacgaatacgcctacctcaaagccatcatcttctttgaccccgacgccaaagggctctccgaccccggaaaaatcaaacgcctgcgctcacaagtccaagtatccctcgaagactacatcaacgaccgccagtacgacagccgaggacgtttcggcgaactcctactcctcctcccaacactccagtccatcacctggcaaatgatcgaacaaatccaattcataaaactcttcggcatggccaaaatcgacaacctactccaagaaatgctcctcggcggatccccgtccgacgccccccacgcccaccaccccctacacccacacctcatgcaagaacacatgggaacaaacgtcatcgtagccaacaccatgcccacccacctctccaacggccaaatgtgcgaatggccccgcccacgcggccaagctgcaacaccagaaaccccacaaccatccccccccggcggcagcggctccgaaccctacaagcttctccccggtgccgtggccacaatagtcaaaccactctcggccattccccaaccaacaataacaaaacaagaagtgatctaaggactagtccctgttcccagagcccacttttttttctttttttgaaataaaatagcctgtctttcagatctaaaaaaaaaaaaaaaaaaaaaaaaaaaaaaaaaaaaaaaaaaaaaaaaaaaaaaaaaaaaaaaaaaaaaaaaaaaaaaaaaaaaaaaaaaaaaaaaaaaa

SEQ ID NO: 4555 - RNA, 1673 nt, synthetic construct
  misc_feature 1..1673: note = mRNA a-1 (A100) (opt11) from Homo sapiens__NP_000448.3__HNF4A(1-474)(S148E)
  source 1..1673: mol_type = other RNA
aggagagtcccgcagtcggcgtccagcggctctgcttgttcgtgtgtgtgtcgttgcaggccttattcaagcttaccatgcgcctctccaaaaccctcgtcgacatggacatggccgactactcagcagccctagacccagcctacacaacactcgagttcgaaaacgtacaagtactaaccatgggcaacgacacctcaccctctgaaggaaccaacctcaacgcacccaactccctcggcgtatccgccctgtgcgccatctgcggtgatcgcgccaccggcaaacactacggggcctcaagctgcgacggctgcaaaggcttcttccgccgctctgtcaggaaaaaccacatgtacagctgccgattctcccgccaatgcgtagtcgataaagacaaacggaaccaatgccgatactgtcgcctcaagaaatgcttccgagcaggcatgaaaaaggaagcagtccaaaacgaacgggaccgaatctccactcgccgctcatcctacgaagacagcgaactaccctccattaatgccctcctccaagcagaagtactttcacgacaaataacctcccccgtctcaggcatcaacggcgacatcagagccaagaaaatcgcctccatcgccgacgtatgcgaatccatgaaagaacaactcctggtgctagtcgaatgggcaaaatatatccccgctttctgcgaactccccctagacgaccaagtcgcactcctccgagcccacgccggagagcacctcttactaggcgccaccaaacgaagcatggtcttcaaagacgtcctcctcctcggaaatgactacatcgtccccagacactgccccgaactcgccgaaatgtcacgagtctccatcagaatcctcgacgaactggtcctaccatttcaagaactacaaatcgatgacaacgaatacgcatacctcaaagcgatcatcttcttcgaccccgacgccaaagggctctccgacccaggcaaaatcaaacgcctcagaagccaggtccaagtctccctagaagactacataaacgaccgccagtatgactcccgcggcagattcggcgaactcctccttctacttccgaccctccaatccatcacctggcaaatgatcgaacaaatccaattcatcaaactcttcggcatggccaaaattgacaacctcctacaagaaatgctcctaggcggcagcccctcagacgcgccccacgcccaccacccactccacccacacctcatgcaagagcacatgggcaccaacgtcatagtagccaacaccatgcccacacacctctccaacggccagatgtgcgaatggccacgcccacgtggtcaagcagccacccccgaaaccccgcaaccatccccacccggcggatccggatccgaaccctacaaactcctacccggcgcagtcgccacaatcgtaaaacccctcagcgccatccctcagcccaccataaccaaacaagaagtcatctgaggactagtccctgttcccagagcccacttttttttctttttttgaaataaaatagcctgtctttcagatctaaaaaaaaaaaaaaaaaaaaaaaaaaaaaaaaaaaaaaaaaaaaaaaaaaaaaaaaaaaaaaaaaaaaaaaaaaaaaaaaaaaaaaaaaaaaaaaaaaaa

SEQ ID NO: 4556 - RNA, 1673 nt, synthetic construct
  misc_feature 1..1673: note = mRNA a-1 (A100) (opt11) from Homo sapiens__NP_000448.3__HNF4A(1-474)(S183A)
  source 1..1673: mol_type = other RNA
aggagagtcccgcagtcggcgtccagcggctctgcttgttcgtgtgtgtgtcgttgcaggccttattcaagcttaccatgcgactcagcaaaacactagttgacatggacatggccgactacagcgcagccctggatccagcctacaccaccctcgaattcgaaaacgtacaagtcctcaccatgggtaacgacacctccccctcggagggaacaaacctcaacgcccccaactcactcggcgtcagcgcactctgcgccatatgcggcgaccgcgccaccggaaaacactacggagcctcaagctgcgacggctgcaaaggattcttcagacgcagcgtccggaaaaaccacatgtactcctgccgcttctcccgacaatgcgtcgtcgacaaagacaaacgaaaccaatgccgatactgccgcctaaaaaaatgcttccgcgctggaatgaaaaaagaagcagtacaaaacgaacgcgaccgcatatccaccagaagatcctcctacgaagactccagcctaccctcaatcaacgctctcctccaagcagaagtcctcagccgccaaatcacctcacccgtcagcggcatcaacggggacatccgcgccaaaaaaatcgccgcgattgccgacgtgtgcgaatccatgaaagagcaactcctcgtcctcgtagaatgggccaaatacatccccgccttctgcgaactacccctagacgaccaagtagcccttctacgcgcccacgccggggaacacctcctactcggcgcaaccaaaaggtcaatggtcttcaaagacgtcctcctactcggaaacgactacatcgtgcccaggcactgtccggaactcgccgaaatgtccagagtctcaatccggatactagacgaactcgtactccccttccaagaactacaaatcgacgacaacgaatacgcatacctaaaagccatcatcttcttcgacccagacgctaaaggactaagcgacccaggcaagatcaaacgactacgttcccaagtacaagtatccctggaagactacatcaacgaccgccaatacgactcacgaggtcgcttcggcgaactgctcctactcctacccaccctccaatccatcacatggcaaatgatcgaacaaatccaattcatcaaactcttcggtatggctaaaatcgacaacctactccaagaaatgcttctcggcggctccccatccgacgccccccacgcccaccacccactccacccccacctaatgcaagaacacatgggcaccaatgtcatagtcgccaacaccatgcccacccacctctcaaacggacaaatgtgcgaatggccccgaccacggggacaagcagccacaccagaaaccccccaacctagcccacccggaggctccggctcggaaccctacaaactcctccccggcgccgtagccaccatagtaaaacctttatccgccatcccacaacccaccatcacgaaacaggaagtaatataaggactagtccctgttcccagagcccacttttttttctttttttgaaataaaatagcctgtctttcagatctaaaaaaaaaaaaaaaaaaaaaaaaaaaaaaaaaaaaaaaaaaaaaaaaaaaaaaaaaaaaaaaaaaaaaaaaaaaaaaaaaaaaaaaaaaaaaaaaaaaa

SEQ ID NO: 4557 - RNA, 1673 nt, synthetic construct
  misc_feature 1..1673: note = mRNA a-1 (A100) (opt11) from Homo sapiens__NP_000448.3__HNF4A(1-474)(S183E)
  source 1..1673: mol_type = other RNA
aggagagtcccgcagtcggcgtccagcggctctgcttgttcgtgtgtgtgtcgttgcaggccttattcaagcttaccatgcgcctctccaaaaccctcgtcgacatggacatggccgactactccgccgccctcgacccagcctacacaacactagagttcgaaaacgtccaagtcctaaccatgggaaacgatacctccccctcggaagggaccaacctcaacgccccaaattcacttggagtctccgccctatgcgccatatgtggagaccgcgctaccggaaaacactatggcgcgtcatcctgcgacggatgcaaaggcttcttcagacgctcggtccgcaaaaaccacatgtactcctgccgattctcccgccaatgcgtcgtcgacaaagacaaaagaaaccaatgcaggtactgccgtctgaagaaatgcttccgcgccggaatgaagaaagaagccgtccaaaacgaacgcgaccgaatcagcaccagacgcagctcctacgaagactcctcactcccatcaatcaacgccctactccaagccgaagtcctctcccgccaaatcacctccccagtaagcggaatcaacggcgacatccgcgccaagaaaatagccgaaatagccgacgtctgcgaatcaatgaaagaacagctactcgtcctcgtcgaatgggccaaatacatacccgccttctgcgaactccctctcgacgaccaagtcgcactactcagagcccacgccggagaacacctactcctcggagccacgaaacgatccatggtattcaaagacgtactcctccttggtaacgattacatcgtcccaagacactgcccagaactcgccgaaatgtccagagtatcaatccgaatcctcgacgagctagtactcccctttcaggaactacaaatagatgacaacgaatacgcatacctaaaagccatcatcttctttgaccccgacgccaaaggcctctccgacccaggcaaaatcaaacgcctacgctcccaagttcaagtatccctcgaagactacatcaatgaccgccaatacgacagccgaggacgcttcggcgaactactcctgctactccccaccctacaatccatcacttggcaaatgatcgaacaaatccaattcatcaaactcttcggcatggccaaaatcgacaaccttctccaggaaatgctcctcggtggcagcccctccgacgcaccccacgcccaccaccccctccacccacacctcatgcaagaacacatgggcaccaacgtcatagtagcaaacaccatgcccacccacctatcaaacggacaaatgtgcgaatggccgcgcccgagaggacaagccgccacacccgaaacaccccaaccaagccctcccggcggctcaggttcagaaccctataaactcctacccggcgccgtagccaccatcgtaaaacccctcagcgccatcccccaacccaccatcaccaaacaagaagtgatataaggactagtccctgttcccagagcccacttttttttctttttttgaaataaaatagcctgtctttcagatctaaaaaaaaaaaaaaaaaaaaaaaaaaaaaaaaaaaaaaaaaaaaaaaaaaaaaaaaaaaaaaaaaaaaaaaaaaaaaaaaaaaaaaaaaaaaaaaaaaaa

SEQ ID NO: 4558 - RNA, 1673 nt, synthetic construct
  misc_feature 1..1673: note = mRNA a-1 (A100) (opt11) from Homo sapiens__NP_000448.3__HNF4A(1-474)(S461A)
  source 1..1673: mol_type = other RNA
aggagagtcccgcagtcggcgtccagcggctctgcttgttcgtgtgtgtgtcgttgcaggccttattcaagcttaccatgcgactctccaaaaccctcgtcgacatggacatggcagattactccgctgccctcgacccggcctacaccacactagagttcgaaaacgttcaagtattaaccatgggcaacgacacatcccccagcgaaggcaccaatctaaacgcacccaactccctcggggtctcagcactatgcgccatctgcggagatcgcgctactggcaaacactacggagcctcctcctgcgacggctgcaaaggcttcttccgaagatcagtccgcaaaaaccacatgtactcatgccgcttctctcgccaatgcgtcgtcgacaaagacaaacgaaaccagtgccgctactgccgcctaaagaaatgctttcgcgccggcatgaagaaagaagcagtacaaaacgaacgcgaccgcatctccacccgccggtcaagctacgaggactcatcactcccatcaatcaacgctctcctccaagcagaagtccttagccgacaaatcacatcccccgtttccggaatcaacggcgacatccgagcaaagaaaatcgcctctatcgcagacgtatgcgaatccatgaaagaacaactcctagtcctagtcgaatgggcaaaatatatacccgccttctgcgaactgcccctagacgatcaagtcgcactactccgagcccacgccggcgagcacctcctgctcggcgccacaaaacgatccatggtattcaaagacgtactactcctcgggaacgactacatcgtaccccgccactgccccgagctcgccgaaatgtcacgtgtctcaattcgcatactagacgagctagtcctccccttccaagaactacaaatagacgacaacgaatacgcatacctaaaagccatcatcttcttcgaccccgatgccaaaggactatccgaccccggcaaaatcaaacgccttcgttcacaagtgcaagtctcgctcgaagactacatcaacgaccgccaatacgactccagaggccgattcggagaactcctactcctcctccccaccctccaatccatcacatggcaaatgatagaacaaatccaattcataaaactcttcggcatggccaaaatcgacaacctgctccaagaaatgctcctcggcggatcaccctccgacgccccacacgcccaccaccccctacacccccaccttatgcaagaacacatgggaaccaacgtcatcgtcgccaacacaatgcccacacacctatcaaacggacaaatgtgcgagtggcctcgcccccgcggccaagcagccacacccgaaacaccccagccctccccacccggcggctccggctcggaaccctacaaacttctcccaggcgccgtcgccaccatcgtaaaaccactcgccgcaataccccaaccaaccatcaccaaacaagaggtaatctaaggactagtccctgttcccagagcccacttttttttctttttttgaaataaaatagcctgtctttcagatctaaaaaaaaaaaaaaaaaaaaaaaaaaaaaaaaaaaaaaaaaaaaaaaaaaaaaaaaaaaaaaaaaaaaaaaaaaaaaaaaaaaaaaaaaaaaaaaaaaaa

SEQ ID NO: 4559 - RNA, 1673 nt, synthetic construct
  misc_feature 1..1673: note = mRNA a-1 (A100) (opt11) from Homo sapiens__NP_000448.3__HNF4A(1-474)(S461E)
  source 1..1673: mol_type = other RNA
aggagagtcccgcagtcggcgtccagcggctctgcttgttcgtgtgtgtgtcgttgcaggccttattcaagcttaccatgcgactgtccaaaaccctagtcgacatggacatggcagactacagcgcagcactcgatcccgcctacaccaccctagagttcgaaaacgtacaagtactaacaatgggaaacgacacctctccatccgaaggcacaaacctcaacgcacccaactccctcggcgtctccgcactttgcgcaatctgcggcgaccgagccaccggcaaacattacggagcctccagctgcgacggctgcaagggattcttccgccgcagcgtccgcaaaaaccacatgtactcgtgccgcttctcacgacagtgcgtagtcgacaaagacaaacgcaaccaatgcagatactgcagacttaaaaagtgcttccgcgcgggaatgaagaaagaagccgtccaaaacgaacgagatcgcatctccacccgccggagctcatacgaagactcatcactaccatcaataaacgccctcctacaagccgaagtcctatcccgccaaataacctcccccgtctctggcatcaacggagacatccgcgccaagaaaatcgcaagcatcgccgacgtctgcgaatcaatgaaagagcaactactcgtcctagtagaatgggcaaaatacataccagccttctgcgaactccccctagacgaccaagtcgcgctactccgagcccacgcaggagaacaccttctcctaggcgcaaccaaacgctccatggtatttaaagacgtcctactcctgggcaacgactacatagtcccccgccattgcccagaactcgccgaaatgtcacgcgtatcgatacgcatcctcgacgagctagtcctccccttccaagaactacaaatagacgacaacgaatacgcctacttgaaagccataatcttcttcgacccagacgccaaaggcctctccgacccaggcaaaataaaacgcctacgcagccaggtacaggtcagcctcgaagactatatcaacgaccgtcaatacgactcccgaggccgattcggagaactcctcctactcctaccaaccctccaatcaatcacctggcaaatgatcgaacaaatacaattcatcaaactgttcggcatggcaaaaatagacaacctacttcaagaaatgctcttaggaggctccccctccgacgccccacacgcccaccaccccctccacccacacctcatgcaagaacacatggggaccaacgtaatagtcgccaacaccatgcccacccacctatccaacggccaaatgtgcgaatggccccgcccgcgcggccaagccgccacccctgaaacaccacaaccctcccctcccggcggatcaggctccgaaccctacaaactccttcccggcgccgtagccactatcgtcaaacccctcgaagccatacctcaaccaaccatcaccaaacaagaggtcatctaaggactagtccctgttcccagagcccacttttttttctttttttgaaataaaatagcctgtctttcagatctaaaaaaaaaaaaaaaaaaaaaaaaaaaaaaaaaaaaaaaaaaaaaaaaaaaaaaaaaaaaaaaaaaaaaaaaaaaaaaaaaaaaaaaaaaaaaaaaaaaa

SEQ ID NO: 4560 - RNA, 1673 nt, synthetic construct
  misc_feature 1..1673: note = mRNA a-1 (A100) (opt11) from Homo sapiens__NP_000448.3__HNF4A(1-474)(S142A_S143A_S313A)
  source 1..1673: mol_type = other RNA
aggagagtcccgcagtcggcgtccagcggctctgcttgttcgtgtgtgtgtcgttgcaggccttattcaagcttaccatgcgcctctccaaaacccttgtcgacatggacatggcagactactccgccgcacttgacccggcttacacaaccctagaattcgaaaacgtccaagtactcaccatgggaaatgacacctcaccctctgaagggaccaacctaaacgcaccaaactcactcggagtcagcgccctatgcgccatctgcggcgaccgcgcaaccggaaaacactacggcgcctcctcttgcgacggctgcaaaggcttcttccgaagatccgtcagaaaaaaccatatgtacagctgccgcttctcacgacaatgcgtcgtcgacaaagacaaaagaaaccaatgcagatattgccgactcaaaaaatgctttcgagccggcatgaaaaaggaagcagtccaaaacgaacgcgaccgcatttccacccgcagagccgcctacgaagacagctccctccccagcatcaacgcactactccaagctgaagtattatcccgccaaatcacctccccagtctccggcatcaacggcgacatacgggccaaaaaaatcgcctcaatcgccgacgtctgcgaatccatgaaagaacaactcctagtcctagtcgaatgggccaaatacatacccgcattctgcgaactacctttagacgaccaagtcgccctcttacgagcccacgccggcgaacatctactgcttggcgccaccaaacgatccatggttttcaaagacgtactactcctcggaaacgactacatcgtcccacgtcactgcccagaactagccgaaatgtcccgcgtctcaatccgcatcctcgacgaactcgtactcccctttcaagaactacaaatcgacgacaacgagtacgcctacctcaaagccatcatcttcttcgaccccgacgcaaaaggcctctccgaccccggcaaaattaaacgacttagagcacaagtacaagtcagcctagaagactacataaatgaccgccaatacgacagcagaggccgcttcggcgagctcctactcctcctccccaccctacaatcaattacctggcagatgatcgaacaaatacaattcataaaacttttcggaatggccaaaatcgacaacctactccaagaaatgctcctcggcggctcccccagcgacgccccccacgcacaccaccccctacacccccacctaatgcaagagcacatgggaaccaacgtcatagtagccaacacaatgcccactcacctcagcaacggccaaatgtgcgaatggccccgcccccgaggacaagccgccacccccgaaaccccccaaccgagcccccccggcggctccggctccgaaccctacaaactcctccctggcgccgtagccacgatagtaaaaccgctctccgccatcccccaaccgacaataacgaaacaagaagtaatctaaggactagtccctgttcccagagcccacttttttttctttttttgaaataaaatagcctgtctttcagatctaaaaaaaaaaaaaaaaaaaaaaaaaaaaaaaaaaaaaaaaaaaaaaaaaaaaaaaaaaaaaaaaaaaaaaaaaaaaaaaaaaaaaaaaaaaaaaaaaaaa

SEQ ID NO: 4561 - RNA, 1673 nt, synthetic construct
  misc_feature 1..1673: note = mRNA a-1 (A100) (opt11) from Homo sapiens__NP_000448.3__HNF4A(1-474)(S142A_S143A_S313A_K458R)
  source 1..1673: mol_type = other RNA
aggagagtcccgcagtcggcgtccagcggctctgcttgttcgtgtgtgtgtcgttgcaggccttattcaagcttaccatgcgcctcagcaaaacactagtagacatggacatggcagactactccgccgccctagacccagcctacacaaccctcgaattcgaaaacgtccaagtcctaacgatgggcaacgacacatccccctccgagggcaccaacctcaacgcccccaactctctcggcgtctctgccctctgcgccatctgcggcgaccgcgccaccggaaaacactacggagccagctcatgcgacggctgcaaaggattctttcgacgctccgttagaaaaaaccacatgtactcatgccgtttctctcgccaatgcgtcgtcgacaaagacaaacgtaaccagtgccgctactgccgcctaaaaaaatgcttccgcgcaggcatgaaaaaagaagccgtccaaaacgagagagaccgcatatccacccgccgagccgcctacgaagactcttcactaccgtccataaacgccctcctacaagccgaagtcctatcacgacaaataacctcccccgtcagcggcatcaacggcgacatcagagccaagaaaatagcctctatagcagacgtatgcgaatcaatgaaagaacaactcctagtactagtcgaatgggccaaatacattcccgccttctgcgaactgccactcgacgaccaagtggccctactccgtgcccacgccggcgaacatttactcctcggcgccaccaaacgatcaatggtattcaaagacgtactactcctcggcaacgactacatagtcccccgccactgccccgaactcgccgaaatgtcacgtgtctctatccggatcctagacgaactcgtcctccccttccaagaactccaaatcgacgacaacgaatacgcctacctaaaagccatcatattcttcgatcccgacgccaagggtctctccgacccaggaaaaatcaaacgcctacgcgcacaagtacaagtatccctcgaagactacatcaacgaccgacaatacgacagccgcggccgattcggcgaactactccttctcctccccacactacaatcaataacctggcaaatgatcgaacaaatccagttcataaaactctttggcatggccaaaatagacaacctcctccaggaaatgctcctcggaggaagcccctccgacgccccccacgcccaccacccactccacccccacctcatgcaagagcacatgggcaccaacgtcatcgtcgccaacaccatgcccacacacctatcaaacggccaaatgtgtgaatggcccagacctcgcggccaagccgccacacccgaaaccccacaaccctcccccccggggggctcaggctccgaaccctacaaactcctcccaggtgccgtcgccacaatcgtacgacccctctccgccatccctcaaccaacaataaccaaacaagaagtcatctaaggactagtccctgttcccagagcccacttttttttctttttttgaaataaaatagcctgtctttcagatctaaaaaaaaaaaaaaaaaaaaaaaaaaaaaaaaaaaaaaaaaaaaaaaaaaaaaaaaaaaaaaaaaaaaaaaaaaaaaaaaaaaaaaaaaaaaaaaaaaaa

SEQ ID NO: 4562 - RNA, 1673 nt, synthetic construct
  misc_feature 1..1673: note = mRNA a-1 (A100) (opt11) from Homo sapiens__NP_000448.3__HNF4A(1-474)(S142A_S143A_S167A_S313A_ S378A_T429A_T432A_S436A_K458R)
  source 1..1673: mol_type = other RNA
aggagagtcccgcagtcggcgtccagcggctctgcttgttcgtgtgtgtgtcgttgcaggccttattcaagcttaccatgcgcctaagcaaaaccctagtcgacatggacatggcagactactccgccgccctcgaccccgcctacaccaccctagaattcgaaaacgttcaggtcctcaccatggggaacgacacatcgccaagcgaaggaaccaaccttaacgccccaaactccctgggcgtctccgccctttgcgccatctgcggagaccgcgccacaggcaaacactatggcgcctccagctgcgacggctgcaaaggcttcttccgacgctcagtacggaaaaaccacatgtactcatgccgcttctcacgccaatgcgtcgtcgacaaagacaaacgcaaccaatgccgctactgccgactcaaaaaatgcttccgcgcaggcatgaaaaaggaagccgtccaaaacgaacgcgaccgtatctcaacccgacgtgctgcatacgaagactcatccctcccctccatcaacgccctactccaggccgaagtcctgagtcgacaaatcacagcccccgtctcaggcatcaacggcgacatccgagcaaagaaaatcgcctctatagccgacgtctgcgaatcaatgaaagaacaactcctcgtcctcgtagaatgggccaaatacatccccgcattctgcgaactacccctcgacgaccaagtcgccctactaagagcccacgccggcgaacaccttctgcttggcgccacaaaacgcagcatggtattcaaagacgtactactcctcggcaacgactacatcgtaccccgacactgccccgaactcgccgaaatgtcccgcgtctccatacgcatcctagacgaactggtcctccccttccaggaactccaaatcgacgacaacgaatacgcctacctcaaagccatcatattcttcgacccagacgcaaaaggcctcagcgaccccggcaaaatcaaaagactccgcgcccaagtacaagtcagcctagaagattacataaacgaccgccaatacgatagcagaggccgattcggcgaactcctcctactcctacccacactacaatcaatcacctggcaaatgatagaacaaatccaattcatcaagctattcggcatggcaaaaattgacaacctactacaagaaatgctcctcggcggcgccccaagcgacgcaccacacgcccaccaccccctccacccgcacctcatgcaagaacacatgggcaccaacgtcatcgtcgccaacacaatgcccacacacctctccaatggacaaatgtgcgaatggccacgcccacgaggccaagcggccgcgcccgaagccccacaacctgccccgcccggaggctctggaagcgaaccctacaaactactccccggcgcagtcgccacgatagtccgcccactatccgccatcccccagcccacaataaccaaacaagaagtcatataaggactagtccctgttcccagagcccacttttttttctttttttgaaataaaatagcctgtctttcagatctaaaaaaaaaaaaaaaaaaaaaaaaaaaaaaaaaaaaaaaaaaaaaaaaaaaaaaaaaaaaaaaaaaaaaaaaaaaaaaaaaaaaaaaaaaaaaaaaaaaa

SEQ ID NO: 4563 - RNA, 1673 nt, synthetic construct
  misc_feature 1..1673: note = mRNA a-1 (A100) (opt11) from Homo sapiens__NP_000448.3__HNF4A(1-474)(S142A_S143A_S148A_S167A_ S313A_S378A_T429A_T432A_S436A_K458R)
  source 1..1673: mol_type = other RNA
aggagagtcccgcagtcggcgtccagcggctctgcttgttcgtgtgtgtgtcgttgcaggccttattcaagcttaccatgcgcctttccaaaaccctagtcgacatggacatggccgactactcagccgcactagaccccgcctatactaccctagagttcgaaaacgtccaagtcctcaccatgggcaatgacacctccccatccgaaggcaccaacctcaacgcccccaactcactaggagtctccgccctttgcgccatctgcggcgaccgcgccacaggaaaacactacggcgcgtcaagctgcgatggatgcaaaggtttcttccgtcgttccgtccgcaaaaaccacatgtattcctgccgattctcgcgccaatgcgtcgtcgacaaagacaaacgaaaccaatgccgatactgccgcctcaaaaagtgcttccgcgccggcatgaagaaagaagccgtccaaaacgaacgcgacagaatatcaacccgacgagccgcctacgaagactcagccctcccctcaataaatgccctcctccaagcagaggtcctttccagacagatcaccgcccccgtctccggcatcaacggcgacatcagagccaagaaaatcgcctccatcgccgacgtctgcgaatccatgaaagaacaacttctagttctcgtcgaatgggccaaatacatccccgccttctgcgaactaccccttgacgaccaagtcgctctcctgcgcgcccacgccggcgaacacctccttctcggagcaactaaacgctccatggtgttcaaagacgtcctcctcctcggcaacgactacatcgtcccccgacactgccccgaactagctgaaatgtcacgcgtcagcatcagaatcctcgacgaactcgtcctccccttccaagaactccaaatcgatgacaacgagtacgcctatcttaaagccatcatattcttcgacccagacgcaaaaggtctctccgaccccggcaaaataaaacgactccgcgcccaagtccaagtttccctcgaagactacatcaacgaccgacaatacgattcccgcggccgattcggcgaactcctcctactccttcccaccctccagtccataacatggcaaatgatcgaacaaatccaattcataaaactcttcggcatggccaaaatagacaacctcctccaagagatgctactcggcggtgctccatccgacgccccacacgcacaccaccccctccacccccacctcatgcaagagcacatgggcaccaacgtcatagtagcaaacaccatgcctacccacctatccaacggacaaatgtgcgaatggccccgcccacggggccaagccgccgcccccgaagccccacaacccgccccacccggaggatccggcagcgaaccctacaaactactacccggtgccgtcgccacaatcgtccgccccctatccgccataccacagcccaccatcaccaaacaagaagtcatatagggactagtccctgttcccagagcccacttttttttctttttttgaaataaaatagcctgtctttcagatctaaaaaaaaaaaaaaaaaaaaaaaaaaaaaaaaaaaaaaaaaaaaaaaaaaaaaaaaaaaaaaaaaaaaaaaaaaaaaaaaaaaaaaaaaaaaaaaaaaaa

SEQ ID NO: 4564 - RNA, 1673 nt, synthetic construct
  misc_feature 1..1673: note = mRNA a-1 (A100) (opt11) from Homo sapiens__NP_000448.3__HNF4A(1-474)(K106R_K108R_K126R_K127R_ S142A_S143A_S148A_S167A_S313A_S378A_T429A_T432A_S436A_K458R )
  source 1..1673: mol_type = other RNA
aggagagtcccgcagtcggcgtccagcggctctgcttgttcgtgtgtgtgtcgttgcaggccttattcaagcttaccatgcgcctctccaagaccctcgtcgacatggacatggcagactacagcgcagccctagaccccgcctacaccacccttgagttcgaaaacgtccaagtcctaacaatgggaaacgacacctcaccatccgaaggcacaaacctaaacgcccccaactcacttggcgtttcggccctctgcgccatatgcggagaccgcgccaccggcaaacactacggagcatcctcctgcgacggctgtaaaggcttcttcagacgatccgtacgcaaaaaccacatgtactcctgccgcttcagcagacaatgcgtcgtcgaccgcgaccgccgcaaccaatgccgctactgccgcctaaagaaatgcttccgcgcaggcatgcgccgagaagcagtccaaaacgaacgagaccgaataagcacccgcagagccgcgtacgaagactccgccctcccatcaatcaacgcacttctacaagccgaagtactctcccgccaaataaccgccccagtatccggaatcaacggcgacatccgcgccaagaaaatcgcttccatagcagacgtctgtgaatccatgaaagagcaactcctcgtcctcgtcgagtgggccaaatacatccccgccttctgcgagctacccctcgacgaccaagtcgccctcctccgagcccacgctggcgaacacctcctactcggcgccaccaaaagatccatggttttcaaagacgtactccttctgggaaacgactacatcgtacccaggcactgccccgagctagccgaaatgtccagagtctcaatccgcatactcgacgagctcgtccttccctttcaagaacttcaaatagacgacaacgaatacgcatacctgaaagccatcatcttcttcgaccccgacgccaaaggactatccgacccaggcaaaatcaaacgcctacgagcacaagtacaagtctccctagaagactacataaacgaccgccaatacgactcgagaggccgcttcggcgaactactccttctcctccctaccctacaaagcatcacctggcaaatgatcgaacaaatccaattcataaaactcttcggaatggccaaaatcgacaatttactccaggaaatgttactcggcggcgcaccatccgacgcaccccacgcccaccaccccctacacccccacctcatgcaagaacacatgggaaccaatgtcatagtcgccaacacaatgcctacacatctctccaacggccaaatgtgcgaatggccgcgtccccgaggacaagcagccgcccccgaagcaccccagcccgccccgcccggcggatccggatcagaaccctacaaactcctcccaggcgccgtcgcaaccatcgtccgccccctctcagcaatcccccaacccaccatcaccaaacaagaagtcatctaaggactagtccctgttcccagagcccacttttttttctttttttgaaataaaatagcctgtctttcagatctaaaaaaaaaaaaaaaaaaaaaaaaaaaaaaaaaaaaaaaaaaaaaaaaaaaaaaaaaaaaaaaaaaaaaaaaaaaaaaaaaaaaaaaaaaaaaaaaaaaa

SEQ ID NO: 4565 - RNA, 1673 nt, synthetic construct
  misc_feature 1..1673: note = mRNA a-1 (A100) (opt11) from Homo sapiens__NP_000448.3__HNF4A(1-474)(S142A_S143A_S148A_T166A_ S167A_S313A_S378A_T429A_T432A_S436A_K458R)
  source 1..1673: mol_type = other RNA
aggagagtcccgcagtcggcgtccagcggctctgcttgttcgtgtgtgtgtcgttgcaggccttattcaagcttaccatgcgcctctccaaaacactcgtcgatatggacatggccgactacagcgctgcccttgaccccgcgtacaccaccctagaattcgaaaacgtccaagttctcaccatgggcaacgacacctccccctcagaaggaaccaacctaaatgcccccaactctctcggcgtctccgctctctgcgccatctgcggcgaccgagccaccggaaaacactacggagcctcctcctgcgacgggtgcaaaggcttcttcagaagatccgtccgcaaaaaccacatgtactcatgccggttctcccgacaatgcgtagtcgacaaagacaaacgcaaccaatgccgctactgccgcctcaaaaaatgctttcgcgccggcatgaagaaagaagcagtacaaaacgaaagagacagaatctcaactcgcagagccgcctacgaagactcggcgctcccctctatcaacgccctgcttcaagccgaagtcctctcacgccaaatcgccgcacccgtatccggaatcaacggcgatatccgcgcaaaaaaaatcgcatccatcgccgacgtctgcgaatccatgaaggaacaactgctagtcctcgtagaatgggccaaatacatccctgccttctgtgaactccccctagacgatcaagtcgccctcctacgcgcccacgccggcgagcacctactacttggagccaccaaacgttctatggtcttcaaagacgtactcttactcggcaacgactacatagtcccccgccactgcccagaactggccgaaatgagccgcgtctcaatacgaatcctagacgaactcgtgctaccattccaagaactacaaatcgacgacaacgaatacgcatacctaaaagctattatcttcttcgaccccgacgccaaaggcctatccgaccccggcaaaataaaacgcctgcgagcccaagtacaagtaagcctcgaagactacatcaacgaccgacagtacgactcccgaggccgcttcggcgaactcctacttctcctccccaccctacaatccatcacctggcaaatgatagaacaaatccaattcatcaaactcttcggaatggcaaaaatcgataacctgctccaagaaatgctcctcggcggagccccaagcgatgcaccacacgcacaccacccactacacccacacctcatgcaagaacacatgggaaccaacgtcatagtcgccaacacaatgccaacccacctatccaacggccaaatgtgcgaatggccccgcccccgcggtcaagcagcagctcccgaagcacctcaaccagccccccccggaggctccggctccgaaccttacaaactcctcccaggagccgtcgccacaatcgtaagacccctctcagccatcccccaaccaaccatcacaaaacaagaagtgatataaggactagtccctgttcccagagcccacttttttttctttttttgaaataaaatagcctgtctttcagatctaaaaaaaaaaaaaaaaaaaaaaaaaaaaaaaaaaaaaaaaaaaaaaaaaaaaaaaaaaaaaaaaaaaaaaaaaaaaaaaaaaaaaaaaaaaaaaaaaaaa

SEQ ID NO: 4566 - RNA, 1673 nt, synthetic construct
  misc_feature 1..1673: note = mRNA a-1 (A100) (opt11) from Homo sapiens__NP_000448.3__HNF4A(1-474)(S87A_S142A_S143A_S148A_T 166A_S167A_S313A_S378A_T429A_T432A_S436A_K458R)
  source 1..1673: mol_type = other RNA
aggagagtcccgcagtcggcgtccagcggctctgcttgttcgtgtgtgtgtcgttgcaggccttattcaagcttaccatgcgcctctccaaaaccctcgtcgacatggacatggcagactactctgccgccctcgaccccgcctacacaaccctcgagttcgaaaacgtacaagtcttaaccatgggaaacgacacctcaccatcagaaggtacaaacctcaacgcccctaactcactcggcgtatctgcactatgcgcaatatgcggagaccgtgccactggcaaacactacggagcctcatcatgtgacggctgcaaaggcttcttccgacgtgcagtccgcaaaaaccatatgtactcctgccgattctcccgacaatgcgtcgtagacaaagacaaacgaaaccaatgccggtactgccgcctaaagaaatgcttccgcgccgggatgaagaaagaagccgtacaaaacgaacgagatcgcatctccacacgccgagccgcctacgaagactccgccctcccctccatcaacgccctactccaggccgaagtactgtcgcgccaaatcgccgcgccagtttccggaataaacggcgacatccgcgccaagaaaatcgcctcaatcgcagacgtatgcgaatccatgaaagaacaactcctcgtcctcgtagaatgggccaaatacatccccgcattctgcgaactacccctagatgaccaagtagcactattacgcgctcacgccggagaacacctcctcctcggagccactaaacgctccatggtcttcaaagacgtcctcctcctcggcaacgactacatcgtaccccgccactgccccgaactcgcagaaatgtcaagggtctccataagaatcctagacgagctagtcctaccgttccaagaactccaaatcgacgacaatgaatacgcatacctcaaagccataatcttcttcgacccagacgccaaaggcctctcagaccccggcaaaatcaaacgactacgcgcccaggtccaagtctccctagaagactacatcaacgacagacaatacgacagccgagggagattcggcgaactcctcctactcctccccaccctccaatcaataacatggcaaatgatcgaacaaatccagttcatcaaactcttcggcatggccaaaatcgacaacctactccaagaaatgctcctcggaggcgccccaagcgacgcaccccacgcacaccaccccctccacccacacctcatgcaagaacacatgggaaccaacgtcatagtagcaaacacaatgcccacccacctctcaaacggccaaatgtgcgaatggccccgcccacgaggccaagcagcggcccccgaagctccccaacccgcccctcccggagggtccggcagcgaaccctacaaactcctcccaggcgcagtagccaccatcgtacgcccgctttccgcaatacctcagcccacaatcacaaaacaagaagtaatataaggactagtccctgttcccagagcccacttttttttctttttttgaaataaaatagcctgtctttcagatctaaaaaaaaaaaaaaaaaaaaaaaaaaaaaaaaaaaaaaaaaaaaaaaaaaaaaaaaaaaaaaaaaaaaaaaaaaaaaaaaaaaaaaaaaaaaaaaaaaaa

SEQ ID NO: 4567 - RNA, 1673 nt, synthetic construct
  misc_feature 1..1673: note = mRNA a-1 (A100) (opt11) from Homo sapiens__NP_000448.3__HNF4A(1-474)(S87A_K106R_K108R_K126R_K 127R_S142A_S143A_S148A_T166A_S167A_S313A_S378A_T429A_T432A_ S436A_K458R)
  source 1..1673: mol_type = other RNA
aggagagtcccgcagtcggcgtccagcggctctgcttgttcgtgtgtgtgtcgttgcaggccttattcaagcttaccatgcgcctcagcaagacactcgtagacatggacatggccgactactccgccgcacttgaccccgcctataccaccctcgaattcgaaaacgtacaagtactcacaatgggaaacgacacctccccatccgaaggtaccaacttaaacgcccccaactccttaggcgtctccgccctctgcgcaatctgcggcgaccgagctacaggtaaacactacggcgcatcaagctgtgacggctgcaaaggcttcttccgacgagccgtccgcaaaaaccacatgtactcatgcagattctcccgacaatgcgtcgtggacagagaccgacgaaaccaatgccgctactgccgcctcaaaaaatgcttccgcgccggcatgcgacgtgaagcagtccaaaacgaacgtgatcgcataagcactagacgcgccgcctacgaagactccgccctgccctccatcaacgccctactacaagccgaagtccttagcagacaaatagccgccccagtctccggaataaacggagacatacgtgccaaaaaaatagcatccatcgccgacgtatgcgaaagcatgaaagaacaactccttgtcctagtagaatgggctaaatacatccccgcattctgcgaactccccctagacgaccaagtagccctcctccgagcacacgccggcgaacacctcctactcggcgccacaaaaagaagcatggtcttcaaagacgtcctacttctaggaaacgactacatcgtccctcgccactgccccgaactcgccgagatgagtagagtctctatcagaatcctcgacgaactcgtactcccattccaagaactacaaatagacgacaacgaatacgcctacctcaaagcgatcatcttcttcgaccccgacgccaaaggcctatcagaccccggcaaaatcaaaagactccgcgcccaagtacaagtctccctagaagactacatcaacgaccgccagtacgacagccgaggccgattcggcgaactacttctactcctcccaacactacaatcaatcacctggcagatgatcgaacaaatccaattcatcaaactattcggcatggccaaaatagacaaccttctacaagaaatgctcctaggcggcgcccccagcgacgcaccacacgcacaccacccccttcacccccacctaatgcaagagcacatgggcaccaacgtcattgtagccaacacaatgcccacccacctctcgaacggtcaaatgtgcgaatggccccgcccacgcggccaagcagccgcacccgaagcaccccaaccagccccacccggaggatccggttcggaaccctacaaactcctacccggcgccgtggccacaatagtaagacccctctcagcaatcccccaacccaccatcaccaaacaagaagtcatctaaggactagtccctgttcccagagcccacttttttttctttttttgaaataaaatagcctgtctttcagatctaaaaaaaaaaaaaaaaaaaaaaaaaaaaaaaaaaaaaaaaaaaaaaaaaaaaaaaaaaaaaaaaaaaaaaaaaaaaaaaaaaaaaaaaaaaaaaaaaaaa

SEQ ID NO: 4568 - RNA, 1673 nt, synthetic construct
  misc_feature 1..1673: note = mRNA a-1 (A100) (opt11) from Homo sapiens__NP_000448.3__HNF4A(1-474)(S87A_K106R_K108R_K126R_K 127R)
  source 1..1673: mol_type = other RNA
aggagagtcccgcagtcggcgtccagcggctctgcttgttcgtgtgtgtgtcgttgcaggccttattcaagcttaccatgcgcctctccaaaacactcgtcgacatggacatggccgactactcagcagccctagaccccgcttacaccaccctcgagttcgaaaacgtacaagtcctcaccatgggcaacgacaccagcccatctgaaggtaccaacctcaacgcaccaaactccctcggcgtttcagctctatgcgccatatgcggagaccgcgccaccggcaaacactacggagcctcctcttgcgacggctgcaaaggcttcttccgcagagccgtacgcaaaaaccacatgtacagctgtagattttcccgccaatgcgtcgtcgaccgcgaccgccgcaaccagtgcagatattgccgactcaagaaatgcttccgcgcaggaatgcgccgcgaagccgtacaaaacgaacgcgaccgcatctccacacgccgctcatcttacgaagactcctccctaccaagcatcaacgcactacttcaagcagaagtcctatcccgacaaatcacctcccccgtctcaggcataaacggcgacataagggcaaagaaaatcgcctccatagccgacgtatgcgaatcaatgaaagaacaactcctagtcctcgtcgaatgggccaaatacatccccgccttctgcgaactgcccctcgacgaccaagtagcacttctccgcgcccacgccggcgaacacctcctactcggcgccaccaaacgttccatggtcttcaaagacgtcctcctacttggtaacgactacatcgtaccccgccactgccctgaactcgcagaaatgtcccgcgtctcaataagaatcctcgacgagctagttctccccttccaagaactacaaatcgacgacaacgaatacgcctacctcaaagccatcatatttttcgaccccgacgccaaaggcctttccgaccccggcaaaataaaacgcctccgctctcaagtccaggtcagcctcgaagactacatcaacgaccgccaatacgactctcgtggccgcttcggagaactactactactcctccccacactacaatccatcacctggcaaatgatcgaacaaatccaattcatcaaactcttcggcatggccaaaattgacaacctactccaagaaatgctcctaggcggctccccatccgacgcaccccacgcccaccaccccctccacccccacctcatgcaagaacacatgggaaccaacgtaatcgtcgcaaacacaatgccaacccacctatccaacggtcaaatgtgcgaatggccacgaccccgcggccaagcagctacccccgaaaccccacaaccctcaccaccaggaggcagcggttccgaaccatacaaactcctacccggggccgtcgccaccatcgtaaaacccctctccgccatcccccaacctacaatcaccaaacaagaagtcatctaaggactagtccctgttcccagagcccacttttttttctttttttgaaataaaatagcctgtctttcagatctaaaaaaaaaaaaaaaaaaaaaaaaaaaaaaaaaaaaaaaaaaaaaaaaaaaaaaaaaaaaaaaaaaaaaaaaaaaaaaaaaaaaaaaaaaaaaaaaaaaa

SEQ ID NO: 4569 - RNA, 1673 nt, synthetic construct
  misc_feature 1..1673: note = mRNA a-1 (A100) (opt11) from Homo sapiens__NP_000448.3__HNF4A(1-474)(S87A_K106R_K108R_K126R_K 127R_S142A_S143A_S148A_T166A_S167A_S313A_S378A_T429A_T432A_ S436A_K458R_S461A)
  source 1..1673: mol_type = other RNA
aggagagtcccgcagtcggcgtccagcggctctgcttgttcgtgtgtgtgtcgttgcaggccttattcaagcttaccatgcgcctaagcaaaaccctagtagacatggacatggcagactactcagcagcactagaccccgcctacaccaccctcgaatttgaaaacgttcaagtcctaacaatgggcaacgacacctctcccagcgaaggcacaaacctcaacgcccccaactcactcggggtctccgccctctgcgccatatgcggtgaccgtgcaaccggcaaacactacggcgcctcatcctgcgacggctgcaaaggattcttccgacgcgccgtacgcaaaaaccacatgtactcctgcagattctcacgccaatgcgtcgtggaccgagaccgccgcaaccaatgccgttactgccgcctcaagaaatgcttccgagccggaatgcgaagagaagccgtacaaaacgaacgcgaccgcatctccacacgacgagcagcctacgaagactccgccctaccctccataaacgcactcctccaagccgaagtactctcccgacaaatagccgcaccagtctccggcataaacggagacatccgagcaaagaaaatagcctcaatcgccgacgtatgcgaatcaatgaaagaacaacttctcgtcctcgtcgaatgggccaaatatatacccgccttctgcgaactccccctagacgaccaagtggcccttcttcgcgcccacgccggcgaacacctcctactcggagccaccaaacgctccatggtcttcaaagacgtactactcctcggtaacgactacatcgtcccacgacactgccccgaactagccgaaatgtcacgcgtctccatccgcatcctagacgaactcgtactcccattccaagaactccaaatcgacgacaacgaatacgcatacctcaaagccatcatcttcttcgacccagacgccaaaggcctatccgacccaggaaaaataaaacgcttacgcgcacaagtccaagtctccctcgaagactacatcaacgaccgtcagtacgacagccgggggagattcggcgaactgctactactacttcccaccctccaatccatcacctggcaaatgatagaacaaatacaattcatcaaactattcggcatggccaaaatcgacaacctcctacaagaaatgctactcggcggcgccccctccgacgcaccccacgcccaccaccccctccacccccatctaatgcaagaacacatgggcacaaacgtcatcgttgccaacacaatgcccacccacctttccaacggccaaatgtgcgaatggccacgcccccgtggccaagccgccgcccccgaagccccacaaccggccccaccaggtggatccggctcggaaccctacaaactactcccaggagcggtcgctaccatcgtacgccctttggccgccatcccccaacccacaatcaccaaacaagaagttatctagggactagtccctgttcccagagcccacttttttttctttttttgaaataaaatagcctgtctttcagatctaaaaaaaaaaaaaaaaaaaaaaaaaaaaaaaaaaaaaaaaaaaaaaaaaaaaaaaaaaaaaaaaaaaaaaaaaaaaaaaaaaaaaaaaaaaaaaaaaaaa

SEQ ID NO: 4570 - RNA, 1673 nt, synthetic construct
  misc_feature 1..1673: note = mRNA a-1 (A100) (opt11) from Homo sapiens__NP_000448.3__HNF4A(1-474)(S87A_K106R_K108R_K126R_K 127R_S142A_S143A_S148A_T166A_S167A_S313A_S378A_T429A_T432A_ S436A_K458R_S461E)
  source 1..1673: mol_type = other RNA
aggagagtcccgcagtcggcgtccagcggctctgcttgttcgtgtgtgtgtcgttgcaggccttattcaagcttaccatgcgcctctccaaaaccctcgtcgacatggacatggcagactacagcgccgccctcgaccccgcatacaccaccctagagttcgaaaacgtccaagtcctaacgatgggaaacgacacctcaccatccgaaggcacaaacctcaacgccccgaactccctaggagtctcagccctctgcgccatatgcggcgaccgagccacaggcaaacactacggcgcctcatcgtgcgacggatgcaaaggattcttccgacgagctgtccgcaaaaaccacatgtactcctgccgcttctcccgccaatgcgtcgttgaccgcgaccggcgcaaccaatgcagatactgccgactcaagaaatgcttccgcgcaggcatgcgacgagaagccgtccaaaacgaacgcgaccgcatctcaaccagacgcgccgcctacgaagactctgcactccccagcatcaacgccctcctgcaagccgaagtattatcccgacagatcgccgcccccgtatccggcatcaacggcgacatccgcgccaagaaaatcgcctccatcgcagatgtctgcgaaagcatgaaagaacaattactcgtactcgtcgaatgggcaaaatacatccccgcattctgcgaactccccctcgacgaccaagtcgccctattacgcgcccacgcaggagaacaccttctcttaggcgcaacgaaacgcagcatggtcttcaaagacgtcctactcctcggcaacgactacatcgtcccccgtcactgccccgaactcgccgaaatgtcccgcgtatccatccgcatcctcgacgaactcgtcctaccattccaagaactccaaatcgacgacaacgaatacgcctacctcaaagcaatcatcttcttcgaccccgacgcaaaaggactatccgaccccggcaaaatcaaacgcctccgcgcacaagtccaagtctccctcgaagactacataaacgacagacaatacgacagccgaggcagattcggagaacttctcctcctcctccccacactacaatccatcacatggcaaatgatcgaacaaatacaattcatcaaactcttcggcatggcaaaaatcgacaacctgctccaagaaatgctacttggcggagcccccagcgacgccccacacgcacaccaccccctccacccccacctcatgcaagagcacatgggcaccaacgtcatcgtagccaacacaatgcccacacacctctccaacggccaaatgtgcgaatggccccgtccccgcggccaagccgcagcccccgaagcaccacaacccgcacctccaggcggcagcggctctgaaccctacaaactcctccccggcgcagtcgccacaatcgtccgccccctagaggccataccccaacccacaattaccaaacaagaggtaatctaaggactagtccctgttcccagagcccacttttttttctttttttgaaataaaatagcctgtctttcagatctaaaaaaaaaaaaaaaaaaaaaaaaaaaaaaaaaaaaaaaaaaaaaaaaaaaaaaaaaaaaaaaaaaaaaaaaaaaaaaaaaaaaaaaaaaaaaaaaaaaa

SEQ ID NO: 4571 - RNA, 1673 nt, synthetic construct
  misc_feature 1..1673: note = mRNA a-1 (A100) (opt11) from Homo sapiens__NP_000448.3__HNF4A(1-474)(S87A_K106R_K108R_K126R_K 127R_S142A_S143A_S148E_T166A_S167E_S313A_S378E_T429E_T432E_ S436E_K458R_S461E)
  source 1..1673: mol_type = other RNA
aggagagtcccgcagtcggcgtccagcggctctgcttgttcgtgtgtgtgtcgttgcaggccttattcaagcttaccatgcgactaagcaagaccctagtagacatggacatggccgactactccgccgccctggatcccgcctacaccacactagaatttgaaaacgtacaagtcctcaccatgggcaacgacacaagccccagcgaagggaccaacctcaacgcgccaaacagcctaggcgtctcagccctatgtgccatctgcggagacagagccaccggcaaacactacggagcctcatcctgcgacggatgcaaaggcttcttccgacgcgccgtccgcaaaaaccacatgtactcctgccgtttctcccgacaatgcgtcgtagaccgcgaccgccgcaaccaatgccgctattgccgcctaaagaaatgcttccgcgccggcatgcgacgcgaagccgtccagaacgagcgcgaccgaatctccacacgtcgcgctgcctacgaagactctgaactcccctcgataaacgcactgctccaagccgaagttctatcacgccaaatagccgaacccgtcagcggcatcaacggcgacatccgcgccaagaaaatcgcatcaatcgcagatgtatgcgaatccatgaaagaacagctcctcgtcctcgtagaatgggctaaatacatccccgccttctgtgagctccccctcgacgaccaggtagccctgctaagagcccatgccggcgaacacctcctccttggcgccactaaacgatcaatggtattcaaagacgtcctcctactaggaaacgactacatagtccccagacactgccccgaacttgcagaaatgagccgagtctccatccgcatcttagacgaactcgtcctcccattccaagaactccagatcgacgacaacgaatacgcataccttaaagcaataatcttcttcgaccccgacgccaaaggactatcagaccccgggaaaattaaaagactccgagcacaagtccaagtctcactcgaagactacatcaacgatcgccaatacgactcacgcggacgatttggcgaactcctcctgttactccccaccctacaaagcatcacctggcaaatgatcgaacaaatccagttcataaaactcttcggaatggccaaaatcgacaacctgctccaagaaatgctcctcggcggcgaaccctccgacgcaccccacgcccaccaccccctccacccacacctaatgcaagaacacatgggaaccaacgtcatagtcgccaacaccatgccaacacacctctcgaacggccaaatgtgcgaatggccccgaccacgcggccaagccgctgaacccgaagaaccccaacccgaacccccaggaggctccggctccgaaccctacaaactcctccctggcgccgtcgcaaccatagtacgccccctagaagctatcccacaacccacaataaccaaacaagaagtcatctgaggactagtccctgttcccagagcccacttttttttctttttttgaaataaaatagcctgtctttcagatctaaaaaaaaaaaaaaaaaaaaaaaaaaaaaaaaaaaaaaaaaaaaaaaaaaaaaaaaaaaaaaaaaaaaaaaaaaaaaaaaaaaaaaaaaaaaaaaaaaaa

SEQ ID NO: 4572 - RNA, 1673 nt, synthetic construct
  misc_feature 1..1673: note = mRNA a-1 (A100) (opt11) from Homo sapiens__NP_000448.3__HNF4A(1-474)(S87A_K106R_K108R_K126R_K 127R_S142A_S143A_S148A_T166A_S167A_K179R_K180R_S313A_S378A_ T429A_T432A_S436A_K458R_S461E)
  source 1..1673: mol_type = other RNA
aggagagtcccgcagtcggcgtccagcggctctgcttgttcgtgtgtgtgtcgttgcaggccttattcaagcttaccatgcggctctccaaaactctcgtcgacatggacatggcagactacagcgccgccctcgacccagcctacacaaccctcgaattcgaaaacgttcaagtcctcaccatgggtaacgacacatccccctcagaaggaaccaacctcaacgcacccaactccctcggagtttccgccctatgcgcaatctgcggcgatcgagccaccggcaaacactacggcgcctcgtcttgcgacggctgcaaaggcttcttccgccgcgccgtcagaaaaaaccacatgtactcatgccggttctccagacaatgcgtcgtcgaccgagaccgccgaaaccaatgcaggtactgccgcctgaaaaaatgcttccgcgcaggcatgcgccgcgaagccgtccaaaacgagcgagaccgaatctcaacgcgacgcgccgcctacgaagactcagccctcccatccatcaacgcactactacaagccgaagtactatcccgacaaatagccgcaccagtctcaggaatcaacggagacatacgcgccagacgaatagcctccattgccgacgtatgcgaaagcatgaaagaacaactactcgttctcgtcgagtgggccaaatacattcccgctttctgcgaattacccctagacgaccaagtcgccctcctcagagcccacgcaggcgaacacctcctactcggagccaccaaacgatccatggtcttcaaagacgtcttactcctcggcaacgactacatcgtccccagacactgtcccgaactcgccgaaatgtcccgcgtctccatccgaatcctcgacgaactcgtactccccttccaggaactccaaatcgacgacaacgaatacgcctacctaaaagccatcatttttttcgaccctgatgccaaaggcctctctgaccccggcaaaatcaaacgactacgcgcccaagtccaagtctcactcgaagactacatcaacgatcgccagtacgactcccgaggccgcttcggtgaactcctcctcctcctgcccaccctacaatcaataacttggcaaatgatcgaacaaatacaattcatcaaactcttcggcatggccaaaattgacaacctcctacaagaaatgcttctcggcggagcacccagcgatgccccacacgcccaccaccccctccacccacacctcatgcaagaacacatgggcaccaacgtaatcgtcgccaacacaatgcccacacacctctccaacggacaaatgtgcgaatggccccgcccccgaggccaagcagccgccccagaagcaccccaacccgccccacccggaggctcaggctctgaaccctacaaactcctcccaggagcagtcgcaaccatcgtccggcccctcgaagcaatcccccaacccacaatcacaaaacaagaggtaatctagggactagtccctgttcccagagcccacttttttttctttttttgaaataaaatagcctgtctttcagatctaaaaaaaaaaaaaaaaaaaaaaaaaaaaaaaaaaaaaaaaaaaaaaaaaaaaaaaaaaaaaaaaaaaaaaaaaaaaaaaaaaaaaaaaaaaaaaaaaaaa

SEQ ID NO: 4573 - RNA, 1673 nt, synthetic construct
  misc_feature 1..1673: note = mRNA a-1 (A100) (opt11) from Homo sapiens__NP_000448.3__HNF4A(1-474)(S87A_K106R_K108R_K126R_K 127R_S142A_S143A_S148A_T166A_S167A_K300R_K307R_K309R_S313A_ S378A_T429A_T432A_S436A_K458R_S461E)
  source 1..1673: mol_type = other RNA
aggagagtcccgcagtcggcgtccagcggctctgcttgttcgtgtgtgtgtcgttgcaggccttattcaagcttaccatgcgcctatccaaaacactcgttgacatggacatggcagactactccgcagccctcgaccccgcctacaccaccctcgaattcgaaaacgtccaagtcctaacaatgggaaacgacacatccccatcagaagggaccaacctaaacgcccccaactccctcggcgtctccgcactctgcgcaatctgcggcgacagagccaccggaaaacactacggcgcctcctcatgcgacggatgcaaaggattcttccgaagagccgtccgaaaaaaccacatgtactcatgccgattctcgcgccaatgcgtcgtcgatcgcgacagacgcaaccaatgccgatactgcagacttaaaaaatgcttccgtgctggcatgcgacgcgaagctgtccaaaatgagcgcgaccgcatatctacccgaagagccgcctacgaagactcagcactaccctcaatcaacgccctactccaggccgaagtcctatcccgacaaatcgcagcccccgtgtccggcataaacggtgacatccgcgccaaaaaaatcgcctcaatagccgacgtctgtgaaagcatgaaagaacaactactagttctcgtcgaatgggcaaaatacatacccgcattctgcgaactcccactagacgaccaagtggccctcctccgagcccatgcaggagaacacctcctcctcggggccacaaaacgctccatggtgttcaaagacgtactactcctaggaaacgactacatcgtaccccgccactgccccgaactagctgaaatgtcacgcgtctcgatccgcatcctcgacgaactcgtcctaccattccaagaactgcaaatcgacgacaacgagtacgcgtacctaaaagcaataatattcttcgaccccgacgcccgcggcctctccgaccccggaagaatcaggcgactccgcgcccaagtccaagtaagcctcgaagactacatcaacgaccgccaatacgactcacgaggcagattcggcgaactactcctcctcctcccaacacttcaatcaatcacctggcaaatgatcgaacaaatccaattcatcaagctattcggcatggccaaaatcgacaacctcctacaagaaatgctactgggaggcgccccctccgacgccccccacgcccaccaccccctacatccacacctcatgcaggaacatatgggaaccaacgtcatcgtcgcaaacaccatgcccacccacctttccaacggccaaatgtgcgaatggccccgcccccgcggccaagcagccgcccccgaagccccccaacccgcaccacccggcggcagtggctcggaaccctacaaactcctccccggcgccgtagccaccatcgtccgaccactagaagcaataccacaacccaccataaccaaacaagaagtaatctaaggactagtccctgttcccagagcccacttttttttctttttttgaaataaaatagcctgtctttcagatctaaaaaaaaaaaaaaaaaaaaaaaaaaaaaaaaaaaaaaaaaaaaaaaaaaaaaaaaaaaaaaaaaaaaaaaaaaaaaaaaaaaaaaaaaaaaaaaaaaaa

SEQ ID NO: 4574 - RNA, 1673 nt, synthetic construct
  misc_feature 1..1673: note = mRNA a-1 (A100) (opt11) from Homo sapiens__NP_000448.3__HNF4A(1-474)(S87A_K106R_K108R_K126R_K 127R_S142A_S143A_S148A_T166A_S167A_S313A_S378A_T429A_T432A_ S436A_K447R_K458R_S461E_K470R)
  source 1..1673: mol_type = other RNA
aggagagtcccgcagtcggcgtccagcggctctgcttgttcgtgtgtgtgtcgttgcaggccttattcaagcttaccatgagactatcaaaaaccctggtggacatggacatggccgactacagcgctgccctcgaccccgcctataccacactagagttcgaaaacgtccaagtcctaaccatgggcaacgacacatccccctccgaaggaacaaacctaaacgcccccaactccctcggtgtgtccgccttatgcgccatctgcggagaccgcgccacaggcaaacactacggcgcatcaagctgcgacggctgtaaaggattcttccgccgcgccgtgcgcaaaaaccacatgtactcatgccgcttctcccgccagtgcgtcgtcgaccgcgaccgccgcaaccaatgccgatactgccgcctcaagaaatgcttccgagccggcatgcgacgagaagcagtccaaaacgaacgcgatcgcatctccacaagacgcgcagcatatgaagactcggccctcccatcaatcaacgccctcctacaagccgaagtactatcccgccaaatcgccgcccccgtctccggcatcaacggcgacatacgcgctaagaaaatcgcctcaatagcagacgtctgcgaatcaatgaaagaacaactgctcgtactcgtggaatgggccaaatacatcccagcgttctgcgaactccccctcgacgaccaagtagcattactacgcgcccacgccggcgaacaccttctactaggagcaaccaaacgatccatggtcttcaaagacgtcctgctcctaggaaatgactacatcgtcccccgccattgccctgaactagcagaaatgtcgcgcgtctcaatccgaatcctcgacgaactcgttctaccattccaagaactacaaatcgacgacaacgaatacgcctaccttaaagcaataatcttcttcgacccagatgcaaaaggcctctccgaccccggcaaaatcaaacgcctacgagcacaagtccaagtctctctcgaagactacatcaacgaccgccaatacgactcacgtggccgcttcggcgaactcctcctcctcctacccacccttcaatcaatcacatggcaaatgatcgaacaaatacaattcataaaactattcggcatggccaaaatcgacaacctcctccaagaaatgctactcggcggtgccccgtccgacgcaccccacgcccaccaccccctccatccacacctcatgcaggaacacatgggaaccaacgtcatcgtcgccaacaccatgcccactcacctcagcaacggacaaatgtgcgaatggccaagaccgcgaggacaagccgccgcccccgaagccccacaacctgcacccccaggaggctccggatcagaaccttaccgcctcctccccggcgccgtcgccacaatcgtacgcccactcgaagccatcccccaaccaaccatcacccgccaagaagtcatctaaggactagtccctgttcccagagcccacttttttttctttttttgaaataaaatagcctgtctttcagatctaaaaaaaaaaaaaaaaaaaaaaaaaaaaaaaaaaaaaaaaaaaaaaaaaaaaaaaaaaaaaaaaaaaaaaaaaaaaaaaaaaaaaaaaaaaaaaaaaaaa

SEQ ID NO: 4575 - RNA, 1673 nt, synthetic construct
  misc_feature 1..1673: note = mRNA a-1 (A100) (opt11) from Homo sapiens__NP_000448.3__HNF4A(1-474)(S87A_K106R_K108R_K126R_K 127R_S142A_S143A_S148A_T166A_S167A_K179R_K180R_K234R_K300R_ K307R_K309R_S313A_S378A_T429A_T432A_S436A_K447R_K458R_S461E _K470R)
  source 1..1673: mol_type = other RNA
aggagagtcccgcagtcggcgtccagcggctctgcttgttcgtgtgtgtgtcgttgcaggccttattcaagcttaccatgcgcctttccaaaaccctagtcgacatggacatggccgactactccgcagccctagacccagcgtacaccaccctcgagttcgaaaacgtccaagtactcacaatgggcaacgacacctccccctcggaaggcaccaacctcaacgcccctaactcactcggcgtttccgctctctgcgccatctgcggagaccgagcgacaggaaaacactacggagcctcctcatgcgatggctgcaaaggcttcttccgccgcgcagtacgcaaaaaccacatgtactcatgcagattctcaagacaatgcgtcgtcgaccgcgaccgacgcaaccaatgccgatactgccgcctcaagaaatgcttccgcgccggcatgcgccgagaagcagtccaaaacgaacgcgacagaataagtactcgccgagccgcatacgaagacagcgccctaccatccatcaacgcactcctccaagccgaagtcctatcacgacaaatcgcagctcccgtttccggcatcaacggcgatatccgcgcaagacgaatagcaagcattgcagacgtctgcgaatcaatgaaagaacaactcctcgtcctcgtcgaatgggccaaatacatccccgcattctgcgaactccccctcgacgaccaagtcgccctactaagagcccacgccggcgaacacctcctcctaggcgctacccgacgctccatggtattcaaagacgtcctactcctaggtaacgactacatcgtaccccgccactgccccgaactcgcagaaatgagcagagtttcaatccgcatcctagacgagctagttctccccttccaagaacttcaaatcgacgataacgaatacgcctacctaaaagccatcatcttcttcgacccagacgcccgaggcctctccgacccaggacgaataagaagactacgcgcccaagtacaagtttccctcgaagattacatcaacgacagacagtacgactccagaggccgattcggtgaactcctcctgctactccccaccctccaaagcataacatggcaaatgatcgaacaaatccaattcatcaaactcttcggcatggccaaaatcgacaacctcctacaagaaatgctactgggcggtgcaccctccgacgccccacacgctcaccaccccctccacccccatcttatgcaagaacacatgggaaccaatgtcatcgtcgcaaacacaatgcccacccacctaagcaacggccaaatgtgcgaatggcccagaccacgcggccaagcagccgcccccgaagccccacaaccagcccctcccggaggatcaggatctgaaccctaccgactactccccggagccgtcgccaccatcgtccgccccctcgaagcaataccacaaccgaccataacgcgccaagaagtcatctaaggactagtccctgttcccagagcccacttttttttctttttttgaaataaaatagcctgtctttcagatctaaaaaaaaaaaaaaaaaaaaaaaaaaaaaaaaaaaaaaaaaaaaaaaaaaaaaaaaaaaaaaaaaaaaaaaaaaaaaaaaaaaaaaaaaaaaaaaaaaaa

SEQ ID NO: 4576 - RNA, 1673 nt, synthetic construct
  misc_feature 1..1673: note = mRNA a-1 (A100) (opt11) from Homo sapiens__NP_000448.3__HNF4A(1-474)(S87A_S95A_S99A_K106R_K10 8R_K126R_K127R_S142A_S143A_S148A_T166A_S167A_S313A_S378A_T4 29A_T432A_S436A_K458R_S461E)
  source 1..1673: mol_type = other RNA
aggagagtcccgcagtcggcgtccagcggctctgcttgttcgtgtgtgtgtcgttgcaggccttattcaagcttaccatgagactaagcaaaaccctcgtcgacatggacatggccgactacagcgccgccctcgaccccgcatacaccaccctcgaatttgaaaacgtacaagtcctcaccatgggtaacgatacctccccatccgaaggaaccaacctcaacgccccaaactcactaggcgtctccgccctctgcgccatctgcggcgaccgcgccaccggcaaacactacggcgcctcttcctgtgacggatgcaaaggctttttccggcgcgcagtccgcaaaaaccacatgtacgcctgccgtttcgcccgacagtgcgtagtcgaccgcgaccgtcgaaaccaatgcagatactgccgactaaagaaatgcttccgcgccggcatgcgcagagaagcagtacaaaacgaacgagaccgcatctcaacccgccgtgcggcatatgaagactcggccctaccatccatcaacgccctgctccaagccgaagtattatcccgccaaatcgcagcccccgttagtggaatcaacggcgacatccgagccaagaaaatcgcctccatagccgacgtctgcgagagcatgaaagaacaactcctcgtactcgtagaatgggcaaaatacatacccgccttctgcgaactccccctagacgaccaagtagccctactccgagcccacgccggtgaacatctactcctcggagccaccaaaagatccatggtattcaaagacgtcctcctcctaggcaacgactacatcgtcccccgccactgccccgaactcgccgaaatgtcccgcgtctcaatccgcatactggacgagctcgtactccccttccaagaactacaaatcgacgacaacgaatacgcttacctaaaagcaatcatcttcttcgacccagacgcgaaaggcctatcagatcccggcaaaatcaaacgcctacgcgcacaagtacaagtatcccttgaagactacataaacgaccgacaatacgacagccggggccgtttcggagaacttctcctcctcctacccacactccaatccattacctggcaaatgatagaacaaatccaattcatcaaactcttcggaatggccaagatcgacaacctcctccaagaaatgctactcggaggcgcccccagtgacgctccccacgcccatcaccccctccacccccacctaatgcaagaacacatgggcaccaacgtcatagtcgccaacaccatgccaacccacctctcaaacggccaaatgtgcgaatggcctcgccccagaggccaagcggccgcccccgaagccccacaacccgccccacccggcggctccggatcagaaccatacaaactcctacccggcgccgtagccactatcgtacgaccactcgaagccatcccacaacccacaatcaccaaacaagaagtcatctaaggactagtccctgttcccagagcccacttttttttctttttttgaaataaaatagcctgtctttcagatctaaaaaaaaaaaaaaaaaaaaaaaaaaaaaaaaaaaaaaaaaaaaaaaaaaaaaaaaaaaaaaaaaaaaaaaaaaaaaaaaaaaaaaaaaaaaaaaaaaaa

SEQ ID NO: 4577 - RNA, 1673 nt, synthetic construct
  misc_feature 1..1673: note = mRNA a-1 (A100) (opt11) from Homo sapiens__NP_000448.3__HNF4A(1-474)(S87A_K106R_K108R_K126R_K 127R_S138A_T139A_S142A_S143A_S148A_T166A_S167A_S313A_S378A_ T429A_T432A_S436A_K458R_S461E)
  source 1..1673: mol_type = other RNA
aggagagtcccgcagtcggcgtccagcggctctgcttgttcgtgtgtgtgtcgttgcaggccttattcaagcttaccatgcgcctctccaaaaccctagtagatatggacatggcagactatagcgcagcactcgaccccgcctacactacccttgaattcgaaaacgtccaagtcctcacaatgggaaacgacacctctccttccgaaggcaccaacctcaacgccccaaactccctcggcgtctccgccttgtgcgccatctgcggcgaccgagccacaggaaaacactacggagcctcctcctgcgatggctgcaaaggcttcttccgccgcgcagtaagaaaaaaccacatgtactcatgccgcttctcccgccagtgcgtcgtagaccgcgaccgccgcaaccaatgccgctactgccgcctcaaaaaatgcttccgagccggaatgcgaagagaagccgtccaaaacgaacgcgaccgcatcgccgcccgacgggccgcatacgaggatagcgccctcccaagcatcaatgctcttctccaagccgaggtcctttcccgtcaaatcgcagcccccgtatccggaatcaacggagacatacgcgccaaaaaaatcgcaagcatcgccgacgtctgcgaaagcatgaaagaacaactcctcgtactcgtcgaatgggccaaatacataccagccttctgcgaactacccctcgacgatcaagtagccctcctacgagcccacgccggagaacacctcctacttggcgccacaaaacgaagcatggttttcaaggacgtcctcctcctcggcaacgactacatagtaccccgccactgccccgaactagcagaaatgtcccgggtatcgatccgcatactagacgaactagtcctcccctttcaagaactccaaatcgatgacaacgaatacgcttacctgaaagcaataatcttcttcgaccctgacgccaaaggcctctccgacccaggaaaaataaaacgcctccgcgcccaagtacaagtctccctagaagactacataaacgaccgacaatacgactcccgaggacgattcggcgaactactattattactacctacactacaatccatcacctggcaaatgatcgaacaaatccaattcatcaaactattcggcatggccaaaatcgacaacctactccaagaaatgctcctaggcggcgcccccagcgacgccccacacgcccaccaccccctccacccccacctaatgcaagaacacatgggcacaaacgtcatagtagccaacaccatgcccacccacctcagcaacggccaaatgtgcgagtggccccgaccacgcggccaagccgcagcccctgaagccccccaacctgccccccccggcggctccggctccgaaccatacaaactactccccggggccgtcgccacaatcgtcagacccctcgaagcaatcccccaacctacaatcaccaaacaagaagtaatttaaggactagtccctgttcccagagcccacttttttttctttttttgaaataaaatagcctgtctttcagatctaaaaaaaaaaaaaaaaaaaaaaaaaaaaaaaaaaaaaaaaaaaaaaaaaaaaaaaaaaaaaaaaaaaaaaaaaaaaaaaaaaaaaaaaaaaaaaaaaaaa

SEQ ID NO: 4578 - RNA, 1673 nt, synthetic construct
  misc_feature 1..1673: note = mRNA a-1 (A100) (opt11) from Homo sapiens__NP_000448.3__HNF4A(1-474)(S87A_S95A_S99A_K106R_K10 8R_K126R_K127R_S138A_T139A_S142A_S143A_S148A_T166A_S167A_S3 13A_S378A_T429A_T432A_S436A_K458R_S461E)
  source 1..1673: mol_type = other RNA
aggagagtcccgcagtcggcgtccagcggctctgcttgttcgtgtgtgtgtcgttgcaggccttattcaagcttaccatgcgactaagcaaaaccctagtcgacatggacatggcagactatagcgccgcactcgacccagcctacacaacgctcgagttcgaaaacgttcaagtccttaccatgggcaacgacacctcccccagcgaaggcaccaacctaaacgcccctaactcactcggagtgtccgcactatgcgcaatctgcggggaccgcgccaccggcaaacactacggcgcctccagctgcgacggctgcaaaggcttcttccgccgagccgtccgcaagaaccacatgtacgcctgccgcttcgctcgccaatgcgtcgtagaccgagaccgcagaaaccaatgcagatactgcagactcaagaaatgcttccgcgccggcatgcgacgcgaagccgtacaaaacgaacgcgaccgcatcgccgctcgtcgagcagcctatgaagactcagcccttccctcaataaacgcactactccaagccgaagtcctcagccgacaaatcgccgccccagtctcaggcatcaacggcgacatccgcgccaagaaaatagcctccatcgcggacgtctgcgagtccatgaaagaacaactcctagttctggtcgaatgggctaaatacatccccgcattctgcgaactcccactcgacgaccaagtagccctactccgagcccacgcaggagaacacctactcctaggagccacaaaacgttccatggtatttaaagacgtcctcctactaggcaacgactacatcgtcccccgccactgccccgaactcgccgaaatgtcccgcgtctccatccgcatcctagacgagctcgtactcccattccaagaactccaaatagacgacaacgaatacgcctacctaaaagccatcatcttcttcgatccagacgcaaaaggcctctcagacccaggcaaaatcaaaagacttagagcccaagtccaagtatcactcgaagactacatcaacgaccgacaatacgactcccgcggaaggttcggcgaactcctcctcctcctccccacactacaatccatcacctggcaaatgatagaacaaattcaattcataaaactattcggcatggccaagatagacaacctcctccaagaaatgctcctcggcggagccccctccgacgcaccccacgcccaccaccccctacacccccacctgatgcaagaacacatgggaacaaacgtaatcgtagccaacaccatgccgacacatctctctaacggccaaatgtgcgaatggccacgcccacgcggccaagccgcagcccccgaagcaccacaaccagccccacccggaggctccggatccgaaccctacaagttgctccccggcgccgtagccacaatcgtccgccccctagaggccataccacaacccacaatcacaaaacaagaagtcatataaggactagtccctgttcccagagcccacttttttttctttttttgaaataaaatagcctgtctttcagatctaaaaaaaaaaaaaaaaaaaaaaaaaaaaaaaaaaaaaaaaaaaaaaaaaaaaaaaaaaaaaaaaaaaaaaaaaaaaaaaaaaaaaaaaaaaaaaaaaaaa

SEQ ID NO: 4579 - RNA, 1673 nt, synthetic construct
  misc_feature 1..1673: note = mRNA a-1 (A100) (opt28) from Homo sapiens__NP_000448.3__HNF4A(1-474)
  source 1..1673: mol_type = other RNA
aggagagtcccgcagtcggcgtccagcggctctgcttgttcgtgtgtgtgtcgttgcaggccttattcaagcttaccatgcggctgagcaagaccctggtggacatggatatggcagactactccgccgctctggatccagcatatacaactctggagttcgaaaacgtccaggtgctgaccatgggaaatgacacatctcccagtgagggcactaacctgaatgcccctaactcactgggggtgagcgctctgtgcgcaatctgcggagacagggccaccggcaaacactacggggcttcctcttgtgatggatgcaagggctttttcagacgcagcgtccggaaaaatcatatgtacagttgccgattttcaaggcagtgcgtggtggacaaggacaagagaaaccagtgccgctattgtcggctgaaaaagtgcttcagggcaggaatgaaaaaggaagccgtccagaatgagagagatcgaatttccacacggcgcagctcttacgaagacagctccctgccaagtatcaacgctctgctgcaggcagaggtgctgtcaaggcagatcactagccccgtgtctgggattaacggcgatatcagagccaagaaaattgcttccatcgcagacgtctgcgaaagcatgaaggagcagctgctggtgctggtggagtgggccaaatacatccctgcattttgcgaactgccactggacgatcaggtcgctctgctgcgggcccacgcaggagagcatctgctgctgggcgctaccaagcgaagtatggtgttcaaggacgtgctgctgctggggaatgactatattgtccccaggcactgccctgaactggccgagatgtcaagagtgtctatccgcatcctggatgaactggtgctgccattccaggagctgcagattgacgataacgaatacgcatacctgaaagctatcatctttttcgaccccgacgccaagggactgtccgatcctggcaaaattaagcggctgaggagccaggtccaggtgagtctggaggactatatcaatgacagacagtacgatagccgagggcggtttggagaactgctgctgctgctgccaacactgcagtccattacctggcagatgatcgagcagatccagttcattaaactgttcggcatggcaaagatcgacaacctgctgcaggagatgctgctgggagggtcaccctctgatgcccctcatgctcaccacccactgcatccccacctgatgcaggaacatatgggcactaatgtgatcgtcgcaaacacaatgcctacccacctgagcaatggacagatgtgtgagtggccacgccccaggggccaggccgcaactcctgaaaccccacagccctcccctccagggggatctggcagcgagccctacaagctgctgcctggagctgtggccacaattgtgaaaccactgagtgcaatcccccagcctaccattactaagcaggaagtcatctgaggactagtccctgttcccagagcccacttttttttctttttttgaaataaaatagcctgtctttcagatctaaaaaaaaaaaaaaaaaaaaaaaaaaaaaaaaaaaaaaaaaaaaaaaaaaaaaaaaaaaaaaaaaaaaaaaaaaaaaaaaaaaaaaaaaaaaaaaaaaaa

SEQ ID NO: 4580 - RNA, 1673 nt, synthetic construct
  misc_feature 1..1673: note = mRNA a-1 (A100) (opt28) from Homo sapiens__NP_000448.3__HNF4A(1-474)(S313A)
  source 1..1673: mol_type = other RNA
aggagagtcccgcagtcggcgtccagcggctctgcttgttcgtgtgtgtgtcgttgcaggccttattcaagcttaccatgcggctgagcaagaccctggtggacatggatatggcagactactccgccgctctggatccagcatatacaactctggagttcgaaaacgtccaggtgctgaccatgggaaatgacacatctccctcagagggcactaacctgaatgcccctaacagtctgggggtgagcgctctgtgcgcaatctgcggagacagggccaccggcaaacactacggggcttcctcttgtgatggatgcaagggctttttcagacgcagcgtccggaaaaatcatatgtactcatgccgatttagtaggcagtgcgtggtggacaaggacaagagaaaccagtgccgctattgtcggctgaaaaagtgcttcagggcaggaatgaaaaaggaagccgtccagaatgagagagatcgaatttccacacggcgcagctcttacgaagacagctccctgccatcaatcaacgctctgctgcaggcagaggtgctgagtaggcagatcactagccccgtgtctgggattaacggcgatatcagagccaagaaaattgcatccatcgctgacgtctgcgaaagcatgaaggagcagctgctggtgctggtggagtgggccaaatacatccctgcattttgcgaactgccactggacgatcaggtcgctctgctgcgggcccacgcaggagagcatctgctgctgggcgctaccaagcgatcaatggtgttcaaggacgtgctgctgctggggaatgactatattgtccccaggcactgccctgaactggccgagatgagtagagtgtctatccgcatcctggatgaactggtgctgccattccaggagctgcagattgacgataacgaatacgcatacctgaaagctatcatctttttcgaccccgacgccaagggactgtccgatcctggcaaaattaagcggctgagggcacaggtccaggtgagcctggaggactatatcaatgacagacagtacgatagccgagggcggtttggagaactgctgctgctgctgccaacactgcagtccattacctggcagatgatcgagcagatccagttcattaaactgttcggcatggccaagatcgacaacctgctgcaggagatgctgctgggagggtcaccctctgatgctcctcatgcacaccacccactgcatccccacctgatgcaggaacatatgggcactaatgtgatcgtcgccaacacaatgcctacccacctgagtaatggacagatgtgtgagtggccacgccccaggggccaggcagctactcctgaaaccccacagcccagccctccagggggatccggctctgagccctacaagctgctgcctggagcagtggccacaattgtgaaaccactgagcgctatcccccagcctaccattactaagcaggaagtcatctgaggactagtccctgttcccagagcccacttttttttctttttttgaaataaaatagcctgtctttcagatctaaaaaaaaaaaaaaaaaaaaaaaaaaaaaaaaaaaaaaaaaaaaaaaaaaaaaaaaaaaaaaaaaaaaaaaaaaaaaaaaaaaaaaaaaaaaaaaaaaaa

SEQ ID NO: 4581 - RNA, 1673 nt, synthetic construct
  misc_feature 1..1673: note = mRNA a-1 (A100) (opt28) from Homo sapiens__NP_000448.3__HNF4A(1-474)(S313E)
  source 1..1673: mol_type = other RNA
aggagagtcccgcagtcggcgtccagcggctctgcttgttcgtgtgtgtgtcgttgcaggccttattcaagcttaccatgcggctgagcaagaccctggtggacatggatatggcagactactccgccgctctggatccagcatatacaactctggagttcgaaaacgtccaggtgctgaccatgggaaatgacacatctccctcagagggcactaacctgaatgcccctaacagtctgggggtgagcgctctgtgcgcaatctgcggagacagggccaccggcaaacactacggggcttcctcttgtgatggatgcaagggctttttcagacgcagcgtccggaaaaatcatatgtactcatgccgatttagtaggcagtgcgtggtggacaaggacaagagaaaccagtgccgctattgtcggctgaaaaagtgcttcagggcaggaatgaaaaaggaagccgtccagaatgagagagatcgaatttccacacggcgcagctcttacgaagacagctccctgccatcaatcaacgctctgctgcaggcagaggtgctgagtaggcagatcactagccccgtgtctgggattaacggcgatatcagagccaagaaaattgcatccatcgctgacgtctgcgaaagcatgaaggagcagctgctggtgctggtggagtgggccaaatacatccctgcattttgcgaactgccactggacgatcaggtcgctctgctgcgggcccacgcaggagagcatctgctgctgggcgctaccaagcgatcaatggtgttcaaggacgtgctgctgctggggaatgactatattgtccccaggcactgccctgaactggccgagatgagtagagtgtctatccgcatcctggatgaactggtgctgccattccaggagctgcagattgacgataacgaatacgcatacctgaaagctatcatctttttcgaccccgacgccaagggactgtccgatcctggcaaaattaagcggctgagggagcaggtccaggtgagcctggaagactatatcaatgacagacagtacgatagccgagggcggtttggagagctgctgctgctgctgccaacactgcagtccattacctggcagatgatcgagcagatccagttcattaaactgttcggcatggcaaagatcgacaacctgctgcaggaaatgctgctgggagggtcaccctctgatgcccctcatgctcaccacccactgcatccccacctgatgcaggagcatatgggcactaatgtgatcgtcgcaaacacaatgcctacccacctgagtaatggacagatgtgtgaatggccacgccccaggggccaggccgcaactcctgagaccccacagcccagccctccagggggatccggctctgaaccctacaagctgctgcctggagctgtggcaacaattgtgaaaccactgagcgccatcccccagcctaccattactaagcaggaggtcatctgaggactagtccctgttcccagagcccacttttttttctttttttgaaataaaatagcctgtctttcagatctaaaaaaaaaaaaaaaaaaaaaaaaaaaaaaaaaaaaaaaaaaaaaaaaaaaaaaaaaaaaaaaaaaaaaaaaaaaaaaaaaaaaaaaaaaaaaaaaaaaa

SEQ ID NO: 4582 - RNA, 1673 nt, synthetic construct
  misc_feature 1..1673: note = mRNA a-1 (A100) (opt28) from Homo sapiens__NP_000448.3__HNF4A(1-474)(S142A_S143A)
  source 1..1673: mol_type = other RNA
aggagagtcccgcagtcggcgtccagcggctctgcttgttcgtgtgtgtgtcgttgcaggccttattcaagcttaccatgcggctgagcaagaccctggtggacatggatatggcagactactccgccgctctggatccagcatatacaactctggagttcgaaaacgtccaggtgctgaccatgggaaatgacacatctccctcagagggcactaacctgaatgcccctaacagtctgggggtgagcgctctgtgcgcaatctgcggagacagggccaccggcaaacactacggggcttcctcttgtgatggatgcaagggctttttcagacgcagcgtccggaaaaatcatatgtactcatgccgatttagtaggcagtgcgtggtggacaaggacaagagaaaccagtgccgctattgtcggctgaaaaagtgcttcagggcaggaatgaaaaaggaagccgtccagaatgagagagatcgaatttccacacggcgcgctgcatacgaagacagctctctgccaagcatcaacgccctgctgcaggcagaggtgctgtccaggcagatcacttcacccgtgagtgggattaacggcgatatcagagctaagaaaattgccagcatcgcagacgtctgcgaatctatgaaggagcagctgctggtgctggtggagtgggctaaatacatccctgccttttgcgaactgccactggacgatcaggtcgcactgctgcgggctcacgccggagagcatctgctgctgggcgcaaccaagcgatccatggtgttcaaggacgtgctgctgctggggaatgactatattgtccccaggcactgccctgaactggctgagatgagcagagtgtcaatccgcatcctggatgaactggtgctgccattccaggagctgcagattgacgataacgaatacgcctacctgaaagcaatcatctttttcgaccccgacgccaagggactgagtgatcctggcaaaattaagcggctgaggtctcaggtccaggtgtccctggaggactatatcaatgacagacagtacgatagccgagggcggtttggagaactgctgctgctgctgccaacactgcagagcattacctggcagatgatcgagcagatccagttcattaaactgttcggcatggctaagatcgacaacctgctgcaggagatgctgctgggagggtccccctcagatgcacctcatgcccaccacccactgcatccccacctgatgcaggaacatatgggcactaatgtgatcgtcgcaaacacaatgcctacccacctgtctaatggacagatgtgtgagtggccacgccccaggggccaggctgcaactcctgaaaccccacagcccagtcctccagggggaagcggctccgagccctacaagctgctgcctggagccgtggctacaattgtgaaaccactgtctgcaatcccccagcctaccattactaagcaggaagtcatctgaggactagtccctgttcccagagcccacttttttttctttttttgaaataaaatagcctgtctttcagatctaaaaaaaaaaaaaaaaaaaaaaaaaaaaaaaaaaaaaaaaaaaaaaaaaaaaaaaaaaaaaaaaaaaaaaaaaaaaaaaaaaaaaaaaaaaaaaaaaaaa

SEQ ID NO: 4583 - RNA, 1673 nt, synthetic construct
  misc_feature 1..1673: note = mRNA a-1 (A100) (opt28) from Homo sapiens__NP_000448.3__HNF4A(1-474)(S142E_S143E)
  source 1..1673: mol_type = other RNA
aggagagtcccgcagtcggcgtccagcggctctgcttgttcgtgtgtgtgtcgttgcaggccttattcaagcttaccatgcggctgagcaagaccctggtggacatggatatggcagactactccgccgctctggatccagcatatacaactctggagttcgaaaacgtccaggtgctgaccatgggaaatgacacatctccctcagagggcactaacctgaatgcccctaacagtctgggggtgagcgctctgtgcgcaatctgcggagacagggccaccggcaaacactacggggcttcctcttgtgatggatgcaagggctttttcagacgcagcgtccggaaaaatcatatgtactcatgccgatttagtaggcagtgcgtggtggacaaggacaagagaaaccagtgccgctattgtcggctgaaaaagtgcttcagggcaggaatgaaaaaggaagccgtccagaatgagagagatcgaatttccacacggcgcgaagagtacgaagacagctctctgccaagcatcaacgctctgctgcaggcagaggtgctgtccaggcagatcacttcacccgtgagtgggattaacggcgatatcagagccaagaaaattgcaagcatcgctgacgtctgcgagtctatgaaggaacagctgctggtgctggtggagtgggccaaatacatccctgcattttgcgaactgccactggacgatcaggtcgctctgctgcgggcccacgcaggagagcatctgctgctgggcgctaccaagcgatccatggtgttcaaggacgtgctgctgctggggaatgactatattgtccccaggcactgccctgaactggccgagatgagcagagtgtcaatccgcatcctggatgaactggtgctgccattccaggagctgcagattgacgataacgaatacgcatacctgaaagctatcatctttttcgaccccgacgccaagggactgagtgatcctggcaaaattaagcggctgaggtctcaggtccaggtgtccctggaggactatatcaatgacagacagtacgatagccgagggcggtttggagagctgctgctgctgctgccaacactgcagagcattacctggcagatgatcgaacagatccagttcattaaactgttcggcatggcaaagatcgacaacctgctgcaggagatgctgctgggagggtccccctcagatgcccctcatgctcaccacccactgcatccccacctgatgcaggaacatatgggcactaatgtgatcgtcgcaaacacaatgcctacccacctgtctaatggacagatgtgtgagtggccacgccccaggggccaggccgcaactcctgaaaccccacagcccagtcctccagggggaagcggctccgagccctacaagctgctgcctggagctgtggcaacaattgtgaaaccactgtctgccatcccccagcctaccattactaagcaggaagtcatctgaggactagtccctgttcccagagcccacttttttttctttttttgaaataaaatagcctgtctttcagatctaaaaaaaaaaaaaaaaaaaaaaaaaaaaaaaaaaaaaaaaaaaaaaaaaaaaaaaaaaaaaaaaaaaaaaaaaaaaaaaaaaaaaaaaaaaaaaaaaaaa

SEQ ID NO: 4584 - RNA, 1673 nt, synthetic construct
  misc_feature 1..1673: note = mRNA a-1 (A100) (opt28) from Homo sapiens__NP_000448.3__HNF4A(1-474)(S143A)
  source 1..1673: mol_type = other RNA
aggagagtcccgcagtcggcgtccagcggctctgcttgttcgtgtgtgtgtcgttgcaggccttattcaagcttaccatgcggctgagcaagaccctggtggacatggatatggcagactactccgccgctctggatccagcatatacaactctggagttcgaaaacgtccaggtgctgaccatgggaaatgacacatctccctcagagggcactaacctgaatgcccctaacagtctgggggtgagcgctctgtgcgcaatctgcggagacagggccaccggcaaacactacggggcttcctcttgtgatggatgcaagggctttttcagacgcagcgtccggaaaaatcatatgtactcatgccgatttagtaggcagtgcgtggtggacaaggacaagagaaaccagtgccgctattgtcggctgaaaaagtgcttcagggcaggaatgaaaaaggaagccgtccagaatgagagagatcgaatttccacacggcgcagcgcttacgaagactctagcctgccatccatcaacgcactgctgcaggccgaggtgctgtcaaggcagatcaccagtcccgtgagcgggattaacggcgatatcagagcaaagaaaattgcttctatcgccgacgtctgcgaatccatgaaggagcagctgctggtgctggtggagtgggcaaaatacatccctgctttttgcgaactgccactggacgatcaggtcgccctgctgcgggcacacgctggagagcatctgctgctgggcgccactaagcgaagcatggtgttcaaggacgtgctgctgctggggaatgactatattgtccccaggcactgccctgaactggcagagatgtcaagagtgagtatccgcatcctggatgaactggtgctgccattccaggagctgcagattgacgataacgaatacgcttacctgaaagccatcatctttttcgaccccgacgcaaagggactgtctgatcctggcaaaattaagcggctgaggtcccaggtccaggtgagcctggaggactatatcaatgacagacagtacgatagccgagggcggtttggagaactgctgctgctgctgccaacactgcagtccattacctggcagatgatcgagcagatccagttcattaaactgttcggcatggccaagatcgacaacctgctgcaggagatgctgctgggagggtcaccctctgatgctcctcatgcacaccacccactgcatccccacctgatgcaggaacatatgggcactaatgtgatcgtcgccaacacaatgcctacccacctgagtaatggacagatgtgtgagtggccacgccccaggggccaggcagctactcctgaaaccccacagcccagccctccagggggatccggctctgagccctacaagctgctgcctggagcagtggccacaattgtgaaaccactgagcgctatcccccagcctaccattactaagcaggaagtcatctgaggactagtccctgttcccagagcccacttttttttctttttttgaaataaaatagcctgtctttcagatctaaaaaaaaaaaaaaaaaaaaaaaaaaaaaaaaaaaaaaaaaaaaaaaaaaaaaaaaaaaaaaaaaaaaaaaaaaaaaaaaaaaaaaaaaaaaaaaaaaaa

SEQ ID NO: 4585 - RNA, 1673 nt, synthetic construct
  misc_feature 1..1673: note = mRNA a-1 (A100) (opt28) from Homo sapiens__NP_000448.3__HNF4A(1-474)(T166A)
  source 1..1673: mol_type = other RNA
aggagagtcccgcagtcggcgtccagcggctctgcttgttcgtgtgtgtgtcgttgcaggccttattcaagcttaccatgcggctgagcaagaccctggtggacatggatatggcagactactccgccgctctggatccagcatatacaactctggagttcgaaaacgtccaggtgctgaccatgggaaatgacacatctccctcagagggcactaacctgaatgcccctaacagtctgggggtgagcgctctgtgcgcaatctgcggagacagggccaccggcaaacactacggggcttcctcttgtgatggatgcaagggctttttcagacgcagcgtccggaaaaatcatatgtactcatgccgatttagtaggcagtgcgtggtggacaaggacaagagaaaccagtgccgctattgtcggctgaaaaagtgcttcagggcaggaatgaaaaaggaagccgtccagaatgagagagatcgaatttccacacggcgcagctcttacgaagacagctccctgccatcaatcaacgctctgctgcaggcagaggtgctgagtaggcagatcgccagccccgtgtctgggattaacggcgatatcagagcaaagaaaattgcttccatcgccgacgtctgcgaaagcatgaaggagcagctgctggtgctggtggagtgggcaaaatacatccctgctttttgcgaactgccactggacgatcaggtcgccctgctgcgggcacacgctggagagcatctgctgctgggcgccactaagcgatcaatggtgttcaaggacgtgctgctgctggggaatgactatattgtccccaggcactgccctgaactggcagagatgagtagagtgtctatccgcatcctggatgaactggtgctgccattccaggagctgcagattgacgataacgaatacgcttacctgaaagccatcatctttttcgaccccgacgcaaagggactgtccgatcctggcaaaattaagcggctgaggagccaggtccaggtgagcctggaggactatatcaatgacagacagtacgattcccgagggcggtttggagaactgctgctgctgctgccaaccctgcagtcaattacatggcagatgatcgagcagatccagttcattaaactgttcggcatggccaagatcgacaacctgctgcaggagatgctgctgggagggtctcccagtgatgctcctcatgcacaccacccactgcatccccacctgatgcaggaacatatgggcaccaatgtgatcgtcgccaacactatgcctacacacctgagcaatggacagatgtgtgagtggccacgccccaggggccaggcagctacccctgaaactccacagccctcccctccagggggatctggcagcgagccctacaagctgctgcctggagcagtggccaccattgtgaaaccactgtcagctatcccccagcctacaattaccaagcaggaagtcatctgaggactagtccctgttcccagagcccacttttttttctttttttgaaataaaatagcctgtctttcagatctaaaaaaaaaaaaaaaaaaaaaaaaaaaaaaaaaaaaaaaaaaaaaaaaaaaaaaaaaaaaaaaaaaaaaaaaaaaaaaaaaaaaaaaaaaaaaaaaaaaa

SEQ ID NO: 4586 - RNA, 1673 nt, synthetic construct
  misc_feature 1..1673: note = mRNA a-1 (A100) (opt28) from Homo sapiens__NP_000448.3__HNF4A(1-474)(S167E)
  source 1..1673: mol_type = other RNA
aggagagtcccgcagtcggcgtccagcggctctgcttgttcgtgtgtgtgtcgttgcaggccttattcaagcttaccatgcggctgagcaagaccctggtggacatggatatggcagactactccgccgctctggatccagcatatacaactctggagttcgaaaacgtccaggtgctgaccatgggaaatgacacatctccctcagagggcactaacctgaatgcccctaacagtctgggggtgagcgctctgtgcgcaatctgcggagacagggccaccggcaaacactacggggcttcctcttgtgatggatgcaagggctttttcagacgcagcgtccggaaaaatcatatgtactcatgccgatttagtaggcagtgcgtggtggacaaggacaagagaaaccagtgccgctattgtcggctgaaaaagtgcttcagggcaggaatgaaaaaggaagccgtccagaatgagagagatcgaatttccacacggcgcagctcttacgaagacagctccctgccatcaatcaacgctctgctgcaggcagaggtgctgagtaggcagatcactgaacccgtgagcgggattaacggcgatatcagagccaagaaaattgcatctatcgctgacgtctgcgagtccatgaaggagcagctgctggtgctggtggaatgggccaaatacatccctgcattttgcgagctgccactggacgatcaggtcgctctgctgcgggcccacgcaggagaacatctgctgctgggcgctaccaagcgaagcatggtgttcaaggacgtgctgctgctggggaatgactatattgtccccaggcactgccctgagctggccgaaatgtcaagagtgagtatccgcatcctggatgagctggtgctgccattccaggaactgcagattgacgataacgagtacgcatacctgaaagctatcatctttttcgaccccgacgccaagggactgtctgatcctggcaaaattaagcggctgaggtcccaggtccaggtgagcctggaagactatatcaatgacagacagtacgatagccgagggcggtttggagagctgctgctgctgctgccaacactgcagtccattacctggcagatgatcgagcagatccagttcattaaactgttcggcatggcaaagatcgacaacctgctgcaggaaatgctgctgggagggtcaccctctgatgcccctcatgctcaccacccactgcatccccacctgatgcaggagcatatgggcactaatgtgatcgtcgcaaacacaatgcctacccacctgagtaatggacagatgtgtgaatggccacgccccaggggccaggccgcaactcctgagaccccacagcccagccctccagggggatccggctctgaaccctacaagctgctgcctggagctgtggcaacaattgtgaaaccactgagcgccatcccccagcctaccattactaagcaggaggtcatctgaggactagtccctgttcccagagcccacttttttttctttttttgaaataaaatagcctgtctttcagatctaaaaaaaaaaaaaaaaaaaaaaaaaaaaaaaaaaaaaaaaaaaaaaaaaaaaaaaaaaaaaaaaaaaaaaaaaaaaaaaaaaaaaaaaaaaaaaaaaaaa

SEQ ID NO: 4587 - RNA, 1673 nt, synthetic construct
  misc_feature 1..1673: note = mRNA a-1 (A100) (opt28) from Homo sapiens__NP_000448.3__HNF4A(1-474)(S167A)
  source 1..1673: mol_type = other RNA
aggagagtcccgcagtcggcgtccagcggctctgcttgttcgtgtgtgtgtcgttgcaggccttattcaagcttaccatgcggctgagcaagaccctggtggacatggatatggcagactactccgccgctctggatccagcatatacaactctggagttcgaaaacgtccaggtgctgaccatgggaaatgacacatctccctcagagggcactaacctgaatgcccctaacagtctgggggtgagcgctctgtgcgcaatctgcggagacagggccaccggcaaacactacggggcttcctcttgtgatggatgcaagggctttttcagacgcagcgtccggaaaaatcatatgtactcatgccgatttagtaggcagtgcgtggtggacaaggacaagagaaaccagtgccgctattgtcggctgaaaaagtgcttcagggcaggaatgaaaaaggaagccgtccagaatgagagagatcgaatttccacacggcgcagctcttacgaagacagctccctgccatcaatcaacgctctgctgcaggcagaggtgctgagtaggcagatcactgcccccgtgagcgggattaacggcgatatcagagcaaagaaaattgcttctatcgccgacgtctgcgaatccatgaaggagcagctgctggtgctggtggagtgggcaaaatacatccctgctttttgcgaactgccactggacgatcaggtcgccctgctgcgggcacacgctggagagcatctgctgctgggcgccaccaagcgaagcatggtgttcaaggacgtgctgctgctggggaatgactatattgtccccaggcactgccctgaactggcagagatgtcaagagtgagtatccgcatcctggatgaactggtgctgccattccaggagctgcagattgacgataacgaatacgcttacctgaaagccatcatctttttcgaccccgacgcaaagggactgtctgatcctggcaaaattaagcggctgaggtcccaggtccaggtgagcctggaggactatatcaatgacagacagtacgatagccgagggcggtttggagaactgctgctgctgctgccaacactgcagtccattacctggcagatgatcgagcagatccagttcattaaactgttcggcatggccaagatcgacaacctgctgcaggagatgctgctgggagggtcaccctctgatgctcctcatgcacaccacccactgcatccccacctgatgcaggaacatatgggcactaatgtgatcgtcgccaacacaatgcctacccacctgagtaatggacagatgtgtgagtggccacgccccaggggccaggcagctactcctgaaaccccacagcccagccctccagggggatccggctctgagccctacaagctgctgcctggagcagtggccacaattgtgaaaccactgagcgctatcccccagcctaccattactaagcaggaagtcatctgaggactagtccctgttcccagagcccacttttttttctttttttgaaataaaatagcctgtctttcagatctaaaaaaaaaaaaaaaaaaaaaaaaaaaaaaaaaaaaaaaaaaaaaaaaaaaaaaaaaaaaaaaaaaaaaaaaaaaaaaaaaaaaaaaaaaaaaaaaaaaa

SEQ ID NO: 4588 - RNA, 1673 nt, synthetic construct
  misc_feature 1..1673: note = mRNA a-1 (A100) (opt28) from Homo sapiens__NP_000448.3__HNF4A(1-474)(S167A_S378A_T429A_T432A_ S436A)
  source 1..1673: mol_type = other RNA
aggagagtcccgcagtcggcgtccagcggctctgcttgttcgtgtgtgtgtcgttgcaggccttattcaagcttaccatgcggctgagcaagaccctggtggacatggatatggcagactactccgccgctctggatccagcatatacaactctggagttcgaaaacgtccaggtgctgaccatgggaaatgacacatctccctcagagggcactaacctgaatgcccctaacagtctgggggtgagcgctctgtgcgcaatctgcggagacagggccaccggcaaacactacggggcttcctcttgtgatggatgcaagggctttttcagacgcagcgtccggaaaaatcatatgtactcatgccgatttagtaggcagtgcgtggtggacaaggacaagagaaaccagtgccgctattgtcggctgaaaaagtgcttcagggcaggaatgaaaaaggaagccgtccagaatgagagagatcgaatttccacacggcgcagctcttacgaagacagctccctgccatcaatcaacgctctgctgcaggcagaggtgctgagtaggcagatcactgcccccgtgagcgggattaacggcgatatcagagcaaagaaaattgcttctatcgccgacgtctgcgaatccatgaaggagcagctgctggtgctggtggagtgggcaaaatacatccctgctttttgcgaactgccactggacgatcaggtcgccctgctgcgggcacacgctggagagcatctgctgctgggcgccaccaagcgaagcatggtgttcaaggacgtgctgctgctggggaatgactatattgtccccaggcactgccctgaactggcagagatgtcaagagtgagtatccgcatcctggatgaactggtgctgccattccaggagctgcagattgacgataacgaatacgcttacctgaaagccatcatctttttcgaccccgacgcaaagggactgtctgatcctggcaaaattaagcggctgaggtcccaggtccaggtgagcctggaggactatatcaatgacagacagtacgatagccgagggcggtttggagaactgctgctgctgctgccaacactgcagtccattacctggcagatgatcgagcagatccagttcattaaactgttcggcatggccaagatcgacaacctgctgcaggagatgctgctgggaggggctccctcagatgcacctcatgcccaccacccactgcatccccacctgatgcaggaacatatgggcactaatgtgatcgtcgcaaacacaatgcctacccacctgtctaatggacagatgtgtgagtggccacgccccaggggccaggctgcagcccctgaagctccacagcccgcacctccagggggaagtggcagcgagccctacaagctgctgcctggagccgtggctactattgtgaaaccactgtccgcaatcccccagcctaccattacaaagcaggaagtcatctgaggactagtccctgttcccagagcccacttttttttctttttttgaaataaaatagcctgtctttcagatctaaaaaaaaaaaaaaaaaaaaaaaaaaaaaaaaaaaaaaaaaaaaaaaaaaaaaaaaaaaaaaaaaaaaaaaaaaaaaaaaaaaaaaaaaaaaaaaaaaaa

SEQ ID NO: 4589 - RNA, 1673 nt, synthetic construct
  misc_feature 1..1673: note = mRNA a-1 (A100) (opt28) from Homo sapiens__NP_000448.3__HNF4A(1-474)(S167E_S378E_T429E_T432E_ S436E)
  source 1..1673: mol_type = other RNA
aggagagtcccgcagtcggcgtccagcggctctgcttgttcgtgtgtgtgtcgttgcaggccttattcaagcttaccatgcggctgagcaagaccctggtggacatggatatggcagactactccgccgctctggatccagcatatacaactctggagttcgaaaacgtccaggtgctgaccatgggaaatgacacatctccctcagagggcactaacctgaatgcccctaacagtctgggggtgagcgctctgtgcgcaatctgcggagacagggccaccggcaaacactacggggcttcctcttgtgatggatgcaagggctttttcagacgcagcgtccggaaaaatcatatgtactcatgccgatttagtaggcagtgcgtggtggacaaggacaagagaaaccagtgccgctattgtcggctgaaaaagtgcttcagggcaggaatgaaaaaggaagccgtccagaatgagagagatcgaatttccacacggcgcagctcttacgaagacagctccctgccatcaatcaacgctctgctgcaggcagaggtgctgagtaggcagatcactgaacccgtgagcgggattaacggcgatatcagagccaagaaaattgcatctatcgctgacgtctgcgagtccatgaaggagcagctgctggtgctggtggaatgggccaaatacatccctgcattttgcgagctgccactggacgatcaggtcgctctgctgcgggcccacgcaggagaacatctgctgctgggcgctaccaagcgaagcatggtgttcaaggacgtgctgctgctggggaatgactatattgtccccaggcactgccctgagctggccgaaatgtcaagagtgagtatccgcatcctggatgagctggtgctgccattccaggaactgcagattgacgataacgagtacgcatacctgaaagctatcatctttttcgaccccgacgccaagggactgtctgatcctggcaaaattaagcggctgaggtcccaggtccaggtgagcctggaagactatatcaatgacagacagtacgatagccgagggcggtttggagagctgctgctgctgctgccaacactgcagtccattacctggcagatgatcgagcagatccagttcattaaactgttcggcatggcaaagatcgacaacctgctgcaggaaatgctgctgggaggggagccctcagatgcccctcatgctcaccacccactgcatccccacctgatgcaggaacatatgggcactaatgtgatcgtcgcaaacacaatgcctacccacctgtctaatggacagatgtgtgagtggccacgccccaggggccaggccgcagaacctgaggaaccacagcccgagcctccagggggaagtggcagcgagccctacaagctgctgcctggagctgtggcaactattgtgaaaccactgtccgccatcccccagcctaccattacaaagcaggaagtcatctgaggactagtccctgttcccagagcccacttttttttctttttttgaaataaaatagcctgtctttcagatctaaaaaaaaaaaaaaaaaaaaaaaaaaaaaaaaaaaaaaaaaaaaaaaaaaaaaaaaaaaaaaaaaaaaaaaaaaaaaaaaaaaaaaaaaaaaaaaaaaaa

SEQ ID NO: 4590 - RNA, 1673 nt, synthetic construct
  misc_feature 1..1673: note = mRNA a-1 (A100) (opt28) from Homo sapiens__NP_000448.3__HNF4A(1-474)(S87A)
  source 1..1673: mol_type = other RNA
aggagagtcccgcagtcggcgtccagcggctctgcttgttcgtgtgtgtgtcgttgcaggccttattcaagcttaccatgcggctgagcaagaccctggtggacatggatatggcagactactccgccgctctggatccagcatatacaactctggagttcgaaaacgtccaggtgctgaccatgggaaatgacacatctccctcagagggcactaacctgaatgcccctaacagtctgggggtgagcgctctgtgcgcaatctgcggagacagggccaccggcaaacactacggggcttcctcttgtgatggatgcaagggctttttcagacgcgcagtccggaaaaatcatatgtacagctgccgattttcaaggcagtgcgtggtggacaaggacaagagaaaccagtgccgctattgtcggctgaaaaagtgcttcagggccggaatgaaaaaggaagctgtccagaatgagagagatcgaattagtacacggcgctccagctacgaagactctagcctgccatccatcaacgcactgctgcaggccgaggtgctgtcaaggcagatcaccagtcccgtgagcgggattaacggcgatatcagagcaaagaaaattgcttctatcgccgacgtctgcgaatccatgaaggagcagctgctggtgctggtggagtgggcaaaatacatccctgctttttgcgaactgccactggacgatcaggtcgccctgctgcgggcacacgctggagagcatctgctgctgggcgccactaagcgaagcatggtgttcaaggacgtgctgctgctggggaatgactatattgtccccaggcactgccctgaactggcagagatgtcaagagtgagtatccgcatcctggatgaactggtgctgccattccaggagctgcagattgacgataacgaatacgcttacctgaaagccatcatctttttcgaccccgacgcaaagggactgtctgatcctggcaaaattaagcggctgaggtcccaggtccaggtgagcctggaggactatatcaatgacagacagtacgatagccgagggcggtttggagaactgctgctgctgctgccaacactgcagtccattacctggcagatgatcgagcagatccagttcattaaactgttcggcatggccaagatcgacaacctgctgcaggagatgctgctgggagggtcaccctctgatgctcctcatgcacaccacccactgcatccccacctgatgcaggaacatatgggcactaatgtgatcgtcgccaacacaatgcctacccacctgagtaatggacagatgtgtgagtggccacgccccaggggccaggcagctactcctgaaaccccacagcccagccctccagggggatccggctctgagccctacaagctgctgcctggagcagtggccacaattgtgaaaccactgagcgctatcccccagcctaccattactaagcaggaagtcatctgaggactagtccctgttcccagagcccacttttttttctttttttgaaataaaatagcctgtctttcagatctaaaaaaaaaaaaaaaaaaaaaaaaaaaaaaaaaaaaaaaaaaaaaaaaaaaaaaaaaaaaaaaaaaaaaaaaaaaaaaaaaaaaaaaaaaaaaaaaaaaa

SEQ ID NO: 4591 - RNA, 1673 nt, synthetic construct
  misc_feature 1..1673: note = mRNA a-1 (A100) (opt28) from Homo sapiens__NP_000448.3__HNF4A(1-474)(S87E)
  source 1..1673: mol_type = other RNA
aggagagtcccgcagtcggcgtccagcggctctgcttgttcgtgtgtgtgtcgttgcaggccttattcaagcttaccatgcggctgagcaagaccctggtggacatggatatggcagactactccgccgctctggatccagcatatacaactctggagttcgaaaacgtccaggtgctgaccatgggaaatgacacatctccctcagagggcactaacctgaatgcccctaacagtctgggggtgagcgctctgtgcgcaatctgcggagacagggccaccggcaaacactacggggcttcctcttgtgatggatgcaagggctttttcagacgcgaagtccggaaaaatcatatgtacagctgccgattttcaaggcagtgcgtggtggacaaggacaagagaaaccagtgccgctattgtcggctgaaaaagtgcttcagggcaggaatgaaaaaggaggccgtccagaatgaaagagatcgaattagtacacggcgctccagctacgaggactctagcctgccatccatcaacgctctgctgcaggcagaagtgctgtcaaggcagatcaccagtcccgtgagcgggattaacggcgatatcagagccaagaaaattgcatctatcgctgacgtctgcgagtccatgaaggagcagctgctggtgctggtggaatgggccaaatacatccctgcattttgcgagctgccactggacgatcaggtcgctctgctgcgggcccacgcaggagaacatctgctgctgggcgctactaagcgaagcatggtgttcaaggacgtgctgctgctggggaatgactatattgtccccaggcactgccctgagctggccgaaatgtcaagagtgagtatccgcatcctggatgagctggtgctgccattccaggaactgcagattgacgataacgagtacgcatacctgaaagctatcatctttttcgaccccgacgccaagggactgtctgatcctggcaaaattaagcggctgaggtcccaggtccaggtgagcctggaagactatatcaatgacagacagtacgatagccgagggcggtttggagagctgctgctgctgctgccaacactgcagtccattacctggcagatgatcgagcagatccagttcattaaactgttcggcatggcaaagatcgacaacctgctgcaggaaatgctgctgggagggtcaccctctgatgcccctcatgctcaccacccactgcatccccacctgatgcaggagcatatgggcactaatgtgatcgtcgcaaacacaatgcctacccacctgagtaatggacagatgtgtgaatggccacgccccaggggccaggccgcaactcctgagaccccacagcccagccctccagggggatccggctctgaaccctacaagctgctgcctggagctgtggcaacaattgtgaaaccactgagcgccatcccccagcctaccattactaagcaggaggtcatctgaggactagtccctgttcccagagcccacttttttttctttttttgaaataaaatagcctgtctttcagatctaaaaaaaaaaaaaaaaaaaaaaaaaaaaaaaaaaaaaaaaaaaaaaaaaaaaaaaaaaaaaaaaaaaaaaaaaaaaaaaaaaaaaaaaaaaaaaaaaaaa

SEQ ID NO: 4592 - RNA, 1673 nt, synthetic construct
  misc_feature 1..1673: note = mRNA a-1 (A100) (opt28) from Homo sapiens__NP_000448.3__HNF4A(1-474)(R2V)
  source 1..1673: mol_type = other RNA
aggagagtcccgcagtcggcgtccagcggctctgcttgttcgtgtgtgtgtcgttgcaggccttattcaagcttaccatggtgctgagcaagaccctggtcgacatggatatggcagactactccgccgctctggatccagcatatacaactctggagttcgaaaacgtccaggtgctgaccatgggaaatgacacatctccctcagagggcactaacctgaatgcccctaacagtctgggggtgagcgctctgtgcgcaatctgcggagaccgggccaccggcaaacactacggggcttcctcttgtgatggatgcaagggctttttcaggagaagcgtgcgcaaaaatcatatgtactcatgccgatttagtcggcagtgcgtggtcgacaaggacaagaggaaccagtgcagatattgtcgcctgaaaaagtgcttccgggcaggaatgaaaaaggaagccgtgcagaatgagagggatagaatttccacacgacggagctcttacgaagacagctccctgccatcaatcaacgctctgctgcaggcagaggtgctgagtcgccagatcactagccccgtctctgggattaacggcgatatcagggccaagaaaattgcatccatcgctgacgtgtgcgaaagcatgaaggagcagctgctggtgctggtcgagtgggccaaatacatccctgcattttgcgaactgccactggacgatcaggtggctctgctgagagcccacgcaggagagcatctgctgctgggcgctaccaagcggtcaatggtgttcaaggacgtcctgctgctggggaatgactatattgtgccccgacactgccctgaactggccgagatgagtagggtgtctatcagaatcctggatgaactggtcctgccattccaggagctgcagattgacgataacgaatacgcatacctgaaagctatcatctttttcgaccccgacgccaagggactgtccgatcctggcaaaattaagcgcctgcggagccaggtccaggtgagcctggaggactatatcaatgacaggcagtacgattccagagggcgatttggagaactgctgctgctgctgccaacactgcagtcaattacctggcagatgatcgagcagatccagttcattaaactgttcggcatggcaaagatcgacaacctgctgcaggagatgctgctgggagggtctcccagtgatgcccctcatgctcaccacccactgcatccccacctgatgcaggaacatatgggcactaatgtgatcgtggcaaacacaatgcctacccacctgagcaatggacagatgtgtgagtggccacggccccgcggccaggccgcaactcctgaaaccccacagccctcccctccagggggatctggcagcgagccctacaagctgctgcctggagctgtggcaacaattgtcaaaccactgtcagccatcccccagcctaccattactaagcaggaagtgatctgaggactagtccctgttcccagagcccacttttttttctttttttgaaataaaatagcctgtctttcagatctaaaaaaaaaaaaaaaaaaaaaaaaaaaaaaaaaaaaaaaaaaaaaaaaaaaaaaaaaaaaaaaaaaaaaaaaaaaaaaaaaaaaaaaaaaaaaaaaaaaa

SEQ ID NO: 4593 - RNA, 1673 nt, synthetic construct
  misc_feature 1..1673: note = mRNA a-1 (A100) (opt28) from Homo sapiens__NP_000448.3__HNF4A(1-474)(R2V_K5V)
  source 1..1673: mol_type = other RNA
aggagagtcccgcagtcggcgtccagcggctctgcttgttcgtgtgtgtgtcgttgcaggccttattcaagcttaccatggtgctgagcgtcaccctggtggacatggatatggcagactactccgccgctctggatccagcatatacaactctggagttcgaaaacgtgcaggtcctgaccatgggaaatgacacatctccctcagagggcactaacctgaatgcccctaacagtctgggggtgagcgctctgtgcgcaatctgcggagaccgggccaccggcaagcactacggggcttcctcttgtgatggatgcaaaggctttttcaggagaagcgtgcgcaagaatcatatgtactcatgccgatttagtcggcagtgcgtcgtggacaaagacaagaggaaccagtgcagatattgtcgcctgaagaaatgcttccgggcaggaatgaagaaagaagccgtgcagaatgagagggatagaatttccacacgacggagctcttacgaagacagctccctgccatcaatcaacgctctgctgcaggcagaggtcctgagtcgccagatcactagccccgtgtctgggattaacggcgatatcagggccaagaagattgcatccatcgctgacgtgtgcgaaagcatgaaagagcagctgctggtcctggtggagtgggccaagtacatccctgcattttgcgaactgccactggacgatcaggtggctctgctgagagcccacgcaggagagcatctgctgctgggcgctaccaaacggtcaatggtcttcaaggacgtgctgctgctggggaatgactatattgtgccccgacactgccctgaactggccgagatgagtagggtctctatcagaatcctggatgaactggtgctgccattccaggagctgcagattgacgataacgaatacgcatacctgaaggctatcatctttttcgaccccgacgccaaaggactgtccgatcctggcaagattaaacgcctgcggagccaggtgcaggtcagcctggaggactatatcaatgacaggcagtacgattccagagggcgatttggagaactgctgctgctgctgccaacactgcagtcaattacctggcagatgatcgagcagatccagttcattaagctgttcggcatggcaaaaatcgacaacctgctgcaggagatgctgctgggagggtctcccagtgatgcccctcatgctcaccacccactgcatccccacctgatgcaggaacatatgggcactaatgtgatcgtggcaaacacaatgcctacccacctgagcaatggacagatgtgtgagtggccacggccccgcggccaggccgcaactcctgaaaccccacagccctcccctccagggggatctggcagcgagccctacaagctgctgcctggagctgtcgcaacaattgtgaagccactgtcagccatcccccagcctaccattactaaacaggaagtcatctgaggactagtccctgttcccagagcccacttttttttctttttttgaaataaaatagcctgtctttcagatctaaaaaaaaaaaaaaaaaaaaaaaaaaaaaaaaaaaaaaaaaaaaaaaaaaaaaaaaaaaaaaaaaaaaaaaaaaaaaaaaaaaaaaaaaaaaaaaaaaaa

SEQ ID NO: 4594 - RNA, 1673 nt, synthetic construct
  misc_feature 1..1673: note = mRNA a-1 (A100) (opt28) from Homo sapiens__NP_000448.3__HNF4A(1-474)(K179R_K180R)
  source 1..1673: mol_type = other RNA
aggagagtcccgcagtcggcgtccagcggctctgcttgttcgtgtgtgtgtcgttgcaggccttattcaagcttaccatgcggctgagcaagaccctggtggacatggatatggcagactactccgccgctctggatccagcatatacaactctggagttcgaaaacgtccaggtgctgaccatgggaaatgacacatctccctcagagggcactaacctgaatgcccctaacagtctgggggtgagcgctctgtgcgcaatctgcggagacagggccaccggcaaacactacggggcttcctcttgtgatggatgcaagggctttttcagacgcagcgtccggaaaaatcatatgtactcatgccgatttagtaggcagtgcgtggtggacaaggacaagagaaaccagtgccgctattgtcggctgaaaaagtgcttcagggcaggaatgaaaaaggaagccgtccagaatgagagagatcgaatttccacacggcgcagctcttacgaagacagctccctgccatcaatcaacgctctgctgcaggcagaggtgctgagtaggcagatcactagccccgtgtctgggattaacggcgatatcagagcccggcgaattgcatccatcgctgacgtctgcgaaagcatgaaggagcagctgctggtgctggtggagtgggccaaatacatccctgcattttgcgaactgccactggacgatcaggtcgctctgctgagggcccacgcaggagagcatctgctgctgggcgctaccaagagatcaatggtgttcaaagacgtgctgctgctggggaatgactatattgtcccccgccactgccctgaactggccgagatgagtcgggtgtctatcaggatcctggatgaactggtgctgccattccaggagctgcagattgacgataacgaatacgcatacctgaaggctatcatctttttcgaccccgacgccaagggactgtccgatcctggcaaaattaagagactgcgaagccaggtccaggtgagcctggaggactatatcaatgaccggcagtacgattcccgcgggaggtttggagaactgctgctgctgctgccaacactgcagtcaattacctggcagatgatcgagcagatccagttcattaaactgttcggcatggcaaagatcgacaacctgctgcaggagatgctgctgggagggtctcccagtgatgcccctcatgctcaccacccactgcatccccacctgatgcaggaacatatgggcactaatgtgatcgtcgcaaacacaatgcctacccacctgagcaatggacagatgtgtgagtggccaagaccccggggccaggccgcaactcctgaaaccccacagccctcccctccagggggatctggcagcgagccctacaaactgctgcctggagctgtggcaacaattgtgaagccactgtcagccatcccccagcctaccattactaagcaggaagtcatctgaggactagtccctgttcccagagcccacttttttttctttttttgaaataaaatagcctgtctttcagatctaaaaaaaaaaaaaaaaaaaaaaaaaaaaaaaaaaaaaaaaaaaaaaaaaaaaaaaaaaaaaaaaaaaaaaaaaaaaaaaaaaaaaaaaaaaaaaaaaaaa

SEQ ID NO: 4595 - RNA, 1673 nt, synthetic construct
  misc_feature 1..1673: note = mRNA a-1 (A100) (opt28) from Homo sapiens__NP_000448.3__HNF4A(1-474)(K234R)
  source 1..1673: mol_type = other RNA
aggagagtcccgcagtcggcgtccagcggctctgcttgttcgtgtgtgtgtcgttgcaggccttattcaagcttaccatgcggctgagcaagaccctggtggacatggatatggcagactactccgccgctctggatccagcatatacaactctggagttcgaaaacgtccaggtgctgaccatgggaaatgacacatctccctcagagggcactaacctgaatgcccctaacagtctgggggtgagcgctctgtgcgcaatctgcggagacagggccaccggcaaacactacggggcttcctcttgtgatggatgcaagggctttttcagacgcagcgtccggaaaaatcatatgtactcatgccgatttagtaggcagtgcgtggtggacaaggacaagagaaaccagtgccgctattgtcggctgaaaaagtgcttcagggcaggaatgaaaaaggaagccgtccagaatgagagagatcgaatttccacacggcgcagctcttacgaagacagctccctgccatcaatcaacgctctgctgcaggcagaggtgctgagtaggcagatcactagccccgtgtctgggattaacggcgatatcagagccaagaaaattgcatccatcgctgacgtctgcgaaagcatgaaggagcagctgctggtgctggtggagtgggccaaatacatccctgcattttgcgaactgccactggacgatcaggtcgctctgctgcgggcccacgcaggagagcatctgctgctgggcgctacccgaaggtcaatggtgttcaaggacgtgctgctgctggggaatgactatattgtccccagacactgccctgaactggccgagatgagtcgcgtgtctatccggatcctggatgaactggtgctgccattccaggagctgcagattgacgataacgaatacgcatacctgaaggctatcatctttttcgaccccgacgccaaaggactgtccgatcctggcaagattaaaaggctgagaagccaggtccaggtgagcctggaggactatatcaatgaccgacagtacgattcccgggggcgctttggagaactgctgctgctgctgccaacactgcagtcaattacctggcagatgatcgagcagatccagttcattaagctgttcggcatggcaaaaatcgacaacctgctgcaggagatgctgctgggagggtctcccagtgatgcccctcatgctcaccacccactgcatccccacctgatgcaggaacatatgggcactaatgtgatcgtcgcaaacacaatgcctacccacctgagcaatggacagatgtgtgagtggccaaggcccagaggccaggccgcaactcctgaaaccccacagccctcccctccagggggatctggcagcgagccctacaagctgctgcctggagctgtggcaacaattgtgaagccactgtcagccatcccccagcctaccattactaaacaggaagtcatctgaggactagtccctgttcccagagcccacttttttttctttttttgaaataaaatagcctgtctttcagatctaaaaaaaaaaaaaaaaaaaaaaaaaaaaaaaaaaaaaaaaaaaaaaaaaaaaaaaaaaaaaaaaaaaaaaaaaaaaaaaaaaaaaaaaaaaaaaaaaaaa

SEQ ID NO: 4596 - RNA, 1673 nt, synthetic construct
  misc_feature 1..1673: note = mRNA a-1 (A100) (opt28) from Homo sapiens__NP_000448.3__HNF4A(1-474)(K300R)
  source 1..1673: mol_type = other RNA
aggagagtcccgcagtcggcgtccagcggctctgcttgttcgtgtgtgtgtcgttgcaggccttattcaagcttaccatgcggctgagcaagaccctggtggacatggatatggcagactactccgccgctctggatccagcatatacaactctggagttcgaaaacgtccaggtgctgaccatgggaaatgacacatctccctcagagggcactaacctgaatgcccctaacagtctgggggtgagcgctctgtgcgcaatctgcggagacagggccaccggcaaacactacggggcttcctcttgtgatggatgcaagggctttttcagacgcagcgtccggaaaaatcatatgtactcatgccgatttagtaggcagtgcgtggtggacaaggacaagagaaaccagtgccgctattgtcggctgaaaaagtgcttcagggcaggaatgaaaaaggaagccgtccagaatgagagagatcgaatttccacacggcgcagctcttacgaagacagctccctgccatcaatcaacgctctgctgcaggcagaggtgctgagtaggcagatcactagccccgtgtctgggattaacggcgatatcagagccaagaaaattgcatccatcgctgacgtctgcgaaagcatgaaggagcagctgctggtgctggtggagtgggccaaatacatccctgcattttgcgaactgccactggacgatcaggtcgctctgctgcgggcccacgcaggagagcatctgctgctgggcgctaccaagcgatcaatggtgttcaaggacgtgctgctgctggggaatgactatattgtccccaggcactgccctgaactggccgagatgagtagagtgtctatccgcatcctggatgaactggtgctgccattccaggagctgcagattgacgataacgaatacgcatacctgaaagctatcatctttttcgaccccgacgcccggggactgtccgatcctggcaagattaaaaggctgagaagccaggtccaggtgagcctggaggactatatcaatgaccgacagtacgattcccgggggcgctttggagaactgctgctgctgctgccaacactgcagtcaattacctggcagatgatcgagcagatccagttcattaagctgttcggcatggcaaaaatcgacaacctgctgcaggagatgctgctgggagggtctcccagtgatgcccctcatgctcaccacccactgcatccccacctgatgcaggaacatatgggcactaatgtgatcgtcgcaaacacaatgcctacccacctgagcaatggacagatgtgtgagtggccaaggcccagaggccaggccgcaactcctgaaaccccacagccctcccctccagggggatctggcagcgagccctacaagctgctgcctggagctgtggcaacaattgtgaagccactgtcagccatcccccagcctaccattactaaacaggaagtcatctgaggactagtccctgttcccagagcccacttttttttctttttttgaaataaaatagcctgtctttcagatctaaaaaaaaaaaaaaaaaaaaaaaaaaaaaaaaaaaaaaaaaaaaaaaaaaaaaaaaaaaaaaaaaaaaaaaaaaaaaaaaaaaaaaaaaaaaaaaaaaaa

SEQ ID NO: 4597 - RNA, 1673 nt, synthetic construct
  misc_feature 1..1673: note = mRNA a-1 (A100) (opt28) from Homo sapiens__NP_000448.3__HNF4A(1-474)(K300R_K307R_K309R)
  source 1..1673: mol_type = other RNA
aggagagtcccgcagtcggcgtccagcggctctgcttgttcgtgtgtgtgtcgttgcaggccttattcaagcttaccatgcggctgagcaagaccctggtggacatggatatggcagactactccgccgctctggatccagcatatacaactctggagttcgaaaacgtccaggtgctgaccatgggaaatgacacatctccctcagagggcactaacctgaatgcccctaacagtctgggggtgagcgctctgtgcgcaatctgcggagacagggccaccggcaaacactacggggcttcctcttgtgatggatgcaagggctttttcagacgcagcgtccggaaaaatcatatgtactcatgccgatttagtaggcagtgcgtggtggacaaggacaagagaaaccagtgccgctattgtcggctgaaaaagtgcttcagggcaggaatgaaaaaggaagccgtccagaatgagagagatcgaatttccacacggcgcagctcttacgaagacagctccctgccatcaatcaacgctctgctgcaggcagaggtgctgagtaggcagatcactagccccgtgtctgggattaacggcgatatcagagccaagaaaattgcatccatcgctgacgtctgcgaaagcatgaaggagcagctgctggtgctggtggagtgggccaaatacatccctgcattttgcgaactgccactggacgatcaggtcgctctgctgcgggcccacgcaggagagcatctgctgctgggcgctaccaagcgatcaatggtgttcaaggacgtgctgctgctggggaatgactatattgtccccaggcactgccctgaactggccgagatgagtagagtgtctatccgcatcctggatgaactggtgctgccattccaggagctgcagattgacgataacgaatacgcatacctgaaagctatcatctttttcgaccccgacgcccggggactgtccgatcctggcaggattagacgactgcggagccaggtccaggtgagcctggaggactatatcaatgaccgccagtacgattccagggggagatttggagaactgctgctgctgctgccaacactgcagtcaattacctggcagatgatcgagcagatccagttcattaagctgttcggcatggcaaaaatcgacaacctgctgcaggagatgctgctgggagggtctcccagtgatgcccctcatgctcaccacccactgcatccccacctgatgcaggaacatatgggcactaatgtgatcgtcgcaaacacaatgcctacccacctgagcaatggacagatgtgtgagtggccacggccccgcggccaggccgcaactcctgaaaccccacagccctcccctccagggggatctggcagcgagccctacaagctgctgcctggagctgtggcaacaattgtgaaaccactgtcagccatcccccagcctaccattactaagcaggaagtcatctgaggactagtccctgttcccagagcccacttttttttctttttttgaaataaaatagcctgtctttcagatctaaaaaaaaaaaaaaaaaaaaaaaaaaaaaaaaaaaaaaaaaaaaaaaaaaaaaaaaaaaaaaaaaaaaaaaaaaaaaaaaaaaaaaaaaaaaaaaaaaaa

SEQ ID NO: 4598 - RNA, 1673 nt, synthetic construct
  misc_feature 1..1673: note = mRNA a-1 (A100) (opt28) from Homo sapiens__NP_000448.3__HNF4A(1-474)(K447R_K470R)
  source 1..1673: mol_type = other RNA
aggagagtcccgcagtcggcgtccagcggctctgcttgttcgtgtgtgtgtcgttgcaggccttattcaagcttaccatgcggctgagcaagaccctggtggacatggatatggcagactactccgccgctctggatccagcatatacaactctggagttcgaaaacgtccaggtgctgaccatgggaaatgacacatctccctcagagggcactaacctgaatgcccctaacagtctgggggtgagcgctctgtgcgcaatctgcggagacagggccaccggcaaacactacggggcttcctcttgtgatggatgcaagggctttttcagacgcagcgtccggaaaaatcatatgtactcatgccgatttagtaggcagtgcgtggtggacaaggacaagagaaaccagtgccgctattgtcggctgaaaaagtgcttcagggcaggaatgaaaaaggaagccgtccagaatgagagagatcgaatttccacacggcgcagctcttacgaagacagctccctgccatcaatcaacgctctgctgcaggcagaggtgctgagtaggcagatcactagccccgtgtctgggattaacggcgatatcagagccaagaaaattgcatccatcgctgacgtctgcgaaagcatgaaggagcagctgctggtgctggtggagtgggccaaatacatccctgcattttgcgaactgccactggacgatcaggtcgctctgctgcgggcccacgcaggagagcatctgctgctgggcgctaccaagcgatcaatggtgttcaaggacgtgctgctgctggggaatgactatattgtccccaggcactgccctgaactggccgagatgagtagagtgtctatccgcatcctggatgaactggtgctgccattccaggagctgcagattgacgataacgaatacgcatacctgaaagctatcatctttttcgaccccgacgccaagggactgtccgatcctggcaaaattaagcggctgaggagccaggtccaggtgagcctggaggactatatcaatgacagacagtacgattcccgagggcggtttggagaactgctgctgctgctgccaacactgcagtcaattacctggcagatgatcgagcagatccagttcattaaactgttcggcatggcaaagatcgacaacctgctgcaggagatgctgctgggagggtctcccagtgatgcccctcatgctcaccacccactgcatccccacctgatgcaggaacatatgggcactaatgtgatcgtcgcaaacacaatgcctacccacctgagcaatggacagatgtgtgagtggccacgccccaggggccaggccgcaactcctgaaaccccacagccctcccctccagggggatctggcagcgagccctacagactgctgcctggagctgtggcaacaattgtgaagccactgtcagccatcccccagcctaccattactcggcaggaagtcatctgaggactagtccctgttcccagagcccacttttttttctttttttgaaataaaatagcctgtctttcagatctaaaaaaaaaaaaaaaaaaaaaaaaaaaaaaaaaaaaaaaaaaaaaaaaaaaaaaaaaaaaaaaaaaaaaaaaaaaaaaaaaaaaaaaaaaaaaaaaaaaa

SEQ ID NO: 4599 - RNA, 1673 nt, synthetic construct
  misc_feature 1..1673: note = mRNA a-1 (A100) (opt28) from Homo sapiens__NP_000448.3__HNF4A(1-474)(K458R)
  source 1..1673: mol_type = other RNA
aggagagtcccgcagtcggcgtccagcggctctgcttgttcgtgtgtgtgtcgttgcaggccttattcaagcttaccatgcggctgagcaagaccctggtggacatggatatggcagactactccgccgctctggatccagcatatacaactctggagttcgaaaacgtccaggtgctgaccatgggaaatgacacatctccctcagagggcactaacctgaatgcccctaacagtctgggggtgagcgctctgtgcgcaatctgcggagacagggccaccggcaaacactacggggcttcctcttgtgatggatgcaagggctttttcagacgcagcgtccggaaaaatcatatgtactcatgccgatttagtaggcagtgcgtggtggacaaggacaagagaaaccagtgccgctattgtcggctgaaaaagtgcttcagggcaggaatgaaaaaggaagccgtccagaatgagagagatcgaatttccacacggcgcagctcttacgaagacagctccctgccatcaatcaacgctctgctgcaggcagaggtgctgagtaggcagatcactagccccgtgtctgggattaacggcgatatcagagccaagaaaattgcatccatcgctgacgtctgcgaaagcatgaaggagcagctgctggtgctggtggagtgggccaaatacatccctgcattttgcgaactgccactggacgatcaggtcgctctgctgcgggcccacgcaggagagcatctgctgctgggcgctaccaagcgatcaatggtgttcaaggacgtgctgctgctggggaatgactatattgtccccaggcactgccctgaactggccgagatgagtagagtgtctatccgcatcctggatgaactggtgctgccattccaggagctgcagattgacgataacgaatacgcatacctgaaagctatcatctttttcgaccccgacgccaagggactgtccgatcctggcaaaattaagcggctgaggagccaggtccaggtgagcctggaggactatatcaatgacagacagtacgattcccgagggcggtttggagaactgctgctgctgctgccaacactgcagtcaattacctggcagatgatcgagcagatccagttcattaaactgttcggcatggcaaagatcgacaacctgctgcaggagatgctgctgggagggtctcccagtgatgcccctcatgctcaccacccactgcatccccacctgatgcaggaacatatgggcactaatgtgatcgtcgcaaacacaatgcctacccacctgagcaatggacagatgtgtgagtggccacgccccaggggccaggccgcaactcctgaaaccccacagccctcccctccagggggatctggcagcgagccctacaagctgctgcctggagctgtggcaacaattgtgagaccactgtcagccatcccccagcctaccattactaaacaggaagtcatctgaggactagtccctgttcccagagcccacttttttttctttttttgaaataaaatagcctgtctttcagatctaaaaaaaaaaaaaaaaaaaaaaaaaaaaaaaaaaaaaaaaaaaaaaaaaaaaaaaaaaaaaaaaaaaaaaaaaaaaaaaaaaaaaaaaaaaaaaaaaaaa

SEQ ID NO: 4600 - RNA, 1673 nt, synthetic construct
  misc_feature 1..1673: note = mRNA a-1 (A100) (opt28) from Homo sapiens__NP_000448.3__HNF4A(1-474)(K106R_K108R_K126R_K127R)
  source 1..1673: mol_type = other RNA
aggagagtcccgcagtcggcgtccagcggctctgcttgttcgtgtgtgtgtcgttgcaggccttattcaagcttaccatgcggctgagcaagaccctggtggacatggatatggcagactactccgccgctctggatccagcatatacaactctggagttcgaaaacgtccaggtgctgaccatgggaaatgacacatctccctcagagggcactaacctgaatgcccctaacagtctgggggtgagcgctctgtgcgcaatctgcggagacagggccaccggcaaacactacggggcttcctcttgtgatggatgcaagggctttttcagacgcagcgtccggaaaaatcatatgtactcatgccgatttagtaggcagtgcgtggtggacagagaccgccggaaccagtgcaggtattgtagactgaagaagtgcttccgagcaggaatgcggcgcgaagccgtccagaatgagagggatagaatttccacacggcgaagctcttacgaagacagctccctgccatcaatcaacgctctgctgcaggcagaggtgctgagtaggcagatcactagccccgtgtctgggattaacggcgatatcagagccaaaaagattgcatccatcgctgacgtctgcgaaagcatgaaagagcagctgctggtgctggtggagtgggccaagtacatccctgcattttgcgaactgccactggacgatcaggtcgctctgctgcgcgcccacgcaggagagcatctgctgctgggcgctaccaagcggtcaatggtgttcaaagacgtgctgctgctggggaatgactatattgtccccaggcactgccctgaactggccgagatgagtagagtgtctatccgaatcctggatgaactggtgctgccattccaggagctgcagattgacgataacgaatacgcatacctgaaggctatcatctttttcgaccccgacgccaaaggactgtccgatcctggcaagattaagcggctgcgcagccaggtccaggtgagcctggaggactatatcaatgacaggcagtacgattccagagggcggtttggagaactgctgctgctgctgccaacactgcagtcaattacctggcagatgatcgagcagatccagttcattaaactgttcggcatggcaaagatcgacaacctgctgcaggagatgctgctgggagggtctcccagtgatgcccctcatgctcaccacccactgcatccccacctgatgcaggaacatatgggcactaatgtgatcgtcgcaaacacaatgcctacccacctgagcaatggacagatgtgtgagtggccacgccccaggggccaggccgcaactcctgaaaccccacagccctcccctccagggggatctggcagcgagccctacaaactgctgcctggagctgtggcaacaattgtgaagccactgtcagccatcccccagcctaccattactaaacaggaagtcatctgaggactagtccctgttcccagagcccacttttttttctttttttgaaataaaatagcctgtctttcagatctaaaaaaaaaaaaaaaaaaaaaaaaaaaaaaaaaaaaaaaaaaaaaaaaaaaaaaaaaaaaaaaaaaaaaaaaaaaaaaaaaaaaaaaaaaaaaaaaaaaa

SEQ ID NO: 4601 - RNA, 1673 nt, synthetic construct
  misc_feature 1..1673: note = mRNA a-1 (A100) (opt28) from Homo sapiens__NP_000448.3__HNF4A(1-474)(E285Q)
  source 1..1673: mol_type = other RNA
aggagagtcccgcagtcggcgtccagcggctctgcttgttcgtgtgtgtgtcgttgcaggccttattcaagcttaccatgcggctgagcaagaccctggtggacatggatatggcagactactccgccgctctggatccagcatatacaactctggagttcgaaaacgtccaggtgctgaccatgggaaatgacacatctccctcagagggcactaacctgaatgcccctaacagtctgggggtgagcgctctgtgcgcaatctgcggagacagggccaccggcaaacactacggggcttcctcttgtgatggatgcaagggctttttcagacgcagcgtccggaaaaatcatatgtactcatgccgatttagtaggcagtgcgtggtggacaaggacaagagaaaccagtgccgctattgtcggctgaaaaagtgcttcagggcaggaatgaaaaaggaagccgtccagaatgagagagatcgaatttccacacggcgcagctcttacgaagacagctccctgccatcaatcaacgctctgctgcaggcagaggtgctgagtaggcagatcactagccccgtgtctgggattaacggcgatatcagagccaagaaaattgcatccatcgctgacgtctgcgaaagcatgaaggagcagctgctggtgctggtggagtgggccaaatacatccctgcattttgcgaactgccactggacgatcaggtcgctctgctgcgggcccacgcaggagagcatctgctgctgggcgctaccaagcgatcaatggtgttcaaggacgtgctgctgctggggaatgactatattgtccccaggcactgccctgaactggccgagatgagtagagtgtctatccgcatcctggatgaactggtgctgccattccaggagctgcagattgacgataaccagtacgcatacctgaaagctatcatctttttcgaccccgacgccaagggactgtccgatcctggcaaaattaagcggctgaggagccaggtccaggtgagcctggaagactatatcaatgacagacagtacgattcccgagggcggtttggagagctgctgctgctgctgccaacactgcagtcaattacctggcagatgatcgaacagatccagttcattaaactgttcggcatggcaaagatcgacaacctgctgcaggagatgctgctgggagggtctcccagtgatgcccctcatgctcaccacccactgcatccccacctgatgcaggagcatatgggcactaatgtgatcgtcgcaaacacaatgcctacccacctgagcaatggacagatgtgtgaatggccacgccccaggggccaggccgcaactcctgagaccccacagccctcccctccagggggatctggcagcgaaccctacaagctgctgcctggagctgtggcaacaattgtgaaaccactgtcagccatcccccagcctaccattactaagcaggaggtcatctgaggactagtccctgttcccagagcccacttttttttctttttttgaaataaaatagcctgtctttcagatctaaaaaaaaaaaaaaaaaaaaaaaaaaaaaaaaaaaaaaaaaaaaaaaaaaaaaaaaaaaaaaaaaaaaaaaaaaaaaaaaaaaaaaaaaaaaaaaaaaaa

SEQ ID NO: 4602 - RNA, 1673 nt, synthetic construct
  misc_feature 1..1673: note = mRNA a-1 (A100) (opt28) from Homo sapiens__NP_000448.3__HNF4A(1-474)(T166E)
  source 1..1673: mol_type = other RNA
aggagagtcccgcagtcggcgtccagcggctctgcttgttcgtgtgtgtgtcgttgcaggccttattcaagcttaccatgcggctgagcaagaccctggtggacatggatatggcagactactccgccgctctggatccagcatatacaactctggagttcgaaaacgtccaggtgctgaccatgggaaatgacacatctccctcagagggcactaacctgaatgcccctaacagtctgggggtgagcgctctgtgcgcaatctgcggagacagggccaccggcaaacactacggggcttcctcttgtgatggatgcaagggctttttcagacgcagcgtccggaaaaatcatatgtactcatgccgatttagtaggcagtgcgtggtggacaaggacaagagaaaccagtgccgctattgtcggctgaaaaagtgcttcagggcaggaatgaaaaaggaagccgtccagaatgagagagatcgaatttccacacggcgcagctcttacgaagacagctccctgccatcaatcaacgctctgctgcaggcagaggtgctgagtaggcagatcgaaagccccgtgtctgggattaacggcgatatcagagccaagaaaattgcatccatcgctgacgtctgcgagagcatgaaggagcagctgctggtgctggtggaatgggccaaatacatccctgcattttgcgagctgccactggacgatcaggtcgctctgctgcgggcccacgcaggagaacatctgctgctgggcgctactaagcgatcaatggtgttcaaggacgtgctgctgctggggaatgactatattgtccccaggcactgccctgagctggccgaaatgagtagagtgtctatccgcatcctggatgagctggtgctgccattccaggaactgcagattgacgataacgagtacgcatacctgaaagctatcatctttttcgaccccgacgccaagggactgtccgatcctggcaaaattaagcggctgaggagccaggtccaggtgagcctggaagactatatcaatgacagacagtacgattcccgagggcggtttggagagctgctgctgctgctgccaaccctgcagtcaattacatggcagatgatcgagcagatccagttcattaaactgttcggcatggcaaagatcgacaacctgctgcaggaaatgctgctgggagggtctcccagtgatgcccctcatgctcaccacccactgcatccccacctgatgcaggagcatatgggcaccaatgtgatcgtcgcaaacactatgcctacacacctgagcaatggacagatgtgtgaatggccacgccccaggggccaggccgcaacccctgagactccacagccctcccctccagggggatctggcagcgaaccctacaagctgctgcctggagctgtggcaaccattgtgaaaccactgtcagccatcccccagcctacaattaccaagcaggaggtcatctgaggactagtccctgttcccagagcccacttttttttctttttttgaaataaaatagcctgtctttcagatctaaaaaaaaaaaaaaaaaaaaaaaaaaaaaaaaaaaaaaaaaaaaaaaaaaaaaaaaaaaaaaaaaaaaaaaaaaaaaaaaaaaaaaaaaaaaaaaaaaaa

SEQ ID NO: 4603 - RNA, 1673 nt, synthetic construct
  misc_feature 1..1673: note = mRNA a-1 (A100) (opt28) from Homo sapiens__NP_000448.3__HNF4A(1-474)(S148A)
  source 1..1673: mol_type = other RNA
aggagagtcccgcagtcggcgtccagcggctctgcttgttcgtgtgtgtgtcgttgcaggccttattcaagcttaccatgcggctgagcaagaccctggtggacatggatatggcagactactccgccgctctggatccagcatatacaactctggagttcgaaaacgtccaggtgctgaccatgggaaatgacacatctccctcagagggcactaacctgaatgcccctaacagtctgggggtgagcgctctgtgcgcaatctgcggagacagggccaccggcaaacactacggggcttcctcttgtgatggatgcaagggctttttcagacgcagcgtccggaaaaatcatatgtactcatgccgatttagtaggcagtgcgtggtggacaaggacaagagaaaccagtgccgctattgtcggctgaaaaagtgcttcagggcaggaatgaaaaaggaagccgtccagaatgagagagatcgaatttccacacggcgcagctcttacgaagacagcgctctgccatccatcaacgcactgctgcaggccgaggtgctgtcaaggcagatcaccagtcccgtgagcgggattaacggcgatatcagagcaaagaaaattgcttctatcgccgacgtctgcgaatccatgaaggagcagctgctggtgctggtggagtgggcaaaatacatccctgctttttgcgaactgccactggacgatcaggtcgccctgctgcgggcacacgctggagagcatctgctgctgggcgccactaagcgaagcatggtgttcaaggacgtgctgctgctggggaatgactatattgtccccaggcactgccctgaactggcagagatgtcaagagtgagtatccgcatcctggatgaactggtgctgccattccaggagctgcagattgacgataacgaatacgcttacctgaaagccatcatctttttcgaccccgacgcaaagggactgtctgatcctggcaaaattaagcggctgaggtcccaggtccaggtgagcctggaggactatatcaatgacagacagtacgatagccgagggcggtttggagaactgctgctgctgctgccaacactgcagtccattacctggcagatgatcgagcagatccagttcattaaactgttcggcatggccaagatcgacaacctgctgcaggagatgctgctgggagggtcaccctctgatgctcctcatgcacaccacccactgcatccccacctgatgcaggaacatatgggcactaatgtgatcgtcgccaacacaatgcctacccacctgagtaatggacagatgtgtgagtggccacgccccaggggccaggcagctactcctgaaaccccacagcccagccctccagggggatccggctctgagccctacaagctgctgcctggagcagtggccacaattgtgaaaccactgagcgctatcccccagcctaccattactaagcaggaagtcatctgaggactagtccctgttcccagagcccacttttttttctttttttgaaataaaatagcctgtctttcagatctaaaaaaaaaaaaaaaaaaaaaaaaaaaaaaaaaaaaaaaaaaaaaaaaaaaaaaaaaaaaaaaaaaaaaaaaaaaaaaaaaaaaaaaaaaaaaaaaaaaa

SEQ ID NO: 4604 - RNA, 1673 nt, synthetic construct
  misc_feature 1..1673: note = mRNA a-1 (A100) (opt28) from Homo sapiens__NP_000448.3__HNF4A(1-474)(S148E)
  source 1..1673: mol_type = other RNA
aggagagtcccgcagtcggcgtccagcggctctgcttgttcgtgtgtgtgtcgttgcaggccttattcaagcttaccatgcggctgagcaagaccctggtggacatggatatggcagactactccgccgctctggatccagcatatacaactctggagttcgaaaacgtccaggtgctgaccatgggaaatgacacatctccctcagagggcactaacctgaatgcccctaacagtctgggggtgagcgctctgtgcgcaatctgcggagacagggccaccggcaaacactacggggcttcctcttgtgatggatgcaagggctttttcagacgcagcgtccggaaaaatcatatgtactcatgccgatttagtaggcagtgcgtggtggacaaggacaagagaaaccagtgccgctattgtcggctgaaaaagtgcttcagggcaggaatgaaaaaggaagccgtccagaatgagagagatcgaatttccacacggcgcagctcttacgaagacagcgagctgccatccatcaacgctctgctgcaggcagaagtgctgtcaaggcagatcaccagtcccgtgagcgggattaacggcgatatcagagccaagaaaattgcatctatcgctgacgtctgcgagtccatgaaggagcagctgctggtgctggtggaatgggccaaatacatccctgcattttgcgagctgccactggacgatcaggtcgctctgctgcgggcccacgcaggagaacatctgctgctgggcgctactaagcgaagcatggtgttcaaggacgtgctgctgctggggaatgactatattgtccccaggcactgccctgagctggccgaaatgtcaagagtgagtatccgcatcctggatgagctggtgctgccattccaggaactgcagattgacgataacgagtacgcatacctgaaagctatcatctttttcgaccccgacgccaagggactgtctgatcctggcaaaattaagcggctgaggtcccaggtccaggtgagcctggaagactatatcaatgacagacagtacgatagccgagggcggtttggagagctgctgctgctgctgccaacactgcagtccattacctggcagatgatcgagcagatccagttcattaaactgttcggcatggcaaagatcgacaacctgctgcaggaaatgctgctgggagggtcaccctctgatgcccctcatgctcaccacccactgcatccccacctgatgcaggagcatatgggcactaatgtgatcgtcgcaaacacaatgcctacccacctgagtaatggacagatgtgtgaatggccacgccccaggggccaggccgcaactcctgagaccccacagcccagccctccagggggatccggctctgaaccctacaagctgctgcctggagctgtggcaacaattgtgaaaccactgagcgccatcccccagcctaccattactaagcaggaggtcatctgaggactagtccctgttcccagagcccacttttttttctttttttgaaataaaatagcctgtctttcagatctaaaaaaaaaaaaaaaaaaaaaaaaaaaaaaaaaaaaaaaaaaaaaaaaaaaaaaaaaaaaaaaaaaaaaaaaaaaaaaaaaaaaaaaaaaaaaaaaaaaa

SEQ ID NO: 4605 - RNA, 1673 nt, synthetic construct
  misc_feature 1..1673: note = mRNA a-1 (A100) (opt28) from Homo sapiens__NP_000448.3__HNF4A(1-474)(S183A)
  source 1..1673: mol_type = other RNA
aggagagtcccgcagtcggcgtccagcggctctgcttgttcgtgtgtgtgtcgttgcaggccttattcaagcttaccatgcggctgagcaagaccctggtggacatggatatggcagactactccgccgctctggatccagcatatacaactctggagttcgaaaacgtccaggtgctgaccatgggaaatgacacatctccctcagagggcactaacctgaatgcccctaacagtctgggggtgagcgctctgtgcgcaatctgcggagacagggccaccggcaaacactacggggcttcctcttgtgatggatgcaagggctttttcagacgcagcgtccggaaaaatcatatgtactcatgccgatttagtaggcagtgcgtggtggacaaggacaagagaaaccagtgccgctattgtcggctgaaaaagtgcttcagggcaggaatgaaaaaggaagccgtccagaatgagagagatcgaatttccacacggcgcagctcttacgaagacagctccctgccatcaatcaacgctctgctgcaggcagaggtgctgagtaggcagatcactagccccgtgtctgggattaacggcgatatcagagccaagaaaattgcagctatcgccgacgtctgcgaatccatgaaggagcagctgctggtgctggtggagtgggcaaaatacatccctgctttttgcgaactgccactggacgatcaggtcgccctgctgcgggcacacgctggagagcatctgctgctgggcgccaccaagcgaagcatggtgttcaaggacgtgctgctgctggggaatgactatattgtccccaggcactgccctgaactggcagagatgtcaagagtgagtatccgcatcctggatgaactggtgctgccattccaggagctgcagattgacgataacgaatacgcttacctgaaagccatcatctttttcgaccccgacgcaaagggactgtctgatcctggcaaaattaagcggctgaggtcccaggtccaggtgagcctggaggactatatcaatgacagacagtacgatagccgagggcggtttggagaactgctgctgctgctgccaacactgcagtccattacctggcagatgatcgagcagatccagttcattaaactgttcggcatggccaagatcgacaacctgctgcaggagatgctgctgggagggtcaccctctgatgctcctcatgcacaccacccactgcatccccacctgatgcaggaacatatgggcactaatgtgatcgtcgccaacacaatgcctacccacctgagtaatggacagatgtgtgagtggccacgccccaggggccaggcagctactcctgaaaccccacagcccagccctccagggggatccggctctgagccctacaagctgctgcctggagcagtggccacaattgtgaaaccactgagcgctatcccccagcctaccattactaagcaggaagtcatctgaggactagtccctgttcccagagcccacttttttttctttttttgaaataaaatagcctgtctttcagatctaaaaaaaaaaaaaaaaaaaaaaaaaaaaaaaaaaaaaaaaaaaaaaaaaaaaaaaaaaaaaaaaaaaaaaaaaaaaaaaaaaaaaaaaaaaaaaaaaaaa

SEQ ID NO: 4606 - RNA, 1673 nt, synthetic construct
  misc_feature 1..1673: note = mRNA a-1 (A100) (opt28) from Homo sapiens__NP_000448.3__HNF4A(1-474)(S183E)
  source 1..1673: mol_type = other RNA
aggagagtcccgcagtcggcgtccagcggctctgcttgttcgtgtgtgtgtcgttgcaggccttattcaagcttaccatgcggctgagcaagaccctggtggacatggatatggcagactactccgccgctctggatccagcatatacaactctggagttcgaaaacgtccaggtgctgaccatgggaaatgacacatctccctcagagggcactaacctgaatgcccctaacagtctgggggtgagcgctctgtgcgcaatctgcggagacagggccaccggcaaacactacggggcttcctcttgtgatggatgcaagggctttttcagacgcagcgtccggaaaaatcatatgtactcatgccgatttagtaggcagtgcgtggtggacaaggacaagagaaaccagtgccgctattgtcggctgaaaaagtgcttcagggcaggaatgaaaaaggaagccgtccagaatgagagagatcgaatttccacacggcgcagctcttacgaagacagctccctgccatcaatcaacgctctgctgcaggcagaggtgctgagtaggcagatcactagccccgtgtctgggattaacggcgatatcagagccaagaaaattgcagaaatcgctgacgtctgcgagtccatgaaggagcagctgctggtgctggtggaatgggccaaatacatccctgcattttgcgagctgccactggacgatcaggtcgctctgctgcgggcccacgcaggagaacatctgctgctgggcgctaccaagcgaagcatggtgttcaaggacgtgctgctgctggggaatgactatattgtccccaggcactgccctgagctggccgaaatgtcaagagtgagtatccgcatcctggatgagctggtgctgccattccaggaactgcagattgacgataacgagtacgcatacctgaaagctatcatctttttcgaccccgacgccaagggactgtctgatcctggcaaaattaagcggctgaggtcccaggtccaggtgagcctggaagactatatcaatgacagacagtacgatagccgagggcggtttggagagctgctgctgctgctgccaacactgcagtccattacctggcagatgatcgagcagatccagttcattaaactgttcggcatggcaaagatcgacaacctgctgcaggaaatgctgctgggagggtcaccctctgatgcccctcatgctcaccacccactgcatccccacctgatgcaggagcatatgggcactaatgtgatcgtcgcaaacacaatgcctacccacctgagtaatggacagatgtgtgaatggccacgccccaggggccaggccgcaactcctgagaccccacagcccagccctccagggggatccggctctgaaccctacaagctgctgcctggagctgtggcaacaattgtgaaaccactgagcgccatcccccagcctaccattactaagcaggaggtcatctgaggactagtccctgttcccagagcccacttttttttctttttttgaaataaaatagcctgtctttcagatctaaaaaaaaaaaaaaaaaaaaaaaaaaaaaaaaaaaaaaaaaaaaaaaaaaaaaaaaaaaaaaaaaaaaaaaaaaaaaaaaaaaaaaaaaaaaaaaaaaaa

SEQ ID NO: 4607 - RNA, 1673 nt, synthetic construct
  misc_feature 1..1673: note = mRNA a-1 (A100) (opt28) from Homo sapiens__NP_000448.3__HNF4A(1-474)(S461A)
  source 1..1673: mol_type = other RNA
aggagagtcccgcagtcggcgtccagcggctctgcttgttcgtgtgtgtgtcgttgcaggccttattcaagcttaccatgcggctgagcaagaccctggtggacatggatatggcagactactccgccgctctggatccagcatatacaactctggagttcgaaaacgtccaggtgctgaccatgggaaatgacacatctccctcagagggcactaacctgaatgcccctaacagtctgggggtgagcgctctgtgcgcaatctgcggagacagggccaccggcaaacactacggggcttcctcttgtgatggatgcaagggctttttcagacgcagcgtccggaaaaatcatatgtactcatgccgatttagtaggcagtgcgtggtggacaaggacaagagaaaccagtgccgctattgtcggctgaaaaagtgcttcagggcaggaatgaaaaaggaagccgtccagaatgagagagatcgaatttccacacggcgcagctcttacgaagacagctccctgccatcaatcaacgctctgctgcaggcagaggtgctgagtaggcagatcactagccccgtgtctgggattaacggcgatatcagagccaagaaaattgcatccatcgctgacgtctgcgaaagcatgaaggagcagctgctggtgctggtggagtgggccaaatacatccctgcattttgcgaactgccactggacgatcaggtcgctctgctgcgggcccacgcaggagagcatctgctgctgggcgctaccaagcgatcaatggtgttcaaggacgtgctgctgctggggaatgactatattgtccccaggcactgccctgaactggccgagatgagtagagtgtctatccgcatcctggatgaactggtgctgccattccaggagctgcagattgacgataacgaatacgcatacctgaaagctatcatctttttcgaccccgacgccaagggactgtccgatcctggcaaaattaagcggctgaggagccaggtccaggtgagcctggaggactatatcaatgacagacagtacgattcccgagggcggtttggagaactgctgctgctgctgccaacactgcagtcaattacctggcagatgatcgagcagatccagttcattaaactgttcggcatggcaaagatcgacaacctgctgcaggagatgctgctgggagggtctcccagtgatgcccctcatgctcaccacccactgcatccccacctgatgcaggaacatatgggcactaatgtgatcgtcgcaaacacaatgcctacccacctgagcaatggacagatgtgtgagtggccacgccccaggggccaggccgcaactcctgaaaccccacagccctcccctccagggggatctggcagcgagccctacaagctgctgcctggagctgtggcaacaattgtgaaaccactggccgctatcccccagcctaccattactaagcaggaagtcatctgaggactagtccctgttcccagagcccacttttttttctttttttgaaataaaatagcctgtctttcagatctaaaaaaaaaaaaaaaaaaaaaaaaaaaaaaaaaaaaaaaaaaaaaaaaaaaaaaaaaaaaaaaaaaaaaaaaaaaaaaaaaaaaaaaaaaaaaaaaaaaa

SEQ ID NO: 4608 - RNA, 1673 nt, synthetic construct
  misc_feature 1..1673: note = mRNA a-1 (A100) (opt28) from Homo sapiens__NP_000448.3__HNF4A(1-474)(S461E)
  source 1..1673: mol_type = other RNA
aggagagtcccgcagtcggcgtccagcggctctgcttgttcgtgtgtgtgtcgttgcaggccttattcaagcttaccatgcggctgagcaagaccctggtggacatggatatggcagactactccgccgctctggatccagcatatacaactctggagttcgaaaacgtccaggtgctgaccatgggaaatgacacatctccctcagagggcactaacctgaatgcccctaacagtctgggggtgagcgctctgtgcgcaatctgcggagacagggccaccggcaaacactacggggcttcctcttgtgatggatgcaagggctttttcagacgcagcgtccggaaaaatcatatgtactcatgccgatttagtaggcagtgcgtggtggacaaggacaagagaaaccagtgccgctattgtcggctgaaaaagtgcttcagggcaggaatgaaaaaggaagccgtccagaatgagagagatcgaatttccacacggcgcagctcttacgaagacagctccctgccatcaatcaacgctctgctgcaggcagaggtgctgagtaggcagatcactagccccgtgtctgggattaacggcgatatcagagccaagaaaattgcatccatcgctgacgtctgcgaaagcatgaaggagcagctgctggtgctggtggagtgggccaaatacatccctgcattttgcgaactgccactggacgatcaggtcgctctgctgcgggcccacgcaggagagcatctgctgctgggcgctaccaagcgatcaatggtgttcaaggacgtgctgctgctggggaatgactatattgtccccaggcactgccctgaactggccgagatgagtagagtgtctatccgcatcctggatgaactggtgctgccattccaggagctgcagattgacgataacgaatacgcatacctgaaagctatcatctttttcgaccccgacgccaagggactgtccgatcctggcaaaattaagcggctgaggagccaggtccaggtgagcctggaggactatatcaatgacagacagtacgattcccgagggcggtttggagaactgctgctgctgctgccaacactgcagtcaattacctggcagatgatcgagcagatccagttcattaaactgttcggcatggcaaagatcgacaacctgctgcaggagatgctgctgggagggtctcccagtgatgcccctcatgctcaccacccactgcatccccacctgatgcaggaacatatgggcactaatgtgatcgtcgcaaacacaatgcctacccacctgagcaatggacagatgtgtgagtggccacgccccaggggccaggccgcaactcctgaaaccccacagccctcccctccagggggatctggcagcgagccctacaagctgctgcctggagctgtggcaacaattgtgaaaccactggaagccatcccccagcctaccattactaagcaggaggtcatctgaggactagtccctgttcccagagcccacttttttttctttttttgaaataaaatagcctgtctttcagatctaaaaaaaaaaaaaaaaaaaaaaaaaaaaaaaaaaaaaaaaaaaaaaaaaaaaaaaaaaaaaaaaaaaaaaaaaaaaaaaaaaaaaaaaaaaaaaaaaaaa

SEQ ID NO: 4609 - RNA, 1673 nt, synthetic construct
  misc_feature 1..1673: note = mRNA a-1 (A100) (opt28) from Homo sapiens__NP_000448.3__HNF4A(1-474)(S142A_S143A_S313A)
  source 1..1673: mol_type = other RNA
aggagagtcccgcagtcggcgtccagcggctctgcttgttcgtgtgtgtgtcgttgcaggccttattcaagcttaccatgcggctgagcaagaccctggtggacatggatatggcagactactccgccgctctggatccagcatatacaactctggagttcgaaaacgtccaggtgctgaccatgggaaatgacacatctccctcagagggcactaacctgaatgcccctaacagtctgggggtgagcgctctgtgcgcaatctgcggagacagggccaccggcaaacactacggggcttcctcttgtgatggatgcaagggctttttcagacgcagcgtccggaaaaatcatatgtactcatgccgatttagtaggcagtgcgtggtggacaaggacaagagaaaccagtgccgctattgtcggctgaaaaagtgcttcagggcaggaatgaaaaaggaagccgtccagaatgagagagatcgaatttccacacggcgcgctgcatacgaagacagctctctgccaagcatcaacgccctgctgcaggcagaggtgctgtccaggcagatcacttcacccgtgagtgggattaacggcgatatcagagctaagaaaattgccagcatcgcagacgtctgcgaatctatgaaggagcagctgctggtgctggtggagtgggctaaatacatccctgccttttgcgaactgccactggacgatcaggtcgcactgctgcgggctcacgccggagagcatctgctgctgggcgcaaccaagcgatccatggtgttcaaggacgtgctgctgctggggaatgactatattgtccccaggcactgccctgaactggctgagatgagcagagtgtcaatccgcatcctggatgaactggtgctgccattccaggagctgcagattgacgataacgaatacgcctacctgaaagcaatcatctttttcgaccccgacgccaagggactgagtgatcctggcaaaattaagcggctgagggctcaggtccaggtgtctctggaggactatatcaatgacagacagtacgattcccgagggcggtttggagaactgctgctgctgctgccaacactgcagagcattacctggcagatgatcgagcagatccagttcattaaactgttcggcatggcaaagatcgacaacctgctgcaggagatgctgctgggagggagcccctccgatgcccctcatgcacaccacccactgcatccccacctgatgcaggaacatatgggcactaatgtgatcgtcgctaacacaatgcctacccacctgtcaaatggacagatgtgtgagtggccacgccccaggggccaggcagccactcctgaaaccccacagccctctcctccagggggaagtggcagcgagccctacaagctgctgcctggagctgtggcaacaattgtgaaaccactgtccgccatcccccagcctaccattactaagcaggaagtcatctgaggactagtccctgttcccagagcccacttttttttctttttttgaaataaaatagcctgtctttcagatctaaaaaaaaaaaaaaaaaaaaaaaaaaaaaaaaaaaaaaaaaaaaaaaaaaaaaaaaaaaaaaaaaaaaaaaaaaaaaaaaaaaaaaaaaaaaaaaaaaaa

SEQ ID NO: 4610 - RNA, 1673 nt, synthetic construct
  misc_feature 1..1673: note = mRNA a-1 (A100) (opt28) from Homo sapiens__NP_000448.3__HNF4A(1-474)(S142A_S143A_S313A_K458R)
  source 1..1673: mol_type = other RNA
aggagagtcccgcagtcggcgtccagcggctctgcttgttcgtgtgtgtgtcgttgcaggccttattcaagcttaccatgcggctgagcaagaccctggtggacatggatatggcagactactccgccgctctggatccagcatatacaactctggagttcgaaaacgtccaggtgctgaccatgggaaatgacacatctccctcagagggcactaacctgaatgcccctaacagtctgggggtgagcgctctgtgcgcaatctgcggagacagggccaccggcaaacactacggggcttcctcttgtgatggatgcaagggctttttcagacgcagcgtccggaaaaatcatatgtactcatgccgatttagtaggcagtgcgtggtggacaaggacaagagaaaccagtgccgctattgtcggctgaaaaagtgcttcagggcaggaatgaaaaaggaagccgtccagaatgagagagatcgaatttccacacggcgcgctgcatacgaagacagctctctgccaagcatcaacgccctgctgcaggcagaggtgctgtccaggcagatcacttcacccgtgagtgggattaacggcgatatcagagctaagaaaattgccagcatcgcagacgtctgcgaatctatgaaggagcagctgctggtgctggtggagtgggctaaatacatccctgccttttgcgaactgccactggacgatcaggtcgcactgctgcgggctcacgccggagagcatctgctgctgggcgcaaccaagcgatccatggtgttcaaggacgtgctgctgctggggaatgactatattgtccccaggcactgccctgaactggctgagatgagcagagtgtcaatccgcatcctggatgaactggtgctgccattccaggagctgcagattgacgataacgaatacgcctacctgaaagcaatcatctttttcgaccccgacgccaagggactgagtgatcctggcaaaattaagcggctgagggctcaggtccaggtgtctctggaggactatatcaatgacagacagtacgattcccgagggcggtttggagaactgctgctgctgctgccaacactgcagagcattacctggcagatgatcgagcagatccagttcattaaactgttcggcatggcaaagatcgacaacctgctgcaggagatgctgctgggagggagcccctccgatgcccctcatgcacaccacccactgcatccccacctgatgcaggaacatatgggcactaatgtgatcgtcgctaacacaatgcctacccacctgtcaaatggacagatgtgtgagtggccacgccccaggggccaggcagccactcctgaaaccccacagccctctcctccagggggaagtggcagcgagccctacaagctgctgcctggagctgtggcaacaattgtgagaccactgtccgccatcccccagcctaccattactaaacaggaagtcatctgaggactagtccctgttcccagagcccacttttttttctttttttgaaataaaatagcctgtctttcagatctaaaaaaaaaaaaaaaaaaaaaaaaaaaaaaaaaaaaaaaaaaaaaaaaaaaaaaaaaaaaaaaaaaaaaaaaaaaaaaaaaaaaaaaaaaaaaaaaaaaa

SEQ ID NO: 4611 - RNA, 1673 nt, synthetic construct
  misc_feature 1..1673: note = mRNA a-1 (A100) (opt28) from Homo sapiens__NP_000448.3__HNF4A(1-474)(S142A_S143A_S167A_S313A_ S378A_T429A_T432A_S436A_K458R)
  source 1..1673: mol_type = other RNA
aggagagtcccgcagtcggcgtccagcggctctgcttgttcgtgtgtgtgtcgttgcaggccttattcaagcttaccatgcggctgagcaagaccctggtggacatggatatggcagactactccgccgctctggatccagcatatacaactctggagttcgaaaacgtccaggtgctgaccatgggaaatgacacatctccctcagagggcactaacctgaatgcccctaacagtctgggggtgagcgctctgtgcgcaatctgcggagacagggccaccggcaaacactacggggcttcctcttgtgatggatgcaagggctttttcagacgcagcgtccggaaaaatcatatgtactcatgccgatttagtaggcagtgcgtggtggacaaggacaagagaaaccagtgccgctattgtcggctgaaaaagtgcttcagggcaggaatgaaaaaggaagccgtccagaatgagagagatcgaatttccacacggcgcgctgcatacgaagacagctctctgccaagcatcaacgccctgctgcaggcagaggtgctgtccaggcagatcactgctcccgtgtcagggattaacggcgatatcagagccaagaaaattgcaagtatcgctgacgtctgcgaaagcatgaaggagcagctgctggtgctggtggagtgggccaaatacatccctgcattttgcgaactgccactggacgatcaggtcgctctgctgcgggcccacgcaggagagcatctgctgctgggcgctaccaagcgatctatggtgttcaaggacgtgctgctgctggggaatgactatattgtccccaggcactgccctgaactggccgagatgtccagagtgagcatccgcatcctggatgaactggtgctgccattccaggagctgcagattgacgataacgaatacgcatacctgaaagccatcatctttttcgaccccgacgctaagggactgtcagatcctggcaaaattaagcggctgagggcacaggtccaggtgagtctggaggactatatcaatgacagacagtacgattctcgagggcggtttggagaactgctgctgctgctgccaacactgcagtccattacctggcagatgatcgagcagatccagttcattaaactgttcggcatggccaagatcgacaacctgctgcaggagatgctgctgggaggggcacccagcgatgctcctcatgcacaccacccactgcatccccacctgatgcaggaacatatgggcactaatgtgatcgtcgccaacacaatgcctacccacctgagcaatggacagatgtgtgagtggccacgccccaggggccaggctgcagcccctgaagctccacagcccgcacctccagggggatccggctcagagccctacaagctgctgcctggagccgtggctactattgtgagaccactgtctgcaatcccccagcctaccattacaaaacaggaagtcatctgaggactagtccctgttcccagagcccacttttttttctttttttgaaataaaatagcctgtctttcagatctaaaaaaaaaaaaaaaaaaaaaaaaaaaaaaaaaaaaaaaaaaaaaaaaaaaaaaaaaaaaaaaaaaaaaaaaaaaaaaaaaaaaaaaaaaaaaaaaaaaa

SEQ ID NO: 4612 - RNA, 1673 nt, synthetic construct
  misc_feature 1..1673: note = mRNA a-1 (A100) (opt28) from Homo sapiens__NP_000448.3__HNF4A(1-474)(S142A_S143A_S148A_S167A_ S313A_S378A_T429A_T432A_S436A_K458R)
  source 1..1673: mol_type = other RNA
aggagagtcccgcagtcggcgtccagcggctctgcttgttcgtgtgtgtgtcgttgcaggccttattcaagcttaccatgcggctgagcaagaccctggtggacatggatatggcagactactccgccgctctggatccagcatatacaactctggagttcgaaaacgtccaggtgctgaccatgggaaatgacacatctccctcagagggcactaacctgaatgcccctaacagtctgggggtgagcgctctgtgcgcaatctgcggagacagggccaccggcaaacactacggggcttcctcttgtgatggatgcaagggctttttcagacgcagcgtccggaaaaatcatatgtactcatgccgatttagtaggcagtgcgtggtggacaaggacaagagaaaccagtgccgctattgtcggctgaaaaagtgcttcagggcaggaatgaaaaaggaagccgtccagaatgagagagatcgaatttccacacggcgcgctgcatacgaagacagcgccctgccatctatcaacgcactgctgcaggctgaggtgctgagcaggcagatcactgcccccgtgtccgggattaacggcgatatcagagcaaagaaaattgcttcaatcgccgacgtctgcgaaagtatgaaggagcagctgctggtgctggtggagtgggcaaaatacatccctgctttttgcgaactgccactggacgatcaggtcgccctgctgcgggcacacgctggagagcatctgctgctgggcgccaccaagcgaagcatggtgttcaaggacgtgctgctgctggggaatgactatattgtccccaggcactgccctgaactggcagagatgtctagagtgtccatccgcatcctggatgaactggtgctgccattccaggagctgcagattgacgataacgaatacgcctacctgaaagctatcatctttttcgaccccgacgcaaagggactgagcgatcctggcaaaattaagcggctgagggcccaggtccaggtgtcactggaggactatatcaatgacagacagtacgatagtcgagggcggtttggagaactgctgctgctgctgccaacactgcagtctattacctggcagatgatcgagcagatccagttcattaaactgttcggcatggcaaagatcgacaacctgctgcaggagatgctgctgggaggggctccctccgatgcacctcatgcccaccacccactgcatccccacctgatgcaggaacatatgggcactaatgtgatcgtcgctaacacaatgcctacccacctgagcaatggacagatgtgtgagtggccacgccccaggggccaggcagccgctcctgaagcaccacagcccgcccctccagggggaagcggctccgagccctacaagctgctgcctggagctgtggcaactattgtgagaccactgtcagccatcccccagcctaccattacaaaacaggaagtcatctgaggactagtccctgttcccagagcccacttttttttctttttttgaaataaaatagcctgtctttcagatctaaaaaaaaaaaaaaaaaaaaaaaaaaaaaaaaaaaaaaaaaaaaaaaaaaaaaaaaaaaaaaaaaaaaaaaaaaaaaaaaaaaaaaaaaaaaaaaaaaaa

SEQ ID NO: 4613 - RNA, 1673 nt, synthetic construct
  misc_feature 1..1673: note = mRNA a-1 (A100) (opt28) from Homo sapiens__NP_000448.3__HNF4A(1-474)(K106R_K108R_K126R_K127R_ S142A_S143A_S148A_S167A_S313A_S378A_T429A_T432A_S436A_K458R )
  source 1..1673: mol_type = other RNA
aggagagtcccgcagtcggcgtccagcggctctgcttgttcgtgtgtgtgtcgttgcaggccttattcaagcttaccatgcggctgagcaagaccctggtggacatggatatggcagactactccgccgctctggatccagcatatacaactctggagttcgaaaacgtccaggtgctgaccatgggaaatgacacatctccctcagagggcactaacctgaatgcccctaacagtctgggggtgagcgctctgtgcgcaatctgcggagacagggccaccggcaaacactacggggcttcctcttgtgatggatgcaagggctttttcagacgcagcgtccggaaaaatcatatgtactcatgccgatttagtaggcagtgcgtggtggacagagaccgccggaaccagtgcaggtattgtagactgaagaagtgcttccgagcaggaatgcggcgcgaagccgtccagaatgagagggatagaatttccacacggcgagctgcatacgaagacagcgccctgccatctatcaacgcactgctgcaggctgaggtgctgagcaggcagatcactgcccccgtgtccgggattaacggcgatatcagagctaaaaagattgcatcaatcgccgacgtctgcgaaagtatgaaagagcagctgctggtgctggtggagtgggcaaagtacatccctgctttttgcgaactgccactggacgatcaggtcgccctgctgcgcgcacacgctggagagcatctgctgctgggcgccaccaagcggagcatggtgttcaaagacgtgctgctgctggggaatgactatattgtccccaggcactgccctgaactggcagagatgtctagagtgtccatccgaatcctggatgaactggtgctgccattccaggagctgcagattgacgataacgaatacgcctacctgaaggctatcatctttttcgaccccgacgcaaaaggactgagcgatcctggcaagattaagcggctgcgcgcccaggtccaggtgtcactggaggactatatcaatgacaggcagtacgatagtagagggcggtttggagaactgctgctgctgctgccaacactgcagtctattacctggcagatgatcgagcagatccagttcattaaactgttcggcatggcaaagatcgacaacctgctgcaggagatgctgctgggaggggctccctccgatgcacctcatgcccaccacccactgcatccccacctgatgcaggaacatatgggcactaatgtgatcgtcgctaacacaatgcctacccacctgagcaatggacagatgtgtgagtggccacgccccaggggccaggcagccgctcctgaagcaccacagcccgcccctccagggggaagcggctccgagccctacaaactgctgcctggagctgtggcaactattgtgagaccactgtcagccatcccccagcctaccattacaaagcaggaagtcatctgaggactagtccctgttcccagagcccacttttttttctttttttgaaataaaatagcctgtctttcagatctaaaaaaaaaaaaaaaaaaaaaaaaaaaaaaaaaaaaaaaaaaaaaaaaaaaaaaaaaaaaaaaaaaaaaaaaaaaaaaaaaaaaaaaaaaaaaaaaaaaa

SEQ ID NO: 4614 - RNA, 1673 nt, synthetic construct
  misc_feature 1..1673: note = mRNA a-1 (A100) (opt28) from Homo sapiens__NP_000448.3__HNF4A(1-474)(S142A_S143A_S148A_T166A_ S167A_S313A_S378A_T429A_T432A_S436A_K458R)
  source 1..1673: mol_type = other RNA
aggagagtcccgcagtcggcgtccagcggctctgcttgttcgtgtgtgtgtcgttgcaggccttattcaagcttaccatgcggctgagcaagaccctggtggacatggatatggcagactactccgccgctctggatccagcatatacaactctggagttcgaaaacgtccaggtgctgaccatgggaaatgacacatctccctcagagggcactaacctgaatgcccctaacagtctgggggtgagcgctctgtgcgcaatctgcggagacagggccaccggcaaacactacggggcttcctcttgtgatggatgcaagggctttttcagacgcagcgtccggaaaaatcatatgtactcatgccgatttagtaggcagtgcgtggtggacaaggacaagagaaaccagtgccgctattgtcggctgaaaaagtgcttcagggcaggaatgaaaaaggaagccgtccagaatgagagagatcgaatttccacacggcgcgctgcatacgaagacagcgccctgccatctatcaacgcactgctgcaggctgaggtgctgagcaggcagatcgccgcacccgtgtccgggattaacggcgatatcagagctaagaaaattgcctcaatcgcagacgtctgcgaaagtatgaaggagcagctgctggtgctggtggagtgggctaaatacatccctgccttttgcgaactgccactggacgatcaggtcgcactgctgcgggctcacgccggagagcatctgctgctgggcgcaactaagcgaagcatggtgttcaaggacgtgctgctgctggggaatgactatattgtccccaggcactgccctgaactggccgagatgtctagagtgtccatccgcatcctggatgaactggtgctgccattccaggagctgcagattgacgataacgaatacgcttacctgaaagcaatcatctttttcgaccccgacgccaagggactgagcgatcctggcaaaattaagcggctgagggcacaggtccaggtgtcactggaggactatatcaatgacagacagtacgatagtcgagggcggtttggagaactgctgctgctgctgccaaccctgcagtctattacatggcagatgatcgagcagatccagttcattaaactgttcggcatggctaagatcgacaacctgctgcaggagatgctgctgggaggggcaccctccgatgcccctcatgctcaccacccactgcatccccacctgatgcaggaacatatgggcaccaatgtgatcgtcgcaaacactatgcctacacacctgagcaatggacagatgtgtgagtggccacgccccaggggccaggccgctgcacctgaagccccacagcccgctcctccagggggaagcggctccgagccctacaagctgctgcctggagcagtggccaccattgtgagaccactgtcagcaatcccccagcctactattaccaaacaggaagtcatctgaggactagtccctgttcccagagcccacttttttttctttttttgaaataaaatagcctgtctttcagatctaaaaaaaaaaaaaaaaaaaaaaaaaaaaaaaaaaaaaaaaaaaaaaaaaaaaaaaaaaaaaaaaaaaaaaaaaaaaaaaaaaaaaaaaaaaaaaaaaaaa

SEQ ID NO: 4615 - RNA, 1673 nt, synthetic construct
  misc_feature 1..1673: note = mRNA a-1 (A100) (opt28) from Homo sapiens__NP_000448.3__HNF4A(1-474)(S87A_S142A_S143A_S148A_T 166A_S167A_S313A_S378A_T429A_T432A_S436A_K458R)
  source 1..1673: mol_type = other RNA
aggagagtcccgcagtcggcgtccagcggctctgcttgttcgtgtgtgtgtcgttgcaggccttattcaagcttaccatgcggctgagcaagaccctggtggacatggatatggcagactactccgccgctctggatccagcatatacaactctggagttcgaaaacgtccaggtgctgaccatgggaaatgacacatctccctcagagggcactaacctgaatgcccctaacagtctgggggtgagcgctctgtgcgcaatctgcggagacagggccaccggcaaacactacggggcttcctcttgtgatggatgcaagggctttttcagacgcgcagtccggaaaaatcatatgtacagctgccgattttcaaggcagtgcgtggtggacaaggacaagagaaaccagtgccgctattgtcggctgaaaaagtgcttcagggccggaatgaaaaaggaagctgtccagaatgagagagatcgaattagtacacggcgcgcagcctacgaagactccgcactgccaagcatcaacgctctgctgcaggccgaggtgctgtctaggcagatcgcagctcccgtgagcgggattaacggcgatatcagagccaagaaaattgcatccatcgctgacgtctgcgaatcaatgaaggagcagctgctggtgctggtggagtgggccaaatacatccctgcattttgcgaactgccactggacgatcaggtcgctctgctgcgggcccacgcaggagagcatctgctgctgggcgccactaagcgaagtatggtgttcaaggacgtgctgctgctggggaatgactatattgtccccaggcactgccctgaactggctgagatgagcagagtgtctatccgcatcctggatgaactggtgctgccattccaggagctgcagattgacgataacgaatacgcatacctgaaagccatcatctttttcgaccccgacgcaaagggactgtccgatcctggcaaaattaagcggctgagggctcaggtccaggtgagcctggaggactatatcaatgacagacagtacgattcacgagggcggtttggagaactgctgctgctgctgccaaccctgcagagtattacatggcagatgatcgagcagatccagttcattaaactgttcggcatggcaaagatcgacaacctgctgcaggagatgctgctgggaggggccccctctgatgctcctcatgcacaccacccactgcatccccacctgatgcaggaacatatgggcaccaatgtgatcgtcgccaacactatgcctacacacctgtccaatggacagatgtgtgagtggccacgccccaggggccaggctgcagcccctgaagctccacagcccgcacctccagggggaagcggcagcgagccctacaagctgctgcctggagccgtggcaaccattgtgagaccactgtccgctatcccccagcctactattaccaaacaggaagtcatctgaggactagtccctgttcccagagcccacttttttttctttttttgaaataaaatagcctgtctttcagatctaaaaaaaaaaaaaaaaaaaaaaaaaaaaaaaaaaaaaaaaaaaaaaaaaaaaaaaaaaaaaaaaaaaaaaaaaaaaaaaaaaaaaaaaaaaaaaaaaaaa

SEQ ID NO: 4616 - RNA, 1673 nt, synthetic construct
  misc_feature 1..1673: note = mRNA a-1 (A100) (opt28) from Homo sapiens__NP_000448.3__HNF4A(1-474)(S87A_K106R_K108R_K126R_K 127R_S142A_S143A_S148A_T166A_S167A_S313A_S378A_T429A_T432A_ S436A_K458R)
  source 1..1673: mol_type = other RNA
aggagagtcccgcagtcggcgtccagcggctctgcttgttcgtgtgtgtgtcgttgcaggccttattcaagcttaccatgcggctgagcaagaccctggtggacatggatatggcagactactccgccgctctggatccagcatatacaactctggagttcgaaaacgtccaggtgctgaccatgggaaatgacacatctccctcagagggcactaacctgaatgcccctaacagtctgggggtgagcgctctgtgcgcaatctgcggagacagggccaccggcaaacactacggggcttcctcttgtgatggatgcaagggctttttcagacgcgcagtccggaaaaatcatatgtacagctgccgattttcaaggcagtgcgtggtggacagagaccgccggaaccagtgcaggtattgtagactgaagaagtgcttccgagccggaatgcggcgcgaagctgtccagaatgagagggatagaattagtacacggcgagcagcctacgaagactccgcactgccaagcatcaacgctctgctgcaggccgaggtgctgtctaggcagatcgcagctcccgtgagcgggattaacggcgatatcagagccaaaaagattgcatccatcgctgacgtctgcgaatcaatgaaagagcagctgctggtgctggtggagtgggccaagtacatccctgcattttgcgaactgccactggacgatcaggtcgctctgctgcgcgcccacgcaggagagcatctgctgctgggcgccactaagcggagtatggtgttcaaagacgtgctgctgctggggaatgactatattgtccccaggcactgccctgaactggctgagatgagcagagtgtctatccgaatcctggatgaactggtgctgccattccaggagctgcagattgacgataacgaatacgcatacctgaaggccatcatctttttcgaccccgacgcaaaaggactgtccgatcctggcaagattaagcggctgcgcgctcaggtccaggtgagcctggaggactatatcaatgacaggcagtacgattcaagagggcggtttggagaactgctgctgctgctgccaaccctgcagagtattacatggcagatgatcgagcagatccagttcattaaactgttcggcatggcaaagatcgacaacctgctgcaggagatgctgctgggaggggccccctctgatgctcctcatgcacaccacccactgcatccccacctgatgcaggaacatatgggcaccaatgtgatcgtcgccaacactatgcctacacacctgtccaatggacagatgtgtgagtggccacgccccaggggccaggctgcagcccctgaagctccacagcccgcacctccagggggaagcggcagcgagccctacaaactgctgcctggagccgtggcaaccattgtgagaccactgtccgctatcccccagcctactattaccaagcaggaagtcatctgaggactagtccctgttcccagagcccacttttttttctttttttgaaataaaatagcctgtctttcagatctaaaaaaaaaaaaaaaaaaaaaaaaaaaaaaaaaaaaaaaaaaaaaaaaaaaaaaaaaaaaaaaaaaaaaaaaaaaaaaaaaaaaaaaaaaaaaaaaaaaa

SEQ ID NO: 4617 - RNA, 1673 nt, synthetic construct
  misc_feature 1..1673: note = mRNA a-1 (A100) (opt28) from Homo sapiens__NP_000448.3__HNF4A(1-474)(S87A_K106R_K108R_K126R_K 127R)
  source 1..1673: mol_type = other RNA
aggagagtcccgcagtcggcgtccagcggctctgcttgttcgtgtgtgtgtcgttgcaggccttattcaagcttaccatgcggctgagcaagaccctggtggacatggatatggcagactactccgccgctctggatccagcatatacaactctggagttcgaaaacgtccaggtgctgaccatgggaaatgacacatctccctcagagggcactaacctgaatgcccctaacagtctgggggtgagcgctctgtgcgcaatctgcggagacagggccaccggcaaacactacggggcttcctcttgtgatggatgcaagggctttttcagacgcgcagtccggaaaaatcatatgtacagctgccgattttcaaggcagtgcgtggtggacagagaccgccggaaccagtgcaggtattgtagactgaagaagtgcttccgagccggaatgcggcgcgaagctgtccagaatgagagggatagaattagtacacggcgatccagctacgaagactctagcctgccatccatcaacgcactgctgcaggccgaggtgctgtcaaggcagatcaccagtcccgtgagcgggattaacggcgatatcagagctaaaaagattgcatctatcgccgacgtctgcgaatccatgaaagagcagctgctggtgctggtggagtgggcaaagtacatccctgctttttgcgaactgccactggacgatcaggtcgccctgctgcgcgcacacgctggagagcatctgctgctgggcgccactaagcggagcatggtgttcaaagacgtgctgctgctggggaatgactatattgtccccaggcactgccctgaactggcagagatgtcaagagtgagtatccgaatcctggatgaactggtgctgccattccaggagctgcagattgacgataacgaatacgcttacctgaaggccatcatctttttcgaccccgacgcaaaaggactgtctgatcctggcaagattaagcggctgcgctcccaggtccaggtgagcctggaggactatatcaatgacaggcagtacgatagcagagggcggtttggagaactgctgctgctgctgccaacactgcagtccattacctggcagatgatcgagcagatccagttcattaaactgttcggcatggccaagatcgacaacctgctgcaggagatgctgctgggagggtcaccctctgatgctcctcatgcacaccacccactgcatccccacctgatgcaggaacatatgggcactaatgtgatcgtcgccaacacaatgcctacccacctgagtaatggacagatgtgtgagtggccacgccccaggggccaggcagctactcctgaaaccccacagcccagccctccagggggatccggctctgagccctacaaactgctgcctggagcagtggccacaattgtgaagccactgagcgctatcccccagcctaccattactaaacaggaagtcatctgaggactagtccctgttcccagagcccacttttttttctttttttgaaataaaatagcctgtctttcagatctaaaaaaaaaaaaaaaaaaaaaaaaaaaaaaaaaaaaaaaaaaaaaaaaaaaaaaaaaaaaaaaaaaaaaaaaaaaaaaaaaaaaaaaaaaaaaaaaaaaa

SEQ ID NO: 4618 - RNA, 1673 nt, synthetic construct
  misc_feature 1..1673: note = mRNA a-1 (A100) (opt28) from Homo sapiens__NP_000448.3__HNF4A(1-474)(S87A_K106R_K108R_K126R_K 127R_S142A_S143A_S148A_T166A_S167A_S313A_S378A_T429A_T432A_ S436A_K458R_S461A)
  source 1..1673: mol_type = other RNA
aggagagtcccgcagtcggcgtccagcggctctgcttgttcgtgtgtgtgtcgttgcaggccttattcaagcttaccatgcggctgagcaagaccctggtggacatggatatggcagactactccgccgctctggatccagcatatacaactctggagttcgaaaacgtccaggtgctgaccatgggaaatgacacatctccctcagagggcactaacctgaatgcccctaacagtctgggggtgagcgctctgtgcgcaatctgcggagacagggccaccggcaaacactacggggcttcctcttgtgatggatgcaagggctttttcagacgcgcagtccggaaaaatcatatgtacagctgccgattttcaaggcagtgcgtggtggacagagaccgccggaaccagtgcaggtattgtagactgaagaagtgcttccgagccggaatgcggcgcgaagctgtccagaatgagagggatagaattagtacacggcgagcagcctacgaagactccgcactgccaagcatcaacgctctgctgcaggccgaggtgctgtctaggcagatcgcagctcccgtgagcgggattaacggcgatatcagagccaaaaagattgcatccatcgctgacgtctgcgaatcaatgaaagagcagctgctggtgctggtggagtgggccaagtacatccctgcattttgcgaactgccactggacgatcaggtcgctctgctgcgcgcccacgcaggagagcatctgctgctgggcgccactaagcggagtatggtgttcaaagacgtgctgctgctggggaatgactatattgtccccaggcactgccctgaactggctgagatgagcagagtgtctatccgaatcctggatgaactggtgctgccattccaggagctgcagattgacgataacgaatacgcatacctgaaggccatcatctttttcgaccccgacgcaaaaggactgtccgatcctggcaagattaagcggctgcgcgctcaggtccaggtgagcctggaggactatatcaatgacaggcagtacgattcaagagggcggtttggagaactgctgctgctgctgccaaccctgcagagtattacatggcagatgatcgagcagatccagttcattaaactgttcggcatggcaaagatcgacaacctgctgcaggagatgctgctgggaggggccccctctgatgctcctcatgcacaccacccactgcatccccacctgatgcaggaacatatgggcaccaatgtgatcgtcgccaacactatgcctacacacctgtccaatggacagatgtgtgagtggccacgccccaggggccaggctgcagcccctgaagctccacagcccgcacctccagggggaagcggcagcgagccctacaaactgctgcctggagccgtggcaaccattgtgagaccactggctgccatcccccagcctactattaccaagcaggaagtcatctgaggactagtccctgttcccagagcccacttttttttctttttttgaaataaaatagcctgtctttcagatctaaaaaaaaaaaaaaaaaaaaaaaaaaaaaaaaaaaaaaaaaaaaaaaaaaaaaaaaaaaaaaaaaaaaaaaaaaaaaaaaaaaaaaaaaaaaaaaaaaaa

SEQ ID NO: 4619 - RNA, 1673 nt, synthetic construct
  misc_feature 1..1673: note = mRNA a-1 (A100) (opt28) from Homo sapiens__NP_000448.3__HNF4A(1-474)(S87A_K106R_K108R_K126R_K 127R_S142A_S143A_S148A_T166A_S167A_S313A_S378A_T429A_T432A_ S436A_K458R_S461E)
  source 1..1673: mol_type = other RNA
aggagagtcccgcagtcggcgtccagcggctctgcttgttcgtgtgtgtgtcgttgcaggccttattcaagcttaccatgcggctgagcaagaccctggtggacatggatatggcagactactccgccgctctggatccagcatatacaactctggagttcgaaaacgtccaggtgctgaccatgggaaatgacacatctccctcagagggcactaacctgaatgcccctaacagtctgggggtgagcgctctgtgcgcaatctgcggagacagggccaccggcaaacactacggggcttcctcttgtgatggatgcaagggctttttcagacgcgcagtccggaaaaatcatatgtacagctgccgattttcaaggcagtgcgtggtggacagagaccgccggaaccagtgcaggtattgtagactgaagaagtgcttccgagccggaatgcggcgcgaagctgtccagaatgagagggatagaattagtacacggcgagcagcctacgaagactccgcactgccaagcatcaacgctctgctgcaggccgaggtgctgtctaggcagatcgcagctcccgtgagcgggattaacggcgatatcagagccaaaaagattgcatccatcgctgacgtctgcgaatcaatgaaagagcagctgctggtgctggtggagtgggccaagtacatccctgcattttgcgaactgccactggacgatcaggtcgctctgctgcgcgcccacgcaggagagcatctgctgctgggcgccactaagcggagtatggtgttcaaagacgtgctgctgctggggaatgactatattgtccccaggcactgccctgaactggctgagatgagcagagtgtctatccgaatcctggatgaactggtgctgccattccaggagctgcagattgacgataacgaatacgcatacctgaaggccatcatctttttcgaccccgacgcaaaaggactgtccgatcctggcaagattaagcggctgcgcgctcaggtccaggtgagcctggaggactatatcaatgacaggcagtacgattcaagagggcggtttggagaactgctgctgctgctgccaaccctgcagagtattacatggcagatgatcgagcagatccagttcattaaactgttcggcatggcaaagatcgacaacctgctgcaggagatgctgctgggaggggccccctctgatgctcctcatgcacaccacccactgcatccccacctgatgcaggaacatatgggcaccaatgtgatcgtcgccaacactatgcctacacacctgtccaatggacagatgtgtgagtggccacgccccaggggccaggctgcagcccctgaagctccacagcccgcacctccagggggaagcggcagcgagccctacaaactgctgcctggagccgtggcaaccattgtgagaccactggaagctatcccccagcctactattaccaagcaggaggtcatctgaggactagtccctgttcccagagcccacttttttttctttttttgaaataaaatagcctgtctttcagatctaaaaaaaaaaaaaaaaaaaaaaaaaaaaaaaaaaaaaaaaaaaaaaaaaaaaaaaaaaaaaaaaaaaaaaaaaaaaaaaaaaaaaaaaaaaaaaaaaaaa

SEQ ID NO: 4620 - RNA, 1673 nt, synthetic construct
  misc_feature 1..1673: note = mRNA a-1 (A100) (opt28) from Homo sapiens__NP_000448.3__HNF4A(1-474)(S87A_K106R_K108R_K126R_K 127R_S142A_S143A_S148E_T166A_S167E_S313A_S378E_T429E_T432E_ S436E_K458R_S461E)
  source 1..1673: mol_type = other RNA
aggagagtcccgcagtcggcgtccagcggctctgcttgttcgtgtgtgtgtcgttgcaggccttattcaagcttaccatgcggctgagcaagaccctggtggacatggatatggcagactactccgccgctctggatccagcatatacaactctggagttcgaaaacgtccaggtgctgaccatgggaaatgacacatctccctcagagggcactaacctgaatgcccctaacagtctgggggtgagcgctctgtgcgcaatctgcggagacagggccaccggcaaacactacggggcttcctcttgtgatggatgcaagggctttttcagacgcgcagtccggaaaaatcatatgtacagctgccgattttcaaggcagtgcgtggtggacagagaccgccggaaccagtgcaggtattgtagactgaagaagtgcttccgagccggaatgcggcgcgaagctgtccagaatgagagggatagaattagtacacggcgagcagcctacgaagactccgagctgccaagcatcaacgcactgctgcaggctgaagtgctgtctaggcagatcgccgagcccgtgagcgggattaacggcgatatcagagctaaaaagattgcatccatcgccgacgtctgcgagtcaatgaaagaacagctgctggtgctggtggagtgggcaaagtacatccctgctttttgcgaactgccactggacgatcaggtcgccctgctgcgcgcacacgctggagagcatctgctgctgggcgccactaagcggagtatggtgttcaaagacgtgctgctgctggggaatgactatattgtccccaggcactgccctgaactggcagagatgagcagagtgtctatccgaatcctggatgaactggtgctgccattccaggagctgcagattgacgataacgaatacgcctacctgaaggctatcatctttttcgaccccgacgcaaaaggactgtccgatcctggcaagattaagcggctgcgcgcccaggtccaggtgagcctggaggactatatcaatgacaggcagtacgattcaagagggcggtttggagagctgctgctgctgctgccaaccctgcagagtattacatggcagatgatcgaacagatccagttcattaaactgttcggcatggcaaagatcgacaacctgctgcaggagatgctgctgggaggggaaccctctgatgctcctcatgcacaccacccactgcatccccacctgatgcaggagcatatgggcaccaatgtgatcgtcgccaacactatgcctacacacctgtccaatggacagatgtgtgaatggccacgccccaggggccaggctgcagagcctgaggaaccacagcccgagcctccagggggaagcggcagcgaaccctacaaactgctgcctggagccgtggctaccattgtgagaccactggaggcaatcccccagcctactattaccaagcaggaagtcatctgaggactagtccctgttcccagagcccacttttttttctttttttgaaataaaatagcctgtctttcagatctaaaaaaaaaaaaaaaaaaaaaaaaaaaaaaaaaaaaaaaaaaaaaaaaaaaaaaaaaaaaaaaaaaaaaaaaaaaaaaaaaaaaaaaaaaaaaaaaaaaa

SEQ ID NO: 4621 - RNA, 1673 nt, synthetic construct
  misc_feature 1..1673: note = mRNA a-1 (A100) (opt28) from Homo sapiens__NP_000448.3__HNF4A(1-474)(S87A_K106R_K108R_K126R_K 127R_S142A_S143A_S148A_T166A_S167A_K179R_K180R_S313A_S378A_ T429A_T432A_S436A_K458R_S461E)
  source 1..1673: mol_type = other RNA
aggagagtcccgcagtcggcgtccagcggctctgcttgttcgtgtgtgtgtcgttgcaggccttattcaagcttaccatgcggctgagcaagaccctggtggacatggatatggcagactactccgccgctctggatccagcatatacaactctggagttcgaaaacgtccaggtgctgaccatgggaaatgacacatctccctcagagggcactaacctgaatgcccctaacagtctgggggtgagcgctctgtgcgcaatctgcggagacagggccaccggcaaacactacggggcttcctcttgtgatggatgcaagggctttttcagacgcgcagtccggaaaaatcatatgtacagctgccgattttcaaggcagtgcgtggtggacagagaccgccggaaccagtgcaggtattgtagactgaagaagtgcttccgagccggaatgcggcgcgaagctgtccagaatgagagggatagaattagtacacggcgagcagcctacgaagactccgcactgccaagcatcaacgctctgctgcaggccgaggtgctgtctaggcagatcgcagctcccgtgagcgggattaacggcgatatcagagcccgccggattgcatccatcgctgacgtctgcgaatcaatgaaagagcagctgctggtgctggtggagtgggccaagtacatccctgcattttgcgaactgccactggacgatcaggtcgctctgctgagggcccacgcaggagagcatctgctgctgggcgccactaaaagaagtatggtgttcaaggacgtgctgctgctggggaatgactatattgtcccccgacactgccctgaactggctgagatgagccgggtgtctatccgcatcctggatgaactggtgctgccattccaggagctgcagattgacgataacgaatacgcatacctgaaggccatcatctttttcgaccccgacgcaaaaggactgtccgatcctggcaagattaaaaggctgagagctcaggtccaggtgagcctggaggactatatcaatgaccggcagtacgattcacgcgggaggtttggagaactgctgctgctgctgccaaccctgcagagtattacatggcagatgatcgagcagatccagttcattaagctgttcggcatggcaaagatcgacaacctgctgcaggagatgctgctgggaggggccccctctgatgctcctcatgcacaccacccactgcatccccacctgatgcaggaacatatgggcaccaatgtgatcgtcgccaacactatgcctacacacctgtccaatggacagatgtgtgagtggccaagaccccgaggccaggctgcagcccctgaagctccacagcccgcacctccagggggaagcggcagcgagccctacaaactgctgcctggagccgtggcaaccattgtgcggccactggaagctatcccccagcctactattaccaagcaggaggtcatctgaggactagtccctgttcccagagcccacttttttttctttttttgaaataaaatagcctgtctttcagatctaaaaaaaaaaaaaaaaaaaaaaaaaaaaaaaaaaaaaaaaaaaaaaaaaaaaaaaaaaaaaaaaaaaaaaaaaaaaaaaaaaaaaaaaaaaaaaaaaaaa

SEQ ID NO: 4622 - RNA, 1673 nt, synthetic construct
  misc_feature 1..1673: note = mRNA a-1 (A100) (opt28) from Homo sapiens__NP_000448.3__HNF4A(1-474)(S87A_K106R_K108R_K126R_K 127R_S142A_S143A_S148A_T166A_S167A_K300R_K307R_K309R_S313A_ S378A_T429A_T432A_S436A_K458R_S461E)
  source 1..1673: mol_type = other RNA
aggagagtcccgcagtcggcgtccagcggctctgcttgttcgtgtgtgtgtcgttgcaggccttattcaagcttaccatgcggctgagcaagaccctggtggacatggatatggcagactactccgccgctctggatccagcatatacaactctggagttcgaaaacgtccaggtgctgaccatgggaaatgacacatctccctcagagggcactaacctgaatgcccctaacagtctgggggtgagcgctctgtgcgcaatctgcggagacagggccaccggcaaacactacggggcttcctcttgtgatggatgcaagggctttttcagacgcgcagtccggaaaaatcatatgtacagctgccgattttcaaggcagtgcgtggtggacagagaccgccggaaccagtgcaggtattgtagactgaagaagtgcttccgagccggaatgcggcgcgaagctgtccagaatgagagggatagaattagtacacggcgagcagcctacgaagactccgcactgccaagcatcaacgctctgctgcaggccgaggtgctgtctaggcagatcgcagctcccgtgagcgggattaacggcgatatcagagccaaaaagattgcatccatcgctgacgtctgcgaatcaatgaaagagcagctgctggtgctggtggagtgggccaagtacatccctgcattttgcgaactgccactggacgatcaggtcgctctgctgcgcgcccacgcaggagagcatctgctgctgggcgccactaagcggagtatggtgttcaaagacgtgctgctgctggggaatgactatattgtccccaggcactgccctgaactggctgagatgagcagagtgtctatccgaatcctggatgaactggtgctgccattccaggagctgcagattgacgataacgaatacgcatacctgaaggccatcatctttttcgaccccgacgcacggggactgtccgatcctggccgcattaggagactgcgggctcaggtccaggtgagcctggaggactatatcaatgaccgccagtacgattcaagggggagatttggagaactgctgctgctgctgccaaccctgcagagtattacatggcagatgatcgagcagatccagttcattaaactgttcggcatggcaaagatcgacaacctgctgcaggagatgctgctgggaggggccccctctgatgctcctcatgcacaccacccactgcatccccacctgatgcaggaacatatgggcaccaatgtgatcgtcgccaacactatgcctacacacctgtccaatggacagatgtgtgagtggccacgaccccggggccaggctgcagcccctgaagctccacagcccgcacctccagggggaagcggcagcgagccctacaagctgctgcctggagccgtggcaaccattgtgaggccactggaagctatcccccagcctactattaccaaacaggaggtcatctgaggactagtccctgttcccagagcccacttttttttctttttttgaaataaaatagcctgtctttcagatctaaaaaaaaaaaaaaaaaaaaaaaaaaaaaaaaaaaaaaaaaaaaaaaaaaaaaaaaaaaaaaaaaaaaaaaaaaaaaaaaaaaaaaaaaaaaaaaaaaaa

SEQ ID NO: 4623 - RNA, 1673 nt, synthetic construct
  misc_feature 1..1673: note = mRNA a-1 (A100) (opt28) from Homo sapiens__NP_000448.3__HNF4A(1-474)(S87A_K106R_K108R_K126R_K 127R_S142A_S143A_S148A_T166A_S167A_S313A_S378A_T429A_T432A_ S436A_K447R_K458R_S461E_K470R)
  source 1..1673: mol_type = other RNA
aggagagtcccgcagtcggcgtccagcggctctgcttgttcgtgtgtgtgtcgttgcaggccttattcaagcttaccatgcggctgagcaagaccctggtggacatggatatggcagactactccgccgctctggatccagcatatacaactctggagttcgaaaacgtccaggtgctgaccatgggaaatgacacatctccctcagagggcactaacctgaatgcccctaacagtctgggggtgagcgctctgtgcgcaatctgcggagacagggccaccggcaaacactacggggcttcctcttgtgatggatgcaagggctttttcagacgcgcagtccggaaaaatcatatgtacagctgccgattttcaaggcagtgcgtggtggacagagaccgccggaaccagtgcaggtattgtagactgaagaagtgcttccgagccggaatgcggcgcgaagctgtccagaatgagagggatagaattagtacacggcgagcagcctacgaagactccgcactgccaagcatcaacgctctgctgcaggccgaggtgctgtctaggcagatcgcagctcccgtgagcgggattaacggcgatatcagagccaaaaagattgcatccatcgctgacgtctgcgaatcaatgaaagagcagctgctggtgctggtggagtgggccaagtacatccctgcattttgcgaactgccactggacgatcaggtcgctctgctgcgcgcccacgcaggagagcatctgctgctgggcgccactaagcggagtatggtgttcaaagacgtgctgctgctggggaatgactatattgtccccaggcactgccctgaactggctgagatgagcagagtgtctatccgaatcctggatgaactggtgctgccattccaggagctgcagattgacgataacgaatacgcatacctgaaggccatcatctttttcgaccccgacgcaaaaggactgtccgatcctggcaagattaagcggctgcgcgctcaggtccaggtgagcctggaggactatatcaatgacaggcagtacgattcaagagggcggtttggagaactgctgctgctgctgccaaccctgcagagtattacatggcagatgatcgagcagatccagttcattaaactgttcggcatggcaaagatcgacaacctgctgcaggagatgctgctgggaggggccccctctgatgctcctcatgcacaccacccactgcatccccacctgatgcaggaacatatgggcaccaatgtgatcgtcgccaacactatgcctacacacctgtccaatggacagatgtgtgagtggccacgccccaggggccaggctgcagcccctgaagctccacagcccgcacctccagggggaagcggcagcgagccctacagactgctgcctggagccgtggcaaccattgtgcgaccactggaagctatcccccagcctactattacccggcaggaggtcatctgaggactagtccctgttcccagagcccacttttttttctttttttgaaataaaatagcctgtctttcagatctaaaaaaaaaaaaaaaaaaaaaaaaaaaaaaaaaaaaaaaaaaaaaaaaaaaaaaaaaaaaaaaaaaaaaaaaaaaaaaaaaaaaaaaaaaaaaaaaaaaa

SEQ ID NO: 4624 - RNA, 1673 nt, synthetic construct
  misc_feature 1..1673: note = mRNA a-1 (A100) (opt28) from Homo sapiens__NP_000448.3__HNF4A(1-474)(S87A_K106R_K108R_K126R_K 127R_S142A_S143A_S148A_T166A_S167A_K179R_K180R_K234R_K300R_ K307R_K309R_S313A_S378A_T429A_T432A_S436A_K447R_K458R_S461E _K470R)
  source 1..1673: mol_type = other RNA
aggagagtcccgcagtcggcgtccagcggctctgcttgttcgtgtgtgtgtcgttgcaggccttattcaagcttaccatgcggctgagcaagaccctggtggacatggatatggcagactactccgccgctctggatccagcatatacaactctggagttcgaaaacgtccaggtgctgaccatgggaaatgacacatctccctcagagggcactaacctgaatgcccctaacagtctgggggtgagcgctctgtgcgcaatctgcggagacagggccaccggcaaacactacggggcttcctcttgtgatggatgcaagggctttttcagacgcgcagtccggaaaaatcatatgtacagctgccgattttcaaggcagtgcgtggtggacagagaccgccggaaccagtgcaggtattgtagactgaagaagtgcttccgagccggaatgcggcgcgaagctgtccagaatgagagggatagaattagtacacggcgagcagcctacgaagactccgcactgccaagcatcaacgctctgctgcaggccgaggtgctgtctaggcagatcgcagctcccgtgagcgggattaacggcgatatcagagcccgccggattgcatccatcgctgacgtctgcgaatcaatgaaagagcagctgctggtgctggtggagtgggccaagtacatccctgcattttgcgaactgccactggacgatcaggtcgctctgctgagggcccacgcaggagagcatctgctgctgggcgccactagacgaagtatggtgttcaaagacgtgctgctgctggggaatgactatattgtcccccggcactgccctgaactggctgagatgagccgcgtgtctatcaggatcctggatgaactggtgctgccattccaggagctgcagattgacgataacgaatacgcatacctgaaggccatcatctttttcgaccccgacgcaagaggactgtccgatcctggccggattcgcaggctgagagctcaggtccaggtgagcctggaggactatatcaatgaccgacagtacgattcacgggggaggtttggagaactgctgctgctgctgccaaccctgcagagtattacatggcagatgatcgagcagatccagttcattaagctgttcggcatggcaaaaatcgacaacctgctgcaggagatgctgctgggaggggccccctctgatgctcctcatgcacaccacccactgcatccccacctgatgcaggaacatatgggcaccaatgtgatcgtcgccaacactatgcctacacacctgtccaatggacagatgtgtgagtggccaagaccccgcggccaggctgcagcccctgaagctccacagcccgcacctccagggggaagcggcagcgagccctaccggctgctgcctggagccgtggcaaccattgtgcgaccactggaagctatcccccagcctactattaccaggcaggaggtcatctgaggactagtccctgttcccagagcccacttttttttctttttttgaaataaaatagcctgtctttcagatctaaaaaaaaaaaaaaaaaaaaaaaaaaaaaaaaaaaaaaaaaaaaaaaaaaaaaaaaaaaaaaaaaaaaaaaaaaaaaaaaaaaaaaaaaaaaaaaaaaaa

SEQ ID NO: 4625 - RNA, 1673 nt, synthetic construct
  misc_feature 1..1673: note = mRNA a-1 (A100) (opt28) from Homo sapiens__NP_000448.3__HNF4A(1-474)(S87A_S95A_S99A_K106R_K10 8R_K126R_K127R_S142A_S143A_S148A_T166A_S167A_S313A_S378A_T4 29A_T432A_S436A_K458R_S461E)
  source 1..1673: mol_type = other RNA
aggagagtcccgcagtcggcgtccagcggctctgcttgttcgtgtgtgtgtcgttgcaggccttattcaagcttaccatgcggctgagcaagaccctggtggacatggatatggcagactactccgccgctctggatccagcatatacaactctggagttcgaaaacgtccaggtgctgaccatgggaaatgacacatctccctcagagggcactaacctgaatgcccctaacagtctgggggtgagcgctctgtgcgcaatctgcggagacagggccaccggcaaacactacggggcttcctcttgtgatggatgcaagggctttttcagacgcgcagtccggaaaaatcatatgtacgcctgccgatttgctaggcagtgcgtggtggacagagaccgccggaaccagtgcaggtattgtagactgaagaagtgcttccgagcaggaatgcggcgcgaagccgtccagaatgagagggatagaattagcacacggcgagcagcttacgaagactcagccctgccaagtatcaacgcactgctgcaggctgaggtgctgtccaggcagatcgccgcacccgtgagcgggattaacggcgatatcagagctaaaaagattgcctctatcgcagacgtctgcgaaagcatgaaagagcagctgctggtgctggtggagtgggctaagtacatccctgccttttgcgaactgccactggacgatcaggtcgcactgctgcgcgcccacgctggagagcatctgctgctgggcgcaactaagcggtccatggtgttcaaagacgtgctgctgctggggaatgactatattgtccccaggcactgccctgaactggccgagatgtcaagagtgagtatccgaatcctggatgaactggtgctgccattccaggagctgcagattgacgataacgaatacgcatacctgaaggctatcatctttttcgaccccgacgcaaaaggactgagcgatcctggcaagattaagcggctgcgcgcccaggtccaggtgtctctggaggactatatcaatgacaggcagtacgattccagagggcggtttggagaactgctgctgctgctgccaaccctgcagagcattacatggcagatgatcgagcagatccagttcattaaactgttcggcatggctaagatcgacaacctgctgcaggagatgctgctgggaggggcaccctcagatgcccctcatgctcaccacccactgcatccccacctgatgcaggaacatatgggcaccaatgtgatcgtcgcaaacactatgcctacacacctgagtaatggacagatgtgtgagtggccacgccccaggggccaggccgctgcacctgaagccccacagcccgcacctccagggggatctggctccgagccctacaaactgctgcctggagctgtggccaccattgtgagaccactggaagcaatcccccagcctactattaccaagcaggaggtcatctgaggactagtccctgttcccagagcccacttttttttctttttttgaaataaaatagcctgtctttcagatctaaaaaaaaaaaaaaaaaaaaaaaaaaaaaaaaaaaaaaaaaaaaaaaaaaaaaaaaaaaaaaaaaaaaaaaaaaaaaaaaaaaaaaaaaaaaaaaaaaaa

SEQ ID NO: 4626 - RNA, 1673 nt, synthetic construct
  misc_feature 1..1673: note = mRNA a-1 (A100) (opt28) from Homo sapiens__NP_000448.3__HNF4A(1-474)(S87A_K106R_K108R_K126R_K 127R_S138A_T139A_S142A_S143A_S148A_T166A_S167A_S313A_S378A_ T429A_T432A_S436A_K458R_S461E)
  source 1..1673: mol_type = other RNA
aggagagtcccgcagtcggcgtccagcggctctgcttgttcgtgtgtgtgtcgttgcaggccttattcaagcttaccatgcggctgagcaagaccctggtggacatggatatggcagactactccgccgctctggatccagcatatacaactctggagttcgaaaacgtccaggtgctgaccatgggaaatgacacatctccctcagagggcactaacctgaatgcccctaacagtctgggggtgagcgctctgtgcgcaatctgcggagacagggccaccggcaaacactacggggcttcctcttgtgatggatgcaagggctttttcagacgcgcagtccggaaaaatcatatgtacagctgccgattttcaaggcagtgcgtggtggacagagaccgccggaaccagtgcaggtattgtagactgaagaagtgcttccgagccggaatgcggcgcgaagctgtccagaatgagagggatagaattgcagcccggcgagcagcttacgaagacagtgccctgccatccatcaacgcactgctgcaggctgaggtgctgagcaggcagatcgccgcacccgtgtctgggattaacggcgatatcagagctaaaaagattgccagcatcgcagacgtctgcgaatccatgaaagagcagctgctggtgctggtggagtgggctaagtacatccctgccttttgcgaactgccactggacgatcaggtcgcactgctgcgcgcccacgctggagagcatctgctgctgggcgcaacaaagcggtcaatggtgttcaaagacgtgctgctgctggggaatgactatattgtccccaggcactgccctgaactggccgagatgagtagagtgagcatccgaatcctggatgaactggtgctgccattccaggagctgcagattgacgataacgaatacgcatacctgaaggctatcatctttttcgaccccgacgcaaaaggactgtctgatcctggcaagattaagcggctgcgcgcccaggtccaggtgtccctggaggactatatcaatgacaggcagtacgatagcagagggcggtttggagaactgctgctgctgctgccaactctgcagtcaattacctggcagatgatcgagcagatccagttcattaaactgttcggcatggctaagatcgacaacctgctgcaggagatgctgctgggaggggcacccagtgatgcccctcatgctcaccacccactgcatccccacctgatgcaggaacatatgggcacaaatgtgatcgtcgcaaacaccatgcctactcacctgtctaatggacagatgtgtgagtggccacgccccaggggccaggccgctgcacctgaagccccacagcccgcacctccagggggatccggcagcgagccctacaaactgctgcctggagctgtggccacaattgtgagaccactggaagcaatcccccagcctaccattactaagcaggaggtcatctgaggactagtccctgttcccagagcccacttttttttctttttttgaaataaaatagcctgtctttcagatctaaaaaaaaaaaaaaaaaaaaaaaaaaaaaaaaaaaaaaaaaaaaaaaaaaaaaaaaaaaaaaaaaaaaaaaaaaaaaaaaaaaaaaaaaaaaaaaaaaaa

SEQ ID NO: 4627 - RNA, 1673 nt, synthetic construct
  misc_feature 1..1673: note = mRNA a-1 (A100) (opt28) from Homo sapiens__NP_000448.3__HNF4A(1-474)(S87A_S95A_S99A_K106R_K10 8R_K126R_K127R_S138A_T139A_S142A_S143A_S148A_T166A_S167A_S3 13A_S378A_T429A_T432A_S436A_K458R_S461E)
  source 1..1673: mol_type = other RNA
aggagagtcccgcagtcggcgtccagcggctctgcttgttcgtgtgtgtgtcgttgcaggccttattcaagcttaccatgcggctgagcaagaccctggtggacatggatatggcagactactccgccgctctggatccagcatatacaactctggagttcgaaaacgtccaggtgctgaccatgggaaatgacacatctccctcagagggcactaacctgaatgcccctaacagtctgggggtgagcgctctgtgcgcaatctgcggagacagggccaccggcaaacactacggggcttcctcttgtgatggatgcaagggctttttcagacgcgcagtccggaaaaatcatatgtacgcctgccgatttgctaggcagtgcgtggtggacagagaccgccggaaccagtgcaggtattgtagactgaagaagtgcttccgagcaggaatgcggcgcgaagccgtccagaatgagagggatagaattgcagctcggcgagccgcatacgaagacagcgctctgccatcaatcaacgccctgctgcaggcagaggtgctgagtaggcagatcgctgcccccgtgtccgggattaacggcgatatcagagctaaaaagattgcaagcatcgccgacgtctgcgaatctatgaaagagcagctgctggtgctggtggagtgggcaaagtacatccctgccttttgcgaactgccactggacgatcaggtcgctctgctgcgcgcacacgccggagagcatctgctgctgggcgcaacaaagcggagcatggtgttcaaagacgtgctgctgctggggaatgactatattgtccccaggcactgccctgaactggctgagatgtccagagtgtcaatccgaatcctggatgaactggtgctgccattccaggagctgcagattgacgataacgaatacgcatacctgaaggccatcatctttttcgaccccgacgctaaaggactgagtgatcctggcaagattaagcggctgcgcgcacaggtccaggtgagcctggaggactatatcaatgacaggcagtacgattctagagggcggtttggagaactgctgctgctgctgccaactctgcagtccattacctggcagatgatcgagcagatccagttcattaaactgttcggcatggccaagatcgacaacctgctgcaggagatgctgctgggaggggctcccagcgatgcacctcatgcccaccacccactgcatccccacctgatgcaggaacatatgggcacaaatgtgatcgtcgctaacaccatgcctactcacctgtcaaatggacagatgtgtgagtggccacgccccaggggccaggcagccgcacctgaagctccacagcccgcccctccagggggaagtggctctgagccctacaaactgctgcctggagcagtggctacaattgtgagaccactggaagccatcccccagcctaccattactaagcaggaggtcatctgaggactagtccctgttcccagagcccacttttttttctttttttgaaataaaatagcctgtctttcagatctaaaaaaaaaaaaaaaaaaaaaaaaaaaaaaaaaaaaaaaaaaaaaaaaaaaaaaaaaaaaaaaaaaaaaaaaaaaaaaaaaaaaaaaaaaaaaaaaaaaa

SEQ ID NO: 4628 - RNA, 1673 nt, synthetic construct
  misc_feature 1..1673: note = mRNA a-1 (A100) (opt29) from Homo sapiens__NP_000448.3__HNF4A(1-474)
  source 1..1673: mol_type = other RNA
aggagagtcccgcagtcggcgtccagcggctctgcttgttcgtgtgtgtgtcgttgcaggccttattcaagcttaccatgagactgagcaagaccctggtggacatggacatggccgactactctgccgccctggaccctgcctacaccaccctggagttcgaaaacgtgcaagtgctgaccatgggcaacgacaccagccctagcgagggcaccaacctgaacgcccctaatagcctgggagtgtccgccctgtgtgccatctgtggcgatagagccaccggcaagcactacggcgccagctcttgtgatggctgcaagggcttcttccggcggagcgtgcggaagaaccacatgtacagctgccggttcagccggcagtgcgtggtggacaaggataagcggaaccagtgccggtactgcagactgaagaagtgcttcagagccggcatgaagaaagaagccgtgcagaacgagcgggaccggatcagcaccagaagaagcagctacgaggacagcagcctgcccagcatcaacgccctgctgcaggccgaggtgctgagcagacagatcaccagcccagtgtccggcatcaacggcgacatccgggccaagaagatcgccagcattgccgacgtgtgcgagagcatgaaggaacagctgctggtgctggtggaatgggccaagtacatccccgccttttgcgagctgcccctggacgatcaggtggccctgctgagagcacacgccggcgaacatctgctgctgggagccaccaagcggagcatggtgttcaaggacgtgctgctgctgggcaacgactacatcgtgcccagacactgccctgagctggccgagatgagccgggtgtccatcagaatcctggacgaactggtgctgccgtttcaggaactgcagatcgacgacaacgagtacgcctacctgaaggccatcatctttttcgaccccgacgccaagggcctgagcgaccctggcaagatcaagcggctgagaagccaggtgcaagtgtccctggaagattacatcaacgaccggcagtacgacagccggggcagatttggcgaactgctcctgctgctgcccaccctgcagagcatcacctggcagatgatcgagcagatccagttcatcaagctgttcggcatggccaagatcgacaatctgctgcaggaaatgctgctcgggggcagcccttctgatgcccctcatgcccaccaccctctgcaccctcacctgatgcaagaacacatgggcaccaatgtgatcgtggccaacacaatgcccacccacctgagcaacggccagatgtgcgagtggcccagacctagaggacaggccgccacacctgagacacctcagccttctccacctggcggctctggcagcgagccttacaaactgctgcctggcgctgtggccaccatcgtgaaacctctgagcgccatcccccagcccaccatcaccaagcaggaagtgatctgaggactagtccctgttcccagagcccacttttttttctttttttgaaataaaatagcctgtctttcagatctaaaaaaaaaaaaaaaaaaaaaaaaaaaaaaaaaaaaaaaaaaaaaaaaaaaaaaaaaaaaaaaaaaaaaaaaaaaaaaaaaaaaaaaaaaaaaaaaaaaa

SEQ ID NO: 4629 - RNA, 1673 nt, synthetic construct
  misc_feature 1..1673: note = mRNA a-1 (A100) (opt29) from Homo sapiens__NP_000448.3__HNF4A(1-474)(S313A)
  source 1..1673: mol_type = other RNA
aggagagtcccgcagtcggcgtccagcggctctgcttgttcgtgtgtgtgtcgttgcaggccttattcaagcttaccatgagactgagcaagaccctggtggacatggacatggccgactactctgccgccctggaccctgcctacaccaccctggagttcgaaaacgtgcaagtgctgaccatgggcaacgacaccagccctagcgagggcaccaacctgaacgcccctaatagcctgggagtgtccgccctgtgtgccatctgtggcgatagagccaccggcaagcactacggcgccagctcttgtgatggctgcaagggcttcttccggcggagcgtgcggaagaaccacatgtacagctgccggttcagccggcagtgcgtggtggacaaggataagcggaaccagtgccggtactgcagactgaagaagtgcttcagagccggcatgaagaaagaagccgtgcagaacgagcgggaccggatcagcaccagaagaagcagctacgaggacagcagcctgcccagcatcaacgccctgctgcaggccgaggtgctgagcagacagatcaccagcccagtgtccggcatcaacggcgacatccgggccaagaagatcgccagcattgccgacgtgtgcgagagcatgaaggaacagctgctggtgctggtggaatgggccaagtacatccccgccttttgcgagctgcccctggacgatcaggtggccctgctgagagcacacgccggcgaacatctgctgctgggagccaccaagcggagcatggtgttcaaggacgtgctgctgctgggcaacgactacatcgtgcccagacactgccctgagctggccgagatgagccgggtgtccatcagaatcctggacgaactggtgctgccgtttcaggaactgcagatcgacgacaacgagtacgcctacctgaaggccatcatctttttcgaccccgacgccaagggcctgagcgaccctggcaagatcaagcggctgagagcccaggtgcaagtgtccctggaagattacatcaacgaccggcagtacgacagccggggcagatttggcgaactgctcctgctgctgcccaccctgcagagcatcacctggcagatgatcgagcagatccagttcatcaagctgttcggcatggccaagatcgacaatctgctgcaggaaatgctgctcgggggcagcccttctgatgcccctcatgcccaccaccctctgcaccctcacctgatgcaagaacacatgggcaccaatgtgatcgtggccaacacaatgcccacccacctgagcaacggccagatgtgcgagtggcccagacctagaggacaggccgccacacctgagacacctcagccttctccacctggcggctctggcagcgagccttacaaactgctgcctggcgctgtggccaccatcgtgaaacctctgagcgccatcccccagcccaccatcaccaagcaggaagtgatctgaggactagtccctgttcccagagcccacttttttttctttttttgaaataaaatagcctgtctttcagatctaaaaaaaaaaaaaaaaaaaaaaaaaaaaaaaaaaaaaaaaaaaaaaaaaaaaaaaaaaaaaaaaaaaaaaaaaaaaaaaaaaaaaaaaaaaaaaaaaaaa

SEQ ID NO: 4630 - RNA, 1673 nt, synthetic construct
  misc_feature 1..1673: note = mRNA a-1 (A100) (opt29) from Homo sapiens__NP_000448.3__HNF4A(1-474)(S313E)
  source 1..1673: mol_type = other RNA
aggagagtcccgcagtcggcgtccagcggctctgcttgttcgtgtgtgtgtcgttgcaggccttattcaagcttaccatgagactgagcaagaccctggtggacatggacatggccgactactctgccgccctggaccctgcctacaccaccctggagttcgaaaacgtgcaagtgctgaccatgggcaacgacaccagccctagcgagggcaccaacctgaacgcccctaatagcctgggagtgtccgccctgtgtgccatctgtggcgatagagccaccggcaagcactacggcgccagctcttgtgatggctgcaagggcttcttccggcggagcgtgcggaagaaccacatgtacagctgccggttcagccggcagtgcgtggtggacaaggataagcggaaccagtgccggtactgcagactgaagaagtgcttcagagccggcatgaagaaagaagccgtgcagaacgagcgggaccggatcagcaccagaagaagcagctacgaggacagcagcctgcccagcatcaacgccctgctgcaggccgaggtgctgagcagacagatcaccagcccagtgtccggcatcaacggcgacatccgggccaagaagatcgccagcattgccgacgtgtgcgagagcatgaaggaacagctgctggtgctggtggaatgggccaagtacatccccgccttttgcgagctgcccctggacgatcaggtggccctgctgagagcacacgccggcgaacatctgctgctgggagccaccaagcggagcatggtgttcaaggacgtgctgctgctgggcaacgactacatcgtgcccagacactgccctgagctggccgagatgagccgggtgtccatcagaatcctggacgaactggtgctgccgtttcaggaactgcagatcgacgacaacgagtacgcctacctgaaggccatcatctttttcgaccccgacgccaagggcctgagcgaccctggcaagatcaagcggctgagagaacaggtgcaagtgtccctggaagattacatcaacgaccggcagtacgacagccggggcagatttggcgaactgctcctgctgctgcccaccctgcagagcatcacctggcagatgatcgagcagatccagttcatcaagctgttcggcatggccaagatcgacaatctgctgcaggaaatgctgctcgggggcagcccttctgatgcccctcatgcccaccaccctctgcaccctcacctgatgcaagaacacatgggcaccaatgtgatcgtggccaacacaatgcccacccacctgagcaacggccagatgtgcgagtggcccagacctagaggacaggccgccacacctgagacacctcagccttctccacctggcggctctggcagcgagccttacaaactgctgcctggcgctgtggccaccatcgtgaaacctctgagcgccatcccccagcccaccatcaccaagcaggaagtgatctgaggactagtccctgttcccagagcccacttttttttctttttttgaaataaaatagcctgtctttcagatctaaaaaaaaaaaaaaaaaaaaaaaaaaaaaaaaaaaaaaaaaaaaaaaaaaaaaaaaaaaaaaaaaaaaaaaaaaaaaaaaaaaaaaaaaaaaaaaaaaaa

SEQ ID NO: 4631 - RNA, 1673 nt, synthetic construct
  misc_feature 1..1673: note = mRNA a-1 (A100) (opt29) from Homo sapiens__NP_000448.3__HNF4A(1-474)(S142A_S143A)
  source 1..1673: mol_type = other RNA
aggagagtcccgcagtcggcgtccagcggctctgcttgttcgtgtgtgtgtcgttgcaggccttattcaagcttaccatgagactgagcaagaccctggtggacatggacatggccgactactctgccgccctggaccctgcctacaccaccctggagttcgaaaacgtgcaagtgctgaccatgggcaacgacaccagccctagcgagggcaccaacctgaacgcccctaatagcctgggagtgtccgccctgtgtgccatctgtggcgatagagccaccggcaagcactacggcgccagctcttgtgatggctgcaagggcttcttccggcggagcgtgcggaagaaccacatgtacagctgccggttcagccggcagtgcgtggtggacaaggataagcggaaccagtgccggtactgcagactgaagaagtgcttcagagccggcatgaagaaagaagccgtgcagaacgagcgggaccggatcagcaccagaagagccgcctacgaggacagcagcctgcccagcatcaacgccctgctgcaggccgaggtgctgagcagacagatcaccagcccagtgtccggcatcaacggcgacatccgggccaagaagatcgccagcattgccgacgtgtgcgagagcatgaaggaacagctgctggtgctggtggaatgggccaagtacatccccgccttttgcgagctgcccctggacgatcaggtggccctgctgagagcacacgccggcgaacatctgctgctgggagccaccaagcggagcatggtgttcaaggacgtgctgctgctgggcaacgactacatcgtgcccagacactgccctgagctggccgagatgagccgggtgtccatcagaatcctggacgaactggtgctgccgtttcaggaactgcagatcgacgacaacgagtacgcctacctgaaggccatcatctttttcgaccccgacgccaagggcctgagcgaccctggcaagatcaagcggctgagaagccaggtgcaagtgtccctggaagattacatcaacgaccggcagtacgacagccggggcagatttggcgaactgctcctgctgctgcccaccctgcagagcatcacctggcagatgatcgagcagatccagttcatcaagctgttcggcatggccaagatcgacaatctgctgcaggaaatgctgctcgggggcagcccttctgatgcccctcatgcccaccaccctctgcaccctcacctgatgcaagaacacatgggcaccaatgtgatcgtggccaacacaatgcccacccacctgagcaacggccagatgtgcgagtggcccagacctagaggacaggccgccacacctgagacacctcagccttctccacctggcggctctggcagcgagccttacaaactgctgcctggcgctgtggccaccatcgtgaaacctctgagcgccatcccccagcccaccatcaccaagcaggaagtgatctgaggactagtccctgttcccagagcccacttttttttctttttttgaaataaaatagcctgtctttcagatctaaaaaaaaaaaaaaaaaaaaaaaaaaaaaaaaaaaaaaaaaaaaaaaaaaaaaaaaaaaaaaaaaaaaaaaaaaaaaaaaaaaaaaaaaaaaaaaaaaaa

SEQ ID NO: 4632 - RNA, 1673 nt, synthetic construct
  misc_feature 1..1673: note = mRNA a-1 (A100) (opt29) from Homo sapiens__NP_000448.3__HNF4A(1-474)(S142E_S143E)
  source 1..1673: mol_type = other RNA
aggagagtcccgcagtcggcgtccagcggctctgcttgttcgtgtgtgtgtcgttgcaggccttattcaagcttaccatgagactgagcaagaccctggtggacatggacatggccgactactctgccgccctggaccctgcctacaccaccctggagttcgaaaacgtgcaagtgctgaccatgggcaacgacaccagccctagcgagggcaccaacctgaacgcccctaatagcctgggagtgtccgccctgtgtgccatctgtggcgatagagccaccggcaagcactacggcgccagctcttgtgatggctgcaagggcttcttccggcggagcgtgcggaagaaccacatgtacagctgccggttcagccggcagtgcgtggtggacaaggataagcggaaccagtgccggtactgcagactgaagaagtgcttcagagccggcatgaagaaagaagccgtgcagaacgagcgggaccggatcagcaccagaagagaagagtacgaggacagcagcctgcccagcatcaacgccctgctgcaggccgaggtgctgagcagacagatcaccagcccagtgtccggcatcaacggcgacatccgggccaagaagatcgccagcattgccgacgtgtgcgagagcatgaaggaacagctgctggtgctggtggaatgggccaagtacatccccgccttttgcgagctgcccctggacgatcaggtggccctgctgagagcacacgccggcgaacatctgctgctgggagccaccaagcggagcatggtgttcaaggacgtgctgctgctgggcaacgactacatcgtgcccagacactgccctgagctggccgagatgagccgggtgtccatcagaatcctggacgaactggtgctgccgtttcaggaactgcagatcgacgacaacgagtacgcctacctgaaggccatcatctttttcgaccccgacgccaagggcctgagcgaccctggcaagatcaagcggctgagaagccaggtgcaagtgtccctggaagattacatcaacgaccggcagtacgacagccggggcagatttggcgaactgctcctgctgctgcccaccctgcagagcatcacctggcagatgatcgagcagatccagttcatcaagctgttcggcatggccaagatcgacaatctgctgcaggaaatgctgctcgggggcagcccttctgatgcccctcatgcccaccaccctctgcaccctcacctgatgcaagaacacatgggcaccaatgtgatcgtggccaacacaatgcccacccacctgagcaacggccagatgtgcgagtggcccagacctagaggacaggccgccacacctgagacacctcagccttctccacctggcggctctggcagcgagccttacaaactgctgcctggcgctgtggccaccatcgtgaaacctctgagcgccatcccccagcccaccatcaccaagcaggaagtgatctgaggactagtccctgttcccagagcccacttttttttctttttttgaaataaaatagcctgtctttcagatctaaaaaaaaaaaaaaaaaaaaaaaaaaaaaaaaaaaaaaaaaaaaaaaaaaaaaaaaaaaaaaaaaaaaaaaaaaaaaaaaaaaaaaaaaaaaaaaaaaaa

SEQ ID NO: 4633 - RNA, 1673 nt, synthetic construct
  misc_feature 1..1673: note = mRNA a-1 (A100) (opt29) from Homo sapiens__NP_000448.3__HNF4A(1-474)(S143A)
  source 1..1673: mol_type = other RNA
aggagagtcccgcagtcggcgtccagcggctctgcttgttcgtgtgtgtgtcgttgcaggccttattcaagcttaccatgagactgagcaagaccctggtggacatggacatggccgactactctgccgccctggaccctgcctacaccaccctggagttcgaaaacgtgcaagtgctgaccatgggcaacgacaccagccctagcgagggcaccaacctgaacgcccctaatagcctgggagtgtccgccctgtgtgccatctgtggcgatagagccaccggcaagcactacggcgccagctcttgtgatggctgcaagggcttcttccggcggagcgtgcggaagaaccacatgtacagctgccggttcagccggcagtgcgtggtggacaaggataagcggaaccagtgccggtactgcagactgaagaagtgcttcagagccggcatgaagaaagaagccgtgcagaacgagcgggaccggatcagcaccagaagaagcgcctacgaggacagcagcctgcccagcatcaacgccctgctgcaggccgaggtgctgagcagacagatcaccagcccagtgtccggcatcaacggcgacatccgggccaagaagatcgccagcattgccgacgtgtgcgagagcatgaaggaacagctgctggtgctggtggaatgggccaagtacatccccgccttttgcgagctgcccctggacgatcaggtggccctgctgagagcacacgccggcgaacatctgctgctgggagccaccaagcggagcatggtgttcaaggacgtgctgctgctgggcaacgactacatcgtgcccagacactgccctgagctggccgagatgagccgggtgtccatcagaatcctggacgaactggtgctgccgtttcaggaactgcagatcgacgacaacgagtacgcctacctgaaggccatcatctttttcgaccccgacgccaagggcctgagcgaccctggcaagatcaagcggctgagaagccaggtgcaagtgtccctggaagattacatcaacgaccggcagtacgacagccggggcagatttggcgaactgctcctgctgctgcccaccctgcagagcatcacctggcagatgatcgagcagatccagttcatcaagctgttcggcatggccaagatcgacaatctgctgcaggaaatgctgctcgggggcagcccttctgatgcccctcatgcccaccaccctctgcaccctcacctgatgcaagaacacatgggcaccaatgtgatcgtggccaacacaatgcccacccacctgagcaacggccagatgtgcgagtggcccagacctagaggacaggccgccacacctgagacacctcagccttctccacctggcggctctggcagcgagccttacaaactgctgcctggcgctgtggccaccatcgtgaaacctctgagcgccatcccccagcccaccatcaccaagcaggaagtgatctgaggactagtccctgttcccagagcccacttttttttctttttttgaaataaaatagcctgtctttcagatctaaaaaaaaaaaaaaaaaaaaaaaaaaaaaaaaaaaaaaaaaaaaaaaaaaaaaaaaaaaaaaaaaaaaaaaaaaaaaaaaaaaaaaaaaaaaaaaaaaaa

SEQ ID NO: 4634 - RNA, 1673 nt, synthetic construct
  misc_feature 1..1673: note = mRNA a-1 (A100) (opt29) from Homo sapiens__NP_000448.3__HNF4A(1-474)(T166A)
  source 1..1673: mol_type = other RNA
aggagagtcccgcagtcggcgtccagcggctctgcttgttcgtgtgtgtgtcgttgcaggccttattcaagcttaccatgagactgagcaagaccctggtggacatggacatggccgactactctgccgccctggaccctgcctacaccaccctggagttcgaaaacgtgcaagtgctgaccatgggcaacgacaccagccctagcgagggcaccaacctgaacgcccctaatagcctgggagtgtccgccctgtgtgccatctgtggcgatagagccaccggcaagcactacggcgccagctcttgtgatggctgcaagggcttcttccggcggagcgtgcggaagaaccacatgtacagctgccggttcagccggcagtgcgtggtggacaaggataagcggaaccagtgccggtactgcagactgaagaagtgcttcagagccggcatgaagaaagaagccgtgcagaacgagcgggaccggatcagcaccagaagaagcagctacgaggacagcagcctgcccagcatcaacgccctgctgcaggccgaggtgctgagcagacagatcgccagcccagtgtccggcatcaacggcgacatccgggccaagaagatcgccagcattgccgacgtgtgcgagagcatgaaggaacagctgctggtgctggtggaatgggccaagtacatccccgccttttgcgagctgcccctggacgatcaggtggccctgctgagagcacacgccggcgaacatctgctgctgggagccaccaagcggagcatggtgttcaaggacgtgctgctgctgggcaacgactacatcgtgcccagacactgccctgagctggccgagatgagccgggtgtccatcagaatcctggacgaactggtgctgccgtttcaggaactgcagatcgacgacaacgagtacgcctacctgaaggccatcatctttttcgaccccgacgccaagggcctgagcgaccctggcaagatcaagcggctgagaagccaggtgcaagtgtccctggaagattacatcaacgaccggcagtacgacagccggggcagatttggcgaactgctcctgctgctgcccaccctgcagagcatcacctggcagatgatcgagcagatccagttcatcaagctgttcggcatggccaagatcgacaatctgctgcaggaaatgctgctcgggggcagcccttctgatgcccctcatgcccaccaccctctgcaccctcacctgatgcaagaacacatgggcaccaatgtgatcgtggccaacacaatgcccacccacctgagcaacggccagatgtgcgagtggcccagacctagaggacaggccgccacacctgagacacctcagccttctccacctggcggctctggcagcgagccttacaaactgctgcctggcgctgtggccaccatcgtgaaacctctgagcgccatcccccagcccaccatcaccaagcaggaagtgatctgaggactagtccctgttcccagagcccacttttttttctttttttgaaataaaatagcctgtctttcagatctaaaaaaaaaaaaaaaaaaaaaaaaaaaaaaaaaaaaaaaaaaaaaaaaaaaaaaaaaaaaaaaaaaaaaaaaaaaaaaaaaaaaaaaaaaaaaaaaaaaa

SEQ ID NO: 4635 - RNA, 1673 nt, synthetic construct
  misc_feature 1..1673: note = mRNA a-1 (A100) (opt29) from Homo sapiens__NP_000448.3__HNF4A(1-474)(S167E)
  source 1..1673: mol_type = other RNA
aggagagtcccgcagtcggcgtccagcggctctgcttgttcgtgtgtgtgtcgttgcaggccttattcaagcttaccatgagactgagcaagaccctggtggacatggacatggccgactactctgccgccctggaccctgcctacaccaccctggagttcgaaaacgtgcaagtgctgaccatgggcaacgacaccagccctagcgagggcaccaacctgaacgcccctaatagcctgggagtgtccgccctgtgtgccatctgtggcgatagagccaccggcaagcactacggcgccagctcttgtgatggctgcaagggcttcttccggcggagcgtgcggaagaaccacatgtacagctgccggttcagccggcagtgcgtggtggacaaggataagcggaaccagtgccggtactgcagactgaagaagtgcttcagagccggcatgaagaaagaagccgtgcagaacgagcgggaccggatcagcaccagaagaagcagctacgaggacagcagcctgcccagcatcaacgccctgctgcaggccgaggtgctgagcagacagatcaccgaaccagtgtccggcatcaacggcgacatccgggccaagaagatcgccagcattgccgacgtgtgcgagagcatgaaggaacagctgctggtgctggtggaatgggccaagtacatccccgccttttgcgagctgcccctggacgatcaggtggccctgctgagagcacacgccggcgaacatctgctgctgggagccaccaagcggagcatggtgttcaaggacgtgctgctgctgggcaacgactacatcgtgcccagacactgccctgagctggccgagatgagccgggtgtccatcagaatcctggacgaactggtgctgccgtttcaggaactgcagatcgacgacaacgagtacgcctacctgaaggccatcatctttttcgaccccgacgccaagggcctgagcgaccctggcaagatcaagcggctgagaagccaggtgcaagtgtccctggaagattacatcaacgaccggcagtacgacagccggggcagatttggcgaactgctcctgctgctgcccaccctgcagagcatcacctggcagatgatcgagcagatccagttcatcaagctgttcggcatggccaagatcgacaatctgctgcaggaaatgctgctcgggggcagcccttctgatgcccctcatgcccaccaccctctgcaccctcacctgatgcaagaacacatgggcaccaatgtgatcgtggccaacacaatgcccacccacctgagcaacggccagatgtgcgagtggcccagacctagaggacaggccgccacacctgagacacctcagccttctccacctggcggctctggcagcgagccttacaaactgctgcctggcgctgtggccaccatcgtgaaacctctgagcgccatcccccagcccaccatcaccaagcaggaagtgatctgaggactagtccctgttcccagagcccacttttttttctttttttgaaataaaatagcctgtctttcagatctaaaaaaaaaaaaaaaaaaaaaaaaaaaaaaaaaaaaaaaaaaaaaaaaaaaaaaaaaaaaaaaaaaaaaaaaaaaaaaaaaaaaaaaaaaaaaaaaaaaa

SEQ ID NO: 4636 - RNA, 1673 nt, synthetic construct
  misc_feature 1..1673: note = mRNA a-1 (A100) (opt29) from Homo sapiens__NP_000448.3__HNF4A(1-474)(S167A)
  source 1..1673: mol_type = other RNA
aggagagtcccgcagtcggcgtccagcggctctgcttgttcgtgtgtgtgtcgttgcaggccttattcaagcttaccatgagactgagcaagaccctggtggacatggacatggccgactactctgccgccctggaccctgcctacaccaccctggagttcgaaaacgtgcaagtgctgaccatgggcaacgacaccagccctagcgagggcaccaacctgaacgcccctaatagcctgggagtgtccgccctgtgtgccatctgtggcgatagagccaccggcaagcactacggcgccagctcttgtgatggctgcaagggcttcttccggcggagcgtgcggaagaaccacatgtacagctgccggttcagccggcagtgcgtggtggacaaggataagcggaaccagtgccggtactgcagactgaagaagtgcttcagagccggcatgaagaaagaagccgtgcagaacgagcgggaccggatcagcaccagaagaagcagctacgaggacagcagcctgcccagcatcaacgccctgctgcaggccgaggtgctgagcagacagatcaccgccccagtgtccggcatcaacggcgacatccgggccaagaagatcgccagcattgccgacgtgtgcgagagcatgaaggaacagctgctggtgctggtggaatgggccaagtacatccccgccttttgcgagctgcccctggacgatcaggtggccctgctgagagcacacgccggcgaacatctgctgctgggagccaccaagcggagcatggtgttcaaggacgtgctgctgctgggcaacgactacatcgtgcccagacactgccctgagctggccgagatgagccgggtgtccatcagaatcctggacgaactggtgctgccgtttcaggaactgcagatcgacgacaacgagtacgcctacctgaaggccatcatctttttcgaccccgacgccaagggcctgagcgaccctggcaagatcaagcggctgagaagccaggtgcaagtgtccctggaagattacatcaacgaccggcagtacgacagccggggcagatttggcgaactgctcctgctgctgcccaccctgcagagcatcacctggcagatgatcgagcagatccagttcatcaagctgttcggcatggccaagatcgacaatctgctgcaggaaatgctgctcgggggcagcccttctgatgcccctcatgcccaccaccctctgcaccctcacctgatgcaagaacacatgggcaccaatgtgatcgtggccaacacaatgcccacccacctgagcaacggccagatgtgcgagtggcccagacctagaggacaggccgccacacctgagacacctcagccttctccacctggcggctctggcagcgagccttacaaactgctgcctggcgctgtggccaccatcgtgaaacctctgagcgccatcccccagcccaccatcaccaagcaggaagtgatctgaggactagtccctgttcccagagcccacttttttttctttttttgaaataaaatagcctgtctttcagatctaaaaaaaaaaaaaaaaaaaaaaaaaaaaaaaaaaaaaaaaaaaaaaaaaaaaaaaaaaaaaaaaaaaaaaaaaaaaaaaaaaaaaaaaaaaaaaaaaaaa

SEQ ID NO: 4637 - RNA, 1673 nt, synthetic construct
  misc_feature 1..1673: note = mRNA a-1 (A100) (opt29) from Homo sapiens__NP_000448.3__HNF4A(1-474)(S167A_S378A_T429A_T432A_ S436A)
  source 1..1673: mol_type = other RNA
aggagagtcccgcagtcggcgtccagcggctctgcttgttcgtgtgtgtgtcgttgcaggccttattcaagcttaccatgagactgagcaagaccctggtggacatggacatggccgactactctgccgccctggaccctgcctacaccaccctggagttcgaaaacgtgcaagtgctgaccatgggcaacgacaccagccctagcgagggcaccaacctgaacgcccctaatagcctgggagtgtccgccctgtgtgccatctgtggcgatagagccaccggcaagcactacggcgccagctcttgtgatggctgcaagggcttcttccggcggagcgtgcggaagaaccacatgtacagctgccggttcagccggcagtgcgtggtggacaaggataagcggaaccagtgccggtactgcagactgaagaagtgcttcagagccggcatgaagaaagaagccgtgcagaacgagcgggaccggatcagcaccagaagaagcagctacgaggacagcagcctgcccagcatcaacgccctgctgcaggccgaggtgctgagcagacagatcaccgccccagtgtccggcatcaacggcgacatccgggccaagaagatcgccagcattgccgacgtgtgcgagagcatgaaggaacagctgctggtgctggtggaatgggccaagtacatccccgccttttgcgagctgcccctggacgatcaggtggccctgctgagagcacacgccggcgaacatctgctgctgggagccaccaagcggagcatggtgttcaaggacgtgctgctgctgggcaacgactacatcgtgcccagacactgccctgagctggccgagatgagccgggtgtccatcagaatcctggacgaactggtgctgccgtttcaggaactgcagatcgacgacaacgagtacgcctacctgaaggccatcatctttttcgaccccgacgccaagggcctgagcgaccctggcaagatcaagcggctgagaagccaggtgcaagtgtccctggaagattacatcaacgaccggcagtacgacagccggggcagatttggcgaactgctcctgctgctgcccaccctgcagagcatcacctggcagatgatcgagcagatccagttcatcaagctgttcggcatggccaagatcgacaatctgctgcaggaaatgctgctcgggggcgccccttctgatgcccctcatgcccaccaccctctgcaccctcacctgatgcaagaacacatgggcaccaatgtgatcgtggccaacacaatgcccacccacctgagcaacggccagatgtgcgagtggcccagacctagaggacaggccgccgcccctgaggcccctcagcctgccccacctggcggctctggcagcgagccttacaaactgctgcctggcgctgtggccaccatcgtgaaacctctgagcgccatcccccagcccaccatcaccaagcaggaagtgatctgaggactagtccctgttcccagagcccacttttttttctttttttgaaataaaatagcctgtctttcagatctaaaaaaaaaaaaaaaaaaaaaaaaaaaaaaaaaaaaaaaaaaaaaaaaaaaaaaaaaaaaaaaaaaaaaaaaaaaaaaaaaaaaaaaaaaaaaaaaaaaa

SEQ ID NO: 4638 - RNA, 1673 nt, synthetic construct
  misc_feature 1..1673: note = mRNA a-1 (A100) (opt29) from Homo sapiens__NP_000448.3__HNF4A(1-474)(S167E_S378E_T429E_T432E_ S436E)
  source 1..1673: mol_type = other RNA
aggagagtcccgcagtcggcgtccagcggctctgcttgttcgtgtgtgtgtcgttgcaggccttattcaagcttaccatgagactgagcaagaccctggtggacatggacatggccgactactctgccgccctggaccctgcctacaccaccctggagttcgaaaacgtgcaagtgctgaccatgggcaacgacaccagccctagcgagggcaccaacctgaacgcccctaatagcctgggagtgtccgccctgtgtgccatctgtggcgatagagccaccggcaagcactacggcgccagctcttgtgatggctgcaagggcttcttccggcggagcgtgcggaagaaccacatgtacagctgccggttcagccggcagtgcgtggtggacaaggataagcggaaccagtgccggtactgcagactgaagaagtgcttcagagccggcatgaagaaagaagccgtgcagaacgagcgggaccggatcagcaccagaagaagcagctacgaggacagcagcctgcccagcatcaacgccctgctgcaggccgaggtgctgagcagacagatcaccgaaccagtgtccggcatcaacggcgacatccgggccaagaagatcgccagcattgccgacgtgtgcgagagcatgaaggaacagctgctggtgctggtggaatgggccaagtacatccccgccttttgcgagctgcccctggacgatcaggtggccctgctgagagcacacgccggcgaacatctgctgctgggagccaccaagcggagcatggtgttcaaggacgtgctgctgctgggcaacgactacatcgtgcccagacactgccctgagctggccgagatgagccgggtgtccatcagaatcctggacgaactggtgctgccgtttcaggaactgcagatcgacgacaacgagtacgcctacctgaaggccatcatctttttcgaccccgacgccaagggcctgagcgaccctggcaagatcaagcggctgagaagccaggtgcaagtgtccctggaagattacatcaacgaccggcagtacgacagccggggcagatttggcgaactgctcctgctgctgcccaccctgcagagcatcacctggcagatgatcgagcagatccagttcatcaagctgttcggcatggccaagatcgacaatctgctgcaggaaatgctgctcgggggcgagccttctgatgcccctcatgcccaccaccctctgcaccctcacctgatgcaagaacacatgggcaccaatgtgatcgtggccaacacaatgcccacccacctgagcaacggccagatgtgcgagtggcccagacctagaggacaggccgccgaacctgaggagcctcagcctgaaccacctggcggctctggcagcgagccttacaaactgctgcctggcgctgtggccaccatcgtgaaacctctgagcgccatcccccagcccaccatcaccaagcaggaagtgatctgaggactagtccctgttcccagagcccacttttttttctttttttgaaataaaatagcctgtctttcagatctaaaaaaaaaaaaaaaaaaaaaaaaaaaaaaaaaaaaaaaaaaaaaaaaaaaaaaaaaaaaaaaaaaaaaaaaaaaaaaaaaaaaaaaaaaaaaaaaaaaa

SEQ ID NO: 4639 - RNA, 1673 nt, synthetic construct
  misc_feature 1..1673: note = mRNA a-1 (A100) (opt29) from Homo sapiens__NP_000448.3__HNF4A(1-474)(S87A)
  source 1..1673: mol_type = other RNA
aggagagtcccgcagtcggcgtccagcggctctgcttgttcgtgtgtgtgtcgttgcaggccttattcaagcttaccatgagactgagcaagaccctggtggacatggacatggccgactactctgccgccctggaccctgcctacaccaccctggagttcgaaaacgtgcaagtgctgaccatgggcaacgacaccagccctagcgagggcaccaacctgaacgcccctaatagcctgggagtgtccgccctgtgtgccatctgtggcgatagagccaccggcaagcactacggcgccagctcttgtgatggctgcaagggcttcttccggcgggccgtgcggaagaaccacatgtacagctgccggttcagccggcagtgcgtggtggacaaggataagcggaaccagtgccggtactgcagactgaagaagtgcttcagagccggcatgaagaaagaagccgtgcagaacgagcgggaccggatcagcaccagaagaagcagctacgaggacagcagcctgcccagcatcaacgccctgctgcaggccgaggtgctgagcagacagatcaccagcccagtgtccggcatcaacggcgacatccgggccaagaagatcgccagcattgccgacgtgtgcgagagcatgaaggaacagctgctggtgctggtggaatgggccaagtacatccccgccttttgcgagctgcccctggacgatcaggtggccctgctgagagcacacgccggcgaacatctgctgctgggagccaccaagcggagcatggtgttcaaggacgtgctgctgctgggcaacgactacatcgtgcccagacactgccctgagctggccgagatgagccgggtgtccatcagaatcctggacgaactggtgctgccgtttcaggaactgcagatcgacgacaacgagtacgcctacctgaaggccatcatctttttcgaccccgacgccaagggcctgagcgaccctggcaagatcaagcggctgagaagccaggtgcaagtgtccctggaagattacatcaacgaccggcagtacgacagccggggcagatttggcgaactgctcctgctgctgcccaccctgcagagcatcacctggcagatgatcgagcagatccagttcatcaagctgttcggcatggccaagatcgacaatctgctgcaggaaatgctgctcgggggcagcccttctgatgcccctcatgcccaccaccctctgcaccctcacctgatgcaagaacacatgggcaccaatgtgatcgtggccaacacaatgcccacccacctgagcaacggccagatgtgcgagtggcccagacctagaggacaggccgccacacctgagacacctcagccttctccacctggcggctctggcagcgagccttacaaactgctgcctggcgctgtggccaccatcgtgaaacctctgagcgccatcccccagcccaccatcaccaagcaggaagtgatctgaggactagtccctgttcccagagcccacttttttttctttttttgaaataaaatagcctgtctttcagatctaaaaaaaaaaaaaaaaaaaaaaaaaaaaaaaaaaaaaaaaaaaaaaaaaaaaaaaaaaaaaaaaaaaaaaaaaaaaaaaaaaaaaaaaaaaaaaaaaaaa

SEQ ID NO: 4640 - RNA, 1673 nt, synthetic construct
  misc_feature 1..1673: note = mRNA a-1 (A100) (opt29) from Homo sapiens__NP_000448.3__HNF4A(1-474)(S87E)
  source 1..1673: mol_type = other RNA
aggagagtcccgcagtcggcgtccagcggctctgcttgttcgtgtgtgtgtcgttgcaggccttattcaagcttaccatgagactgagcaagaccctggtggacatggacatggccgactactctgccgccctggaccctgcctacaccaccctggagttcgaaaacgtgcaagtgctgaccatgggcaacgacaccagccctagcgagggcaccaacctgaacgcccctaatagcctgggagtgtccgccctgtgtgccatctgtggcgatagagccaccggcaagcactacggcgccagctcttgtgatggctgcaagggcttcttccggcgggaggtgcggaagaaccacatgtacagctgccggttcagccggcagtgcgtggtggacaaggataagcggaaccagtgccggtactgcagactgaagaagtgcttcagagccggcatgaagaaagaagccgtgcagaacgagcgggaccggatcagcaccagaagaagcagctacgaggacagcagcctgcccagcatcaacgccctgctgcaggccgaggtgctgagcagacagatcaccagcccagtgtccggcatcaacggcgacatccgggccaagaagatcgccagcattgccgacgtgtgcgagagcatgaaggaacagctgctggtgctggtggaatgggccaagtacatccccgccttttgcgagctgcccctggacgatcaggtggccctgctgagagcacacgccggcgaacatctgctgctgggagccaccaagcggagcatggtgttcaaggacgtgctgctgctgggcaacgactacatcgtgcccagacactgccctgagctggccgagatgagccgggtgtccatcagaatcctggacgaactggtgctgccgtttcaggaactgcagatcgacgacaacgagtacgcctacctgaaggccatcatctttttcgaccccgacgccaagggcctgagcgaccctggcaagatcaagcggctgagaagccaggtgcaagtgtccctggaagattacatcaacgaccggcagtacgacagccggggcagatttggcgaactgctcctgctgctgcccaccctgcagagcatcacctggcagatgatcgagcagatccagttcatcaagctgttcggcatggccaagatcgacaatctgctgcaggaaatgctgctcgggggcagcccttctgatgcccctcatgcccaccaccctctgcaccctcacctgatgcaagaacacatgggcaccaatgtgatcgtggccaacacaatgcccacccacctgagcaacggccagatgtgcgagtggcccagacctagaggacaggccgccacacctgagacacctcagccttctccacctggcggctctggcagcgagccttacaaactgctgcctggcgctgtggccaccatcgtgaaacctctgagcgccatcccccagcccaccatcaccaagcaggaagtgatctgaggactagtccctgttcccagagcccacttttttttctttttttgaaataaaatagcctgtctttcagatctaaaaaaaaaaaaaaaaaaaaaaaaaaaaaaaaaaaaaaaaaaaaaaaaaaaaaaaaaaaaaaaaaaaaaaaaaaaaaaaaaaaaaaaaaaaaaaaaaaaa

SEQ ID NO: 4641 - RNA, 1673 nt, synthetic construct
  misc_feature 1..1673: note = mRNA a-1 (A100) (opt29) from Homo sapiens__NP_000448.3__HNF4A(1-474)(R2V)
  source 1..1673: mol_type = other RNA
aggagagtcccgcagtcggcgtccagcggctctgcttgttcgtgtgtgtgtcgttgcaggccttattcaagcttaccatggtgctgagcaagaccctggtggacatggacatggccgactactctgccgccctggaccctgcctacaccaccctggagttcgaaaacgtgcaagtgctgaccatgggcaacgacaccagccctagcgagggcaccaacctgaacgcccctaatagcctgggagtgtccgccctgtgtgccatctgtggcgatagagccaccggcaagcactacggcgccagctcttgtgatggctgcaagggcttcttccggcggagcgtgcggaagaaccacatgtacagctgccggttcagccggcagtgcgtggtggacaaggataagcggaaccagtgccggtactgcagactgaagaagtgcttcagagccggcatgaagaaagaagccgtgcagaacgagcgggaccggatcagcaccagaagaagcagctacgaggacagcagcctgcccagcatcaacgccctgctgcaggccgaggtgctgagcagacagatcaccagcccagtgtccggcatcaacggcgacatccgggccaagaagatcgccagcattgccgacgtgtgcgagagcatgaaggaacagctgctggtgctggtggaatgggccaagtacatccccgccttttgcgagctgcccctggacgatcaggtggccctgctgagagcacacgccggcgaacatctgctgctgggagccaccaagcggagcatggtgttcaaggacgtgctgctgctgggcaacgactacatcgtgcccagacactgccctgagctggccgagatgagccgggtgtccatcagaatcctggacgaactggtgctgccgtttcaggaactgcagatcgacgacaacgagtacgcctacctgaaggccatcatctttttcgaccccgacgccaagggcctgagcgaccctggcaagatcaagcggctgagaagccaggtgcaagtgtccctggaagattacatcaacgaccggcagtacgacagccggggcagatttggcgaactgctcctgctgctgcccaccctgcagagcatcacctggcagatgatcgagcagatccagttcatcaagctgttcggcatggccaagatcgacaatctgctgcaggaaatgctgctcgggggcagcccttctgatgcccctcatgcccaccaccctctgcaccctcacctgatgcaagaacacatgggcaccaatgtgatcgtggccaacacaatgcccacccacctgagcaacggccagatgtgcgagtggcccagacctagaggacaggccgccacacctgagacacctcagccttctccacctggcggctctggcagcgagccttacaaactgctgcctggcgctgtggccaccatcgtgaaacctctgagcgccatcccccagcccaccatcaccaagcaggaagtgatctgaggactagtccctgttcccagagcccacttttttttctttttttgaaataaaatagcctgtctttcagatctaaaaaaaaaaaaaaaaaaaaaaaaaaaaaaaaaaaaaaaaaaaaaaaaaaaaaaaaaaaaaaaaaaaaaaaaaaaaaaaaaaaaaaaaaaaaaaaaaaaa

SEQ ID NO: 4642 - RNA, 1673 nt, synthetic construct
  misc_feature 1..1673: note = mRNA a-1 (A100) (opt29) from Homo sapiens__NP_000448.3__HNF4A(1-474)(R2V_K5V)
  source 1..1673: mol_type = other RNA
aggagagtcccgcagtcggcgtccagcggctctgcttgttcgtgtgtgtgtcgttgcaggccttattcaagcttaccatggtgctgagcgtgaccctggtggacatggacatggccgactactctgccgccctggaccctgcctacaccaccctggagttcgaaaacgtgcaagtgctgaccatgggcaacgacaccagccctagcgagggcaccaacctgaacgcccctaatagcctgggagtgtccgccctgtgtgccatctgtggcgatagagccaccggcaagcactacggcgccagctcttgtgatggctgcaagggcttcttccggcggagcgtgcggaagaaccacatgtacagctgccggttcagccggcagtgcgtggtggacaaggataagcggaaccagtgccggtactgcagactgaagaagtgcttcagagccggcatgaagaaagaagccgtgcagaacgagcgggaccggatcagcaccagaagaagcagctacgaggacagcagcctgcccagcatcaacgccctgctgcaggccgaggtgctgagcagacagatcaccagcccagtgtccggcatcaacggcgacatccgggccaagaagatcgccagcattgccgacgtgtgcgagagcatgaaggaacagctgctggtgctggtggaatgggccaagtacatccccgccttttgcgagctgcccctggacgatcaggtggccctgctgagagcacacgccggcgaacatctgctgctgggagccaccaagcggagcatggtgttcaaggacgtgctgctgctgggcaacgactacatcgtgcccagacactgccctgagctggccgagatgagccgggtgtccatcagaatcctggacgaactggtgctgccgtttcaggaactgcagatcgacgacaacgagtacgcctacctgaaggccatcatctttttcgaccccgacgccaagggcctgagcgaccctggcaagatcaagcggctgagaagccaggtgcaagtgtccctggaagattacatcaacgaccggcagtacgacagccggggcagatttggcgaactgctcctgctgctgcccaccctgcagagcatcacctggcagatgatcgagcagatccagttcatcaagctgttcggcatggccaagatcgacaatctgctgcaggaaatgctgctcgggggcagcccttctgatgcccctcatgcccaccaccctctgcaccctcacctgatgcaagaacacatgggcaccaatgtgatcgtggccaacacaatgcccacccacctgagcaacggccagatgtgcgagtggcccagacctagaggacaggccgccacacctgagacacctcagccttctccacctggcggctctggcagcgagccttacaaactgctgcctggcgctgtggccaccatcgtgaaacctctgagcgccatcccccagcccaccatcaccaagcaggaagtgatctgaggactagtccctgttcccagagcccacttttttttctttttttgaaataaaatagcctgtctttcagatctaaaaaaaaaaaaaaaaaaaaaaaaaaaaaaaaaaaaaaaaaaaaaaaaaaaaaaaaaaaaaaaaaaaaaaaaaaaaaaaaaaaaaaaaaaaaaaaaaaaa

SEQ ID NO: 4643 - RNA, 1673 nt, synthetic construct
  misc_feature 1..1673: note = mRNA a-1 (A100) (opt29) from Homo sapiens__NP_000448.3__HNF4A(1-474)(K179R_K180R)
  source 1..1673: mol_type = other RNA
aggagagtcccgcagtcggcgtccagcggctctgcttgttcgtgtgtgtgtcgttgcaggccttattcaagcttaccatgagactgagcaagaccctggtggacatggacatggccgactactctgccgccctggaccctgcctacaccaccctggagttcgaaaacgtgcaagtgctgaccatgggcaacgacaccagccctagcgagggcaccaacctgaacgcccctaatagcctgggagtgtccgccctgtgtgccatctgtggcgatagagccaccggcaagcactacggcgccagctcttgtgatggctgcaagggcttcttccggcggagcgtgcggaagaaccacatgtacagctgccggttcagccggcagtgcgtggtggacaaggataagcggaaccagtgccggtactgcagactgaagaagtgcttcagagccggcatgaagaaagaagccgtgcagaacgagcgggaccggatcagcaccagaagaagcagctacgaggacagcagcctgcccagcatcaacgccctgctgcaggccgaggtgctgagcagacagatcaccagcccagtgtccggcatcaacggcgacatccgggcccggagaatcgccagcattgccgacgtgtgcgagagcatgaaggaacagctgctggtgctggtggaatgggccaagtacatccccgccttttgcgagctgcccctggacgatcaggtggccctgctgagagcacacgccggcgaacatctgctgctgggagccaccaagcggagcatggtgttcaaggacgtgctgctgctgggcaacgactacatcgtgcccagacactgccctgagctggccgagatgagccgggtgtccatcagaatcctggacgaactggtgctgccgtttcaggaactgcagatcgacgacaacgagtacgcctacctgaaggccatcatctttttcgaccccgacgccaagggcctgagcgaccctggcaagatcaagcggctgagaagccaggtgcaagtgtccctggaagattacatcaacgaccggcagtacgacagccggggcagatttggcgaactgctcctgctgctgcccaccctgcagagcatcacctggcagatgatcgagcagatccagttcatcaagctgttcggcatggccaagatcgacaatctgctgcaggaaatgctgctcgggggcagcccttctgatgcccctcatgcccaccaccctctgcaccctcacctgatgcaagaacacatgggcaccaatgtgatcgtggccaacacaatgcccacccacctgagcaacggccagatgtgcgagtggcccagacctagaggacaggccgccacacctgagacacctcagccttctccacctggcggctctggcagcgagccttacaaactgctgcctggcgctgtggccaccatcgtgaaacctctgagcgccatcccccagcccaccatcaccaagcaggaagtgatctgaggactagtccctgttcccagagcccacttttttttctttttttgaaataaaatagcctgtctttcagatctaaaaaaaaaaaaaaaaaaaaaaaaaaaaaaaaaaaaaaaaaaaaaaaaaaaaaaaaaaaaaaaaaaaaaaaaaaaaaaaaaaaaaaaaaaaaaaaaaaaa

SEQ ID NO: 4644 - RNA, 1673 nt, synthetic construct
  misc_feature 1..1673: note = mRNA a-1 (A100) (opt29) from Homo sapiens__NP_000448.3__HNF4A(1-474)(K234R)
  source 1..1673: mol_type = other RNA
aggagagtcccgcagtcggcgtccagcggctctgcttgttcgtgtgtgtgtcgttgcaggccttattcaagcttaccatgagactgagcaagaccctggtggacatggacatggccgactactctgccgccctggaccctgcctacaccaccctggagttcgaaaacgtgcaagtgctgaccatgggcaacgacaccagccctagcgagggcaccaacctgaacgcccctaatagcctgggagtgtccgccctgtgtgccatctgtggcgatagagccaccggcaagcactacggcgccagctcttgtgatggctgcaagggcttcttccggcggagcgtgcggaagaaccacatgtacagctgccggttcagccggcagtgcgtggtggacaaggataagcggaaccagtgccggtactgcagactgaagaagtgcttcagagccggcatgaagaaagaagccgtgcagaacgagcgggaccggatcagcaccagaagaagcagctacgaggacagcagcctgcccagcatcaacgccctgctgcaggccgaggtgctgagcagacagatcaccagcccagtgtccggcatcaacggcgacatccgggccaagaagatcgccagcattgccgacgtgtgcgagagcatgaaggaacagctgctggtgctggtggaatgggccaagtacatccccgccttttgcgagctgcccctggacgatcaggtggccctgctgagagcacacgccggcgaacatctgctgctgggagccacccggcggagcatggtgttcaaggacgtgctgctgctgggcaacgactacatcgtgcccagacactgccctgagctggccgagatgagccgggtgtccatcagaatcctggacgaactggtgctgccgtttcaggaactgcagatcgacgacaacgagtacgcctacctgaaggccatcatctttttcgaccccgacgccaagggcctgagcgaccctggcaagatcaagcggctgagaagccaggtgcaagtgtccctggaagattacatcaacgaccggcagtacgacagccggggcagatttggcgaactgctcctgctgctgcccaccctgcagagcatcacctggcagatgatcgagcagatccagttcatcaagctgttcggcatggccaagatcgacaatctgctgcaggaaatgctgctcgggggcagcccttctgatgcccctcatgcccaccaccctctgcaccctcacctgatgcaagaacacatgggcaccaatgtgatcgtggccaacacaatgcccacccacctgagcaacggccagatgtgcgagtggcccagacctagaggacaggccgccacacctgagacacctcagccttctccacctggcggctctggcagcgagccttacaaactgctgcctggcgctgtggccaccatcgtgaaacctctgagcgccatcccccagcccaccatcaccaagcaggaagtgatctgaggactagtccctgttcccagagcccacttttttttctttttttgaaataaaatagcctgtctttcagatctaaaaaaaaaaaaaaaaaaaaaaaaaaaaaaaaaaaaaaaaaaaaaaaaaaaaaaaaaaaaaaaaaaaaaaaaaaaaaaaaaaaaaaaaaaaaaaaaaaaa

SEQ ID NO: 4645 - RNA, 1673 nt, synthetic construct
  misc_feature 1..1673: note = mRNA a-1 (A100) (opt29) from Homo sapiens__NP_000448.3__HNF4A(1-474)(K300R)
  source 1..1673: mol_type = other RNA
aggagagtcccgcagtcggcgtccagcggctctgcttgttcgtgtgtgtgtcgttgcaggccttattcaagcttaccatgagactgagcaagaccctggtggacatggacatggccgactactctgccgccctggaccctgcctacaccaccctggagttcgaaaacgtgcaagtgctgaccatgggcaacgacaccagccctagcgagggcaccaacctgaacgcccctaatagcctgggagtgtccgccctgtgtgccatctgtggcgatagagccaccggcaagcactacggcgccagctcttgtgatggctgcaagggcttcttccggcggagcgtgcggaagaaccacatgtacagctgccggttcagccggcagtgcgtggtggacaaggataagcggaaccagtgccggtactgcagactgaagaagtgcttcagagccggcatgaagaaagaagccgtgcagaacgagcgggaccggatcagcaccagaagaagcagctacgaggacagcagcctgcccagcatcaacgccctgctgcaggccgaggtgctgagcagacagatcaccagcccagtgtccggcatcaacggcgacatccgggccaagaagatcgccagcattgccgacgtgtgcgagagcatgaaggaacagctgctggtgctggtggaatgggccaagtacatccccgccttttgcgagctgcccctggacgatcaggtggccctgctgagagcacacgccggcgaacatctgctgctgggagccaccaagcggagcatggtgttcaaggacgtgctgctgctgggcaacgactacatcgtgcccagacactgccctgagctggccgagatgagccgggtgtccatcagaatcctggacgaactggtgctgccgtttcaggaactgcagatcgacgacaacgagtacgcctacctgaaggccatcatctttttcgaccccgacgccagaggcctgagcgaccctggcaagatcaagcggctgagaagccaggtgcaagtgtccctggaagattacatcaacgaccggcagtacgacagccggggcagatttggcgaactgctcctgctgctgcccaccctgcagagcatcacctggcagatgatcgagcagatccagttcatcaagctgttcggcatggccaagatcgacaatctgctgcaggaaatgctgctcgggggcagcccttctgatgcccctcatgcccaccaccctctgcaccctcacctgatgcaagaacacatgggcaccaatgtgatcgtggccaacacaatgcccacccacctgagcaacggccagatgtgcgagtggcccagacctagaggacaggccgccacacctgagacacctcagccttctccacctggcggctctggcagcgagccttacaaactgctgcctggcgctgtggccaccatcgtgaaacctctgagcgccatcccccagcccaccatcaccaagcaggaagtgatctgaggactagtccctgttcccagagcccacttttttttctttttttgaaataaaatagcctgtctttcagatctaaaaaaaaaaaaaaaaaaaaaaaaaaaaaaaaaaaaaaaaaaaaaaaaaaaaaaaaaaaaaaaaaaaaaaaaaaaaaaaaaaaaaaaaaaaaaaaaaaaa

SEQ ID NO: 4646 - RNA, 1673 nt, synthetic construct
  misc_feature 1..1673: note = mRNA a-1 (A100) (opt29) from Homo sapiens__NP_000448.3__HNF4A(1-474)(K300R_K307R_K309R)
  source 1..1673: mol_type = other RNA
aggagagtcccgcagtcggcgtccagcggctctgcttgttcgtgtgtgtgtcgttgcaggccttattcaagcttaccatgagactgagcaagaccctggtggacatggacatggccgactactctgccgccctggaccctgcctacaccaccctggagttcgaaaacgtgcaagtgctgaccatgggcaacgacaccagccctagcgagggcaccaacctgaacgcccctaatagcctgggagtgtccgccctgtgtgccatctgtggcgatagagccaccggcaagcactacggcgccagctcttgtgatggctgcaagggcttcttccggcggagcgtgcggaagaaccacatgtacagctgccggttcagccggcagtgcgtggtggacaaggataagcggaaccagtgccggtactgcagactgaagaagtgcttcagagccggcatgaagaaagaagccgtgcagaacgagcgggaccggatcagcaccagaagaagcagctacgaggacagcagcctgcccagcatcaacgccctgctgcaggccgaggtgctgagcagacagatcaccagcccagtgtccggcatcaacggcgacatccgggccaagaagatcgccagcattgccgacgtgtgcgagagcatgaaggaacagctgctggtgctggtggaatgggccaagtacatccccgccttttgcgagctgcccctggacgatcaggtggccctgctgagagcacacgccggcgaacatctgctgctgggagccaccaagcggagcatggtgttcaaggacgtgctgctgctgggcaacgactacatcgtgcccagacactgccctgagctggccgagatgagccgggtgtccatcagaatcctggacgaactggtgctgccgtttcaggaactgcagatcgacgacaacgagtacgcctacctgaaggccatcatctttttcgaccccgacgccagaggcctgagcgaccctggccggatcagacggctgagaagccaggtgcaagtgtccctggaagattacatcaacgaccggcagtacgacagccggggcagatttggcgaactgctcctgctgctgcccaccctgcagagcatcacctggcagatgatcgagcagatccagttcatcaagctgttcggcatggccaagatcgacaatctgctgcaggaaatgctgctcgggggcagcccttctgatgcccctcatgcccaccaccctctgcaccctcacctgatgcaagaacacatgggcaccaatgtgatcgtggccaacacaatgcccacccacctgagcaacggccagatgtgcgagtggcccagacctagaggacaggccgccacacctgagacacctcagccttctccacctggcggctctggcagcgagccttacaaactgctgcctggcgctgtggccaccatcgtgaaacctctgagcgccatcccccagcccaccatcaccaagcaggaagtgatctgaggactagtccctgttcccagagcccacttttttttctttttttgaaataaaatagcctgtctttcagatctaaaaaaaaaaaaaaaaaaaaaaaaaaaaaaaaaaaaaaaaaaaaaaaaaaaaaaaaaaaaaaaaaaaaaaaaaaaaaaaaaaaaaaaaaaaaaaaaaaaa

SEQ ID NO: 4647 - RNA, 1673 nt, synthetic construct
  misc_feature 1..1673: note = mRNA a-1 (A100) (opt29) from Homo sapiens__NP_000448.3__HNF4A(1-474)(K447R_K470R)
  source 1..1673: mol_type = other RNA
aggagagtcccgcagtcggcgtccagcggctctgcttgttcgtgtgtgtgtcgttgcaggccttattcaagcttaccatgagactgagcaagaccctggtggacatggacatggccgactactctgccgccctggaccctgcctacaccaccctggagttcgaaaacgtgcaagtgctgaccatgggcaacgacaccagccctagcgagggcaccaacctgaacgcccctaatagcctgggagtgtccgccctgtgtgccatctgtggcgatagagccaccggcaagcactacggcgccagctcttgtgatggctgcaagggcttcttccggcggagcgtgcggaagaaccacatgtacagctgccggttcagccggcagtgcgtggtggacaaggataagcggaaccagtgccggtactgcagactgaagaagtgcttcagagccggcatgaagaaagaagccgtgcagaacgagcgggaccggatcagcaccagaagaagcagctacgaggacagcagcctgcccagcatcaacgccctgctgcaggccgaggtgctgagcagacagatcaccagcccagtgtccggcatcaacggcgacatccgggccaagaagatcgccagcattgccgacgtgtgcgagagcatgaaggaacagctgctggtgctggtggaatgggccaagtacatccccgccttttgcgagctgcccctggacgatcaggtggccctgctgagagcacacgccggcgaacatctgctgctgggagccaccaagcggagcatggtgttcaaggacgtgctgctgctgggcaacgactacatcgtgcccagacactgccctgagctggccgagatgagccgggtgtccatcagaatcctggacgaactggtgctgccgtttcaggaactgcagatcgacgacaacgagtacgcctacctgaaggccatcatctttttcgaccccgacgccaagggcctgagcgaccctggcaagatcaagcggctgagaagccaggtgcaagtgtccctggaagattacatcaacgaccggcagtacgacagccggggcagatttggcgaactgctcctgctgctgcccaccctgcagagcatcacctggcagatgatcgagcagatccagttcatcaagctgttcggcatggccaagatcgacaatctgctgcaggaaatgctgctcgggggcagcccttctgatgcccctcatgcccaccaccctctgcaccctcacctgatgcaagaacacatgggcaccaatgtgatcgtggccaacacaatgcccacccacctgagcaacggccagatgtgcgagtggcccagacctagaggacaggccgccacacctgagacacctcagccttctccacctggcggctctggcagcgagccttaccggctgctgcctggcgctgtggccaccatcgtgaaacctctgagcgccatcccccagcccaccatcacccggcaggaagtgatctgaggactagtccctgttcccagagcccacttttttttctttttttgaaataaaatagcctgtctttcagatctaaaaaaaaaaaaaaaaaaaaaaaaaaaaaaaaaaaaaaaaaaaaaaaaaaaaaaaaaaaaaaaaaaaaaaaaaaaaaaaaaaaaaaaaaaaaaaaaaaaa

SEQ ID NO: 4648 - RNA, 1673 nt, synthetic construct
  misc_feature 1..1673: note = mRNA a-1 (A100) (opt29) from Homo sapiens__NP_000448.3__HNF4A(1-474)(K458R)
  source 1..1673: mol_type = other RNA
aggagagtcccgcagtcggcgtccagcggctctgcttgttcgtgtgtgtgtcgttgcaggccttattcaagcttaccatgagactgagcaagaccctggtggacatggacatggccgactactctgccgccctggaccctgcctacaccaccctggagttcgaaaacgtgcaagtgctgaccatgggcaacgacaccagccctagcgagggcaccaacctgaacgcccctaatagcctgggagtgtccgccctgtgtgccatctgtggcgatagagccaccggcaagcactacggcgccagctcttgtgatggctgcaagggcttcttccggcggagcgtgcggaagaaccacatgtacagctgccggttcagccggcagtgcgtggtggacaaggataagcggaaccagtgccggtactgcagactgaagaagtgcttcagagccggcatgaagaaagaagccgtgcagaacgagcgggaccggatcagcaccagaagaagcagctacgaggacagcagcctgcccagcatcaacgccctgctgcaggccgaggtgctgagcagacagatcaccagcccagtgtccggcatcaacggcgacatccgggccaagaagatcgccagcattgccgacgtgtgcgagagcatgaaggaacagctgctggtgctggtggaatgggccaagtacatccccgccttttgcgagctgcccctggacgatcaggtggccctgctgagagcacacgccggcgaacatctgctgctgggagccaccaagcggagcatggtgttcaaggacgtgctgctgctgggcaacgactacatcgtgcccagacactgccctgagctggccgagatgagccgggtgtccatcagaatcctggacgaactggtgctgccgtttcaggaactgcagatcgacgacaacgagtacgcctacctgaaggccatcatctttttcgaccccgacgccaagggcctgagcgaccctggcaagatcaagcggctgagaagccaggtgcaagtgtccctggaagattacatcaacgaccggcagtacgacagccggggcagatttggcgaactgctcctgctgctgcccaccctgcagagcatcacctggcagatgatcgagcagatccagttcatcaagctgttcggcatggccaagatcgacaatctgctgcaggaaatgctgctcgggggcagcccttctgatgcccctcatgcccaccaccctctgcaccctcacctgatgcaagaacacatgggcaccaatgtgatcgtggccaacacaatgcccacccacctgagcaacggccagatgtgcgagtggcccagacctagaggacaggccgccacacctgagacacctcagccttctccacctggcggctctggcagcgagccttacaaactgctgcctggcgctgtggccaccatcgtgagacctctgagcgccatcccccagcccaccatcaccaagcaggaagtgatctgaggactagtccctgttcccagagcccacttttttttctttttttgaaataaaatagcctgtctttcagatctaaaaaaaaaaaaaaaaaaaaaaaaaaaaaaaaaaaaaaaaaaaaaaaaaaaaaaaaaaaaaaaaaaaaaaaaaaaaaaaaaaaaaaaaaaaaaaaaaaaa

SEQ ID NO: 4649 - RNA, 1673 nt, synthetic construct
  misc_feature 1..1673: note = mRNA a-1 (A100) (opt29) from Homo sapiens__NP_000448.3__HNF4A(1-474)(K106R_K108R_K126R_K127R)
  source 1..1673: mol_type = other RNA
aggagagtcccgcagtcggcgtccagcggctctgcttgttcgtgtgtgtgtcgttgcaggccttattcaagcttaccatgagactgagcaagaccctggtggacatggacatggccgactactctgccgccctggaccctgcctacaccaccctggagttcgaaaacgtgcaagtgctgaccatgggcaacgacaccagccctagcgagggcaccaacctgaacgcccctaatagcctgggagtgtccgccctgtgtgccatctgtggcgatagagccaccggcaagcactacggcgccagctcttgtgatggctgcaagggcttcttccggcggagcgtgcggaagaaccacatgtacagctgccggttcagccggcagtgcgtggtggaccgggatagacggaaccagtgccggtactgcagactgaagaagtgcttcagagccggcatgcggagagaagccgtgcagaacgagcgggaccggatcagcaccagaagaagcagctacgaggacagcagcctgcccagcatcaacgccctgctgcaggccgaggtgctgagcagacagatcaccagcccagtgtccggcatcaacggcgacatccgggccaagaagatcgccagcattgccgacgtgtgcgagagcatgaaggaacagctgctggtgctggtggaatgggccaagtacatccccgccttttgcgagctgcccctggacgatcaggtggccctgctgagagcacacgccggcgaacatctgctgctgggagccaccaagcggagcatggtgttcaaggacgtgctgctgctgggcaacgactacatcgtgcccagacactgccctgagctggccgagatgagccgggtgtccatcagaatcctggacgaactggtgctgccgtttcaggaactgcagatcgacgacaacgagtacgcctacctgaaggccatcatctttttcgaccccgacgccaagggcctgagcgaccctggcaagatcaagcggctgagaagccaggtgcaagtgtccctggaagattacatcaacgaccggcagtacgacagccggggcagatttggcgaactgctcctgctgctgcccaccctgcagagcatcacctggcagatgatcgagcagatccagttcatcaagctgttcggcatggccaagatcgacaatctgctgcaggaaatgctgctcgggggcagcccttctgatgcccctcatgcccaccaccctctgcaccctcacctgatgcaagaacacatgggcaccaatgtgatcgtggccaacacaatgcccacccacctgagcaacggccagatgtgcgagtggcccagacctagaggacaggccgccacacctgagacacctcagccttctccacctggcggctctggcagcgagccttacaaactgctgcctggcgctgtggccaccatcgtgaaacctctgagcgccatcccccagcccaccatcaccaagcaggaagtgatctgaggactagtccctgttcccagagcccacttttttttctttttttgaaataaaatagcctgtctttcagatctaaaaaaaaaaaaaaaaaaaaaaaaaaaaaaaaaaaaaaaaaaaaaaaaaaaaaaaaaaaaaaaaaaaaaaaaaaaaaaaaaaaaaaaaaaaaaaaaaaaa

SEQ ID NO: 4650 - RNA, 1673 nt, synthetic construct
  misc_feature 1..1673: note = mRNA a-1 (A100) (opt29) from Homo sapiens__NP_000448.3__HNF4A(1-474)(E285Q)
  source 1..1673: mol_type = other RNA
aggagagtcccgcagtcggcgtccagcggctctgcttgttcgtgtgtgtgtcgttgcaggccttattcaagcttaccatgagactgagcaagaccctggtggacatggacatggccgactactctgccgccctggaccctgcctacaccaccctggagttcgaaaacgtgcaagtgctgaccatgggcaacgacaccagccctagcgagggcaccaacctgaacgcccctaatagcctgggagtgtccgccctgtgtgccatctgtggcgatagagccaccggcaagcactacggcgccagctcttgtgatggctgcaagggcttcttccggcggagcgtgcggaagaaccacatgtacagctgccggttcagccggcagtgcgtggtggacaaggataagcggaaccagtgccggtactgcagactgaagaagtgcttcagagccggcatgaagaaagaagccgtgcagaacgagcgggaccggatcagcaccagaagaagcagctacgaggacagcagcctgcccagcatcaacgccctgctgcaggccgaggtgctgagcagacagatcaccagcccagtgtccggcatcaacggcgacatccgggccaagaagatcgccagcattgccgacgtgtgcgagagcatgaaggaacagctgctggtgctggtggaatgggccaagtacatccccgccttttgcgagctgcccctggacgatcaggtggccctgctgagagcacacgccggcgaacatctgctgctgggagccaccaagcggagcatggtgttcaaggacgtgctgctgctgggcaacgactacatcgtgcccagacactgccctgagctggccgagatgagccgggtgtccatcagaatcctggacgaactggtgctgccgtttcaggaactgcagatcgacgacaaccagtacgcctacctgaaggccatcatctttttcgaccccgacgccaagggcctgagcgaccctggcaagatcaagcggctgagaagccaggtgcaagtgtccctggaagattacatcaacgaccggcagtacgacagccggggcagatttggcgaactgctcctgctgctgcccaccctgcagagcatcacctggcagatgatcgagcagatccagttcatcaagctgttcggcatggccaagatcgacaatctgctgcaggaaatgctgctcgggggcagcccttctgatgcccctcatgcccaccaccctctgcaccctcacctgatgcaagaacacatgggcaccaatgtgatcgtggccaacacaatgcccacccacctgagcaacggccagatgtgcgagtggcccagacctagaggacaggccgccacacctgagacacctcagccttctccacctggcggctctggcagcgagccttacaaactgctgcctggcgctgtggccaccatcgtgaaacctctgagcgccatcccccagcccaccatcaccaagcaggaagtgatctgaggactagtccctgttcccagagcccacttttttttctttttttgaaataaaatagcctgtctttcagatctaaaaaaaaaaaaaaaaaaaaaaaaaaaaaaaaaaaaaaaaaaaaaaaaaaaaaaaaaaaaaaaaaaaaaaaaaaaaaaaaaaaaaaaaaaaaaaaaaaaa

SEQ ID NO: 4651 - RNA, 1673 nt, synthetic construct
  misc_feature 1..1673: note = mRNA a-1 (A100) (opt29) from Homo sapiens__NP_000448.3__HNF4A(1-474)(T166E)
  source 1..1673: mol_type = other RNA
aggagagtcccgcagtcggcgtccagcggctctgcttgttcgtgtgtgtgtcgttgcaggccttattcaagcttaccatgagactgagcaagaccctggtggacatggacatggccgactactctgccgccctggaccctgcctacaccaccctggagttcgaaaacgtgcaagtgctgaccatgggcaacgacaccagccctagcgagggcaccaacctgaacgcccctaatagcctgggagtgtccgccctgtgtgccatctgtggcgatagagccaccggcaagcactacggcgccagctcttgtgatggctgcaagggcttcttccggcggagcgtgcggaagaaccacatgtacagctgccggttcagccggcagtgcgtggtggacaaggataagcggaaccagtgccggtactgcagactgaagaagtgcttcagagccggcatgaagaaagaagccgtgcagaacgagcgggaccggatcagcaccagaagaagcagctacgaggacagcagcctgcccagcatcaacgccctgctgcaggccgaggtgctgagcagacagatcgagagcccagtgtccggcatcaacggcgacatccgggccaagaagatcgccagcattgccgacgtgtgcgagagcatgaaggaacagctgctggtgctggtggaatgggccaagtacatccccgccttttgcgagctgcccctggacgatcaggtggccctgctgagagcacacgccggcgaacatctgctgctgggagccaccaagcggagcatggtgttcaaggacgtgctgctgctgggcaacgactacatcgtgcccagacactgccctgagctggccgagatgagccgggtgtccatcagaatcctggacgaactggtgctgccgtttcaggaactgcagatcgacgacaacgagtacgcctacctgaaggccatcatctttttcgaccccgacgccaagggcctgagcgaccctggcaagatcaagcggctgagaagccaggtgcaagtgtccctggaagattacatcaacgaccggcagtacgacagccggggcagatttggcgaactgctcctgctgctgcccaccctgcagagcatcacctggcagatgatcgagcagatccagttcatcaagctgttcggcatggccaagatcgacaatctgctgcaggaaatgctgctcgggggcagcccttctgatgcccctcatgcccaccaccctctgcaccctcacctgatgcaagaacacatgggcaccaatgtgatcgtggccaacacaatgcccacccacctgagcaacggccagatgtgcgagtggcccagacctagaggacaggccgccacacctgagacacctcagccttctccacctggcggctctggcagcgagccttacaaactgctgcctggcgctgtggccaccatcgtgaaacctctgagcgccatcccccagcccaccatcaccaagcaggaagtgatctgaggactagtccctgttcccagagcccacttttttttctttttttgaaataaaatagcctgtctttcagatctaaaaaaaaaaaaaaaaaaaaaaaaaaaaaaaaaaaaaaaaaaaaaaaaaaaaaaaaaaaaaaaaaaaaaaaaaaaaaaaaaaaaaaaaaaaaaaaaaaaa

SEQ ID NO: 4652 - RNA, 1673 nt, synthetic construct
  misc_feature 1..1673: note = mRNA a-1 (A100) (opt29) from Homo sapiens__NP_000448.3__HNF4A(1-474)(S148A)
  source 1..1673: mol_type = other RNA
aggagagtcccgcagtcggcgtccagcggctctgcttgttcgtgtgtgtgtcgttgcaggccttattcaagcttaccatgagactgagcaagaccctggtggacatggacatggccgactactctgccgccctggaccctgcctacaccaccctggagttcgaaaacgtgcaagtgctgaccatgggcaacgacaccagccctagcgagggcaccaacctgaacgcccctaatagcctgggagtgtccgccctgtgtgccatctgtggcgatagagccaccggcaagcactacggcgccagctcttgtgatggctgcaagggcttcttccggcggagcgtgcggaagaaccacatgtacagctgccggttcagccggcagtgcgtggtggacaaggataagcggaaccagtgccggtactgcagactgaagaagtgcttcagagccggcatgaagaaagaagccgtgcagaacgagcgggaccggatcagcaccagaagaagcagctacgaggacagcgccctgcccagcatcaacgccctgctgcaggccgaggtgctgagcagacagatcaccagcccagtgtccggcatcaacggcgacatccgggccaagaagatcgccagcattgccgacgtgtgcgagagcatgaaggaacagctgctggtgctggtggaatgggccaagtacatccccgccttttgcgagctgcccctggacgatcaggtggccctgctgagagcacacgccggcgaacatctgctgctgggagccaccaagcggagcatggtgttcaaggacgtgctgctgctgggcaacgactacatcgtgcccagacactgccctgagctggccgagatgagccgggtgtccatcagaatcctggacgaactggtgctgccgtttcaggaactgcagatcgacgacaacgagtacgcctacctgaaggccatcatctttttcgaccccgacgccaagggcctgagcgaccctggcaagatcaagcggctgagaagccaggtgcaagtgtccctggaagattacatcaacgaccggcagtacgacagccggggcagatttggcgaactgctcctgctgctgcccaccctgcagagcatcacctggcagatgatcgagcagatccagttcatcaagctgttcggcatggccaagatcgacaatctgctgcaggaaatgctgctcgggggcagcccttctgatgcccctcatgcccaccaccctctgcaccctcacctgatgcaagaacacatgggcaccaatgtgatcgtggccaacacaatgcccacccacctgagcaacggccagatgtgcgagtggcccagacctagaggacaggccgccacacctgagacacctcagccttctccacctggcggctctggcagcgagccttacaaactgctgcctggcgctgtggccaccatcgtgaaacctctgagcgccatcccccagcccaccatcaccaagcaggaagtgatctgaggactagtccctgttcccagagcccacttttttttctttttttgaaataaaatagcctgtctttcagatctaaaaaaaaaaaaaaaaaaaaaaaaaaaaaaaaaaaaaaaaaaaaaaaaaaaaaaaaaaaaaaaaaaaaaaaaaaaaaaaaaaaaaaaaaaaaaaaaaaaa

SEQ ID NO: 4653 - RNA, 1673 nt, synthetic construct
  misc_feature 1..1673: note = mRNA a-1 (A100) (opt29) from Homo sapiens__NP_000448.3__HNF4A(1-474)(S148E)
  source 1..1673: mol_type = other RNA
aggagagtcccgcagtcggcgtccagcggctctgcttgttcgtgtgtgtgtcgttgcaggccttattcaagcttaccatgagactgagcaagaccctggtggacatggacatggccgactactctgccgccctggaccctgcctacaccaccctggagttcgaaaacgtgcaagtgctgaccatgggcaacgacaccagccctagcgagggcaccaacctgaacgcccctaatagcctgggagtgtccgccctgtgtgccatctgtggcgatagagccaccggcaagcactacggcgccagctcttgtgatggctgcaagggcttcttccggcggagcgtgcggaagaaccacatgtacagctgccggttcagccggcagtgcgtggtggacaaggataagcggaaccagtgccggtactgcagactgaagaagtgcttcagagccggcatgaagaaagaagccgtgcagaacgagcgggaccggatcagcaccagaagaagcagctacgaggacagcgaactgcccagcatcaacgccctgctgcaggccgaggtgctgagcagacagatcaccagcccagtgtccggcatcaacggcgacatccgggccaagaagatcgccagcattgccgacgtgtgcgagagcatgaaggaacagctgctggtgctggtggaatgggccaagtacatccccgccttttgcgagctgcccctggacgatcaggtggccctgctgagagcacacgccggcgaacatctgctgctgggagccaccaagcggagcatggtgttcaaggacgtgctgctgctgggcaacgactacatcgtgcccagacactgccctgagctggccgagatgagccgggtgtccatcagaatcctggacgaactggtgctgccgtttcaggaactgcagatcgacgacaacgagtacgcctacctgaaggccatcatctttttcgaccccgacgccaagggcctgagcgaccctggcaagatcaagcggctgagaagccaggtgcaagtgtccctggaagattacatcaacgaccggcagtacgacagccggggcagatttggcgaactgctcctgctgctgcccaccctgcagagcatcacctggcagatgatcgagcagatccagttcatcaagctgttcggcatggccaagatcgacaatctgctgcaggaaatgctgctcgggggcagcccttctgatgcccctcatgcccaccaccctctgcaccctcacctgatgcaagaacacatgggcaccaatgtgatcgtggccaacacaatgcccacccacctgagcaacggccagatgtgcgagtggcccagacctagaggacaggccgccacacctgagacacctcagccttctccacctggcggctctggcagcgagccttacaaactgctgcctggcgctgtggccaccatcgtgaaacctctgagcgccatcccccagcccaccatcaccaagcaggaagtgatctgaggactagtccctgttcccagagcccacttttttttctttttttgaaataaaatagcctgtctttcagatctaaaaaaaaaaaaaaaaaaaaaaaaaaaaaaaaaaaaaaaaaaaaaaaaaaaaaaaaaaaaaaaaaaaaaaaaaaaaaaaaaaaaaaaaaaaaaaaaaaaa

SEQ ID NO: 4654 - RNA, 1673 nt, synthetic construct
  misc_feature 1..1673: note = mRNA a-1 (A100) (opt29) from Homo sapiens__NP_000448.3__HNF4A(1-474)(S183A)
  source 1..1673: mol_type = other RNA
aggagagtcccgcagtcggcgtccagcggctctgcttgttcgtgtgtgtgtcgttgcaggccttattcaagcttaccatgagactgagcaagaccctggtggacatggacatggccgactactctgccgccctggaccctgcctacaccaccctggagttcgaaaacgtgcaagtgctgaccatgggcaacgacaccagccctagcgagggcaccaacctgaacgcccctaatagcctgggagtgtccgccctgtgtgccatctgtggcgatagagccaccggcaagcactacggcgccagctcttgtgatggctgcaagggcttcttccggcggagcgtgcggaagaaccacatgtacagctgccggttcagccggcagtgcgtggtggacaaggataagcggaaccagtgccggtactgcagactgaagaagtgcttcagagccggcatgaagaaagaagccgtgcagaacgagcgggaccggatcagcaccagaagaagcagctacgaggacagcagcctgcccagcatcaacgccctgctgcaggccgaggtgctgagcagacagatcaccagcccagtgtccggcatcaacggcgacatccgggccaagaagatcgccgccattgccgacgtgtgcgagagcatgaaggaacagctgctggtgctggtggaatgggccaagtacatccccgccttttgcgagctgcccctggacgatcaggtggccctgctgagagcacacgccggcgaacatctgctgctgggagccaccaagcggagcatggtgttcaaggacgtgctgctgctgggcaacgactacatcgtgcccagacactgccctgagctggccgagatgagccgggtgtccatcagaatcctggacgaactggtgctgccgtttcaggaactgcagatcgacgacaacgagtacgcctacctgaaggccatcatctttttcgaccccgacgccaagggcctgagcgaccctggcaagatcaagcggctgagaagccaggtgcaagtgtccctggaagattacatcaacgaccggcagtacgacagccggggcagatttggcgaactgctcctgctgctgcccaccctgcagagcatcacctggcagatgatcgagcagatccagttcatcaagctgttcggcatggccaagatcgacaatctgctgcaggaaatgctgctcgggggcagcccttctgatgcccctcatgcccaccaccctctgcaccctcacctgatgcaagaacacatgggcaccaatgtgatcgtggccaacacaatgcccacccacctgagcaacggccagatgtgcgagtggcccagacctagaggacaggccgccacacctgagacacctcagccttctccacctggcggctctggcagcgagccttacaaactgctgcctggcgctgtggccaccatcgtgaaacctctgagcgccatcccccagcccaccatcaccaagcaggaagtgatctgaggactagtccctgttcccagagcccacttttttttctttttttgaaataaaatagcctgtctttcagatctaaaaaaaaaaaaaaaaaaaaaaaaaaaaaaaaaaaaaaaaaaaaaaaaaaaaaaaaaaaaaaaaaaaaaaaaaaaaaaaaaaaaaaaaaaaaaaaaaaaa

SEQ ID NO: 4655 - RNA, 1673 nt, synthetic construct
  misc_feature 1..1673: note = mRNA a-1 (A100) (opt29) from Homo sapiens__NP_000448.3__HNF4A(1-474)(S183E)
  source 1..1673: mol_type = other RNA
aggagagtcccgcagtcggcgtccagcggctctgcttgttcgtgtgtgtgtcgttgcaggccttattcaagcttaccatgagactgagcaagaccctggtggacatggacatggccgactactctgccgccctggaccctgcctacaccaccctggagttcgaaaacgtgcaagtgctgaccatgggcaacgacaccagccctagcgagggcaccaacctgaacgcccctaatagcctgggagtgtccgccctgtgtgccatctgtggcgatagagccaccggcaagcactacggcgccagctcttgtgatggctgcaagggcttcttccggcggagcgtgcggaagaaccacatgtacagctgccggttcagccggcagtgcgtggtggacaaggataagcggaaccagtgccggtactgcagactgaagaagtgcttcagagccggcatgaagaaagaagccgtgcagaacgagcgggaccggatcagcaccagaagaagcagctacgaggacagcagcctgcccagcatcaacgccctgctgcaggccgaggtgctgagcagacagatcaccagcccagtgtccggcatcaacggcgacatccgggccaagaagatcgccgagattgccgacgtgtgcgagagcatgaaggaacagctgctggtgctggtggaatgggccaagtacatccccgccttttgcgagctgcccctggacgatcaggtggccctgctgagagcacacgccggcgaacatctgctgctgggagccaccaagcggagcatggtgttcaaggacgtgctgctgctgggcaacgactacatcgtgcccagacactgccctgagctggccgagatgagccgggtgtccatcagaatcctggacgaactggtgctgccgtttcaggaactgcagatcgacgacaacgagtacgcctacctgaaggccatcatctttttcgaccccgacgccaagggcctgagcgaccctggcaagatcaagcggctgagaagccaggtgcaagtgtccctggaagattacatcaacgaccggcagtacgacagccggggcagatttggcgaactgctcctgctgctgcccaccctgcagagcatcacctggcagatgatcgagcagatccagttcatcaagctgttcggcatggccaagatcgacaatctgctgcaggaaatgctgctcgggggcagcccttctgatgcccctcatgcccaccaccctctgcaccctcacctgatgcaagaacacatgggcaccaatgtgatcgtggccaacacaatgcccacccacctgagcaacggccagatgtgcgagtggcccagacctagaggacaggccgccacacctgagacacctcagccttctccacctggcggctctggcagcgagccttacaaactgctgcctggcgctgtggccaccatcgtgaaacctctgagcgccatcccccagcccaccatcaccaagcaggaagtgatctgaggactagtccctgttcccagagcccacttttttttctttttttgaaataaaatagcctgtctttcagatctaaaaaaaaaaaaaaaaaaaaaaaaaaaaaaaaaaaaaaaaaaaaaaaaaaaaaaaaaaaaaaaaaaaaaaaaaaaaaaaaaaaaaaaaaaaaaaaaaaaa

SEQ ID NO: 4656 - RNA, 1673 nt, synthetic construct
  misc_feature 1..1673: note = mRNA a-1 (A100) (opt29) from Homo sapiens__NP_000448.3__HNF4A(1-474)(S461A)
  source 1..1673: mol_type = other RNA
aggagagtcccgcagtcggcgtccagcggctctgcttgttcgtgtgtgtgtcgttgcaggccttattcaagcttaccatgagactgagcaagaccctggtggacatggacatggccgactactctgccgccctggaccctgcctacaccaccctggagttcgaaaacgtgcaagtgctgaccatgggcaacgacaccagccctagcgagggcaccaacctgaacgcccctaatagcctgggagtgtccgccctgtgtgccatctgtggcgatagagccaccggcaagcactacggcgccagctcttgtgatggctgcaagggcttcttccggcggagcgtgcggaagaaccacatgtacagctgccggttcagccggcagtgcgtggtggacaaggataagcggaaccagtgccggtactgcagactgaagaagtgcttcagagccggcatgaagaaagaagccgtgcagaacgagcgggaccggatcagcaccagaagaagcagctacgaggacagcagcctgcccagcatcaacgccctgctgcaggccgaggtgctgagcagacagatcaccagcccagtgtccggcatcaacggcgacatccgggccaagaagatcgccagcattgccgacgtgtgcgagagcatgaaggaacagctgctggtgctggtggaatgggccaagtacatccccgccttttgcgagctgcccctggacgatcaggtggccctgctgagagcacacgccggcgaacatctgctgctgggagccaccaagcggagcatggtgttcaaggacgtgctgctgctgggcaacgactacatcgtgcccagacactgccctgagctggccgagatgagccgggtgtccatcagaatcctggacgaactggtgctgccgtttcaggaactgcagatcgacgacaacgagtacgcctacctgaaggccatcatctttttcgaccccgacgccaagggcctgagcgaccctggcaagatcaagcggctgagaagccaggtgcaagtgtccctggaagattacatcaacgaccggcagtacgacagccggggcagatttggcgaactgctcctgctgctgcccaccctgcagagcatcacctggcagatgatcgagcagatccagttcatcaagctgttcggcatggccaagatcgacaatctgctgcaggaaatgctgctcgggggcagcccttctgatgcccctcatgcccaccaccctctgcaccctcacctgatgcaagaacacatgggcaccaatgtgatcgtggccaacacaatgcccacccacctgagcaacggccagatgtgcgagtggcccagacctagaggacaggccgccacacctgagacacctcagccttctccacctggcggctctggcagcgagccttacaaactgctgcctggcgctgtggccaccatcgtgaaacctctggccgccatcccccagcccaccatcaccaagcaggaagtgatctgaggactagtccctgttcccagagcccacttttttttctttttttgaaataaaatagcctgtctttcagatctaaaaaaaaaaaaaaaaaaaaaaaaaaaaaaaaaaaaaaaaaaaaaaaaaaaaaaaaaaaaaaaaaaaaaaaaaaaaaaaaaaaaaaaaaaaaaaaaaaaa

SEQ ID NO: 4657 - RNA, 1673 nt, synthetic construct
  misc_feature 1..1673: note = mRNA a-1 (A100) (opt29) from Homo sapiens__NP_000448.3__HNF4A(1-474)(S461E)
  source 1..1673: mol_type = other RNA
aggagagtcccgcagtcggcgtccagcggctctgcttgttcgtgtgtgtgtcgttgcaggccttattcaagcttaccatgagactgagcaagaccctggtggacatggacatggccgactactctgccgccctggaccctgcctacaccaccctggagttcgaaaacgtgcaagtgctgaccatgggcaacgacaccagccctagcgagggcaccaacctgaacgcccctaatagcctgggagtgtccgccctgtgtgccatctgtggcgatagagccaccggcaagcactacggcgccagctcttgtgatggctgcaagggcttcttccggcggagcgtgcggaagaaccacatgtacagctgccggttcagccggcagtgcgtggtggacaaggataagcggaaccagtgccggtactgcagactgaagaagtgcttcagagccggcatgaagaaagaagccgtgcagaacgagcgggaccggatcagcaccagaagaagcagctacgaggacagcagcctgcccagcatcaacgccctgctgcaggccgaggtgctgagcagacagatcaccagcccagtgtccggcatcaacggcgacatccgggccaagaagatcgccagcattgccgacgtgtgcgagagcatgaaggaacagctgctggtgctggtggaatgggccaagtacatccccgccttttgcgagctgcccctggacgatcaggtggccctgctgagagcacacgccggcgaacatctgctgctgggagccaccaagcggagcatggtgttcaaggacgtgctgctgctgggcaacgactacatcgtgcccagacactgccctgagctggccgagatgagccgggtgtccatcagaatcctggacgaactggtgctgccgtttcaggaactgcagatcgacgacaacgagtacgcctacctgaaggccatcatctttttcgaccccgacgccaagggcctgagcgaccctggcaagatcaagcggctgagaagccaggtgcaagtgtccctggaagattacatcaacgaccggcagtacgacagccggggcagatttggcgaactgctcctgctgctgcccaccctgcagagcatcacctggcagatgatcgagcagatccagttcatcaagctgttcggcatggccaagatcgacaatctgctgcaggaaatgctgctcgggggcagcccttctgatgcccctcatgcccaccaccctctgcaccctcacctgatgcaagaacacatgggcaccaatgtgatcgtggccaacacaatgcccacccacctgagcaacggccagatgtgcgagtggcccagacctagaggacaggccgccacacctgagacacctcagccttctccacctggcggctctggcagcgagccttacaaactgctgcctggcgctgtggccaccatcgtgaaacctctggaggccatcccccagcccaccatcaccaagcaggaagtgatctgaggactagtccctgttcccagagcccacttttttttctttttttgaaataaaatagcctgtctttcagatctaaaaaaaaaaaaaaaaaaaaaaaaaaaaaaaaaaaaaaaaaaaaaaaaaaaaaaaaaaaaaaaaaaaaaaaaaaaaaaaaaaaaaaaaaaaaaaaaaaaa

SEQ ID NO: 4658 - RNA, 1673 nt, synthetic construct
  misc_feature 1..1673: note = mRNA a-1 (A100) (opt29) from Homo sapiens__NP_000448.3__HNF4A(1-474)(S142A_S143A_S313A)
  source 1..1673: mol_type = other RNA
aggagagtcccgcagtcggcgtccagcggctctgcttgttcgtgtgtgtgtcgttgcaggccttattcaagcttaccatgagactgagcaagaccctggtggacatggacatggccgactactctgccgccctggaccctgcctacaccaccctggagttcgaaaacgtgcaagtgctgaccatgggcaacgacaccagccctagcgagggcaccaacctgaacgcccctaatagcctgggagtgtccgccctgtgtgccatctgtggcgatagagccaccggcaagcactacggcgccagctcttgtgatggctgcaagggcttcttccggcggagcgtgcggaagaaccacatgtacagctgccggttcagccggcagtgcgtggtggacaaggataagcggaaccagtgccggtactgcagactgaagaagtgcttcagagccggcatgaagaaagaagccgtgcagaacgagcgggaccggatcagcaccagaagagccgcctacgaggacagcagcctgcccagcatcaacgccctgctgcaggccgaggtgctgagcagacagatcaccagcccagtgtccggcatcaacggcgacatccgggccaagaagatcgccagcattgccgacgtgtgcgagagcatgaaggaacagctgctggtgctggtggaatgggccaagtacatccccgccttttgcgagctgcccctggacgatcaggtggccctgctgagagcacacgccggcgaacatctgctgctgggagccaccaagcggagcatggtgttcaaggacgtgctgctgctgggcaacgactacatcgtgcccagacactgccctgagctggccgagatgagccgggtgtccatcagaatcctggacgaactggtgctgccgtttcaggaactgcagatcgacgacaacgagtacgcctacctgaaggccatcatctttttcgaccccgacgccaagggcctgagcgaccctggcaagatcaagcggctgagagcccaggtgcaagtgtccctggaagattacatcaacgaccggcagtacgacagccggggcagatttggcgaactgctcctgctgctgcccaccctgcagagcatcacctggcagatgatcgagcagatccagttcatcaagctgttcggcatggccaagatcgacaatctgctgcaggaaatgctgctcgggggcagcccttctgatgcccctcatgcccaccaccctctgcaccctcacctgatgcaagaacacatgggcaccaatgtgatcgtggccaacacaatgcccacccacctgagcaacggccagatgtgcgagtggcccagacctagaggacaggccgccacacctgagacacctcagccttctccacctggcggctctggcagcgagccttacaaactgctgcctggcgctgtggccaccatcgtgaaacctctgagcgccatcccccagcccaccatcaccaagcaggaagtgatctgaggactagtccctgttcccagagcccacttttttttctttttttgaaataaaatagcctgtctttcagatctaaaaaaaaaaaaaaaaaaaaaaaaaaaaaaaaaaaaaaaaaaaaaaaaaaaaaaaaaaaaaaaaaaaaaaaaaaaaaaaaaaaaaaaaaaaaaaaaaaaa

SEQ ID NO: 4659 - RNA, 1673 nt, synthetic construct
  misc_feature 1..1673: note = mRNA a-1 (A100) (opt29) from Homo sapiens__NP_000448.3__HNF4A(1-474)(S142A_S143A_S313A_K458R)
  source 1..1673: mol_type = other RNA
aggagagtcccgcagtcggcgtccagcggctctgcttgttcgtgtgtgtgtcgttgcaggccttattcaagcttaccatgagactgagcaagaccctggtggacatggacatggccgactactctgccgccctggaccctgcctacaccaccctggagttcgaaaacgtgcaagtgctgaccatgggcaacgacaccagccctagcgagggcaccaacctgaacgcccctaatagcctgggagtgtccgccctgtgtgccatctgtggcgatagagccaccggcaagcactacggcgccagctcttgtgatggctgcaagggcttcttccggcggagcgtgcggaagaaccacatgtacagctgccggttcagccggcagtgcgtggtggacaaggataagcggaaccagtgccggtactgcagactgaagaagtgcttcagagccggcatgaagaaagaagccgtgcagaacgagcgggaccggatcagcaccagaagagccgcctacgaggacagcagcctgcccagcatcaacgccctgctgcaggccgaggtgctgagcagacagatcaccagcccagtgtccggcatcaacggcgacatccgggccaagaagatcgccagcattgccgacgtgtgcgagagcatgaaggaacagctgctggtgctggtggaatgggccaagtacatccccgccttttgcgagctgcccctggacgatcaggtggccctgctgagagcacacgccggcgaacatctgctgctgggagccaccaagcggagcatggtgttcaaggacgtgctgctgctgggcaacgactacatcgtgcccagacactgccctgagctggccgagatgagccgggtgtccatcagaatcctggacgaactggtgctgccgtttcaggaactgcagatcgacgacaacgagtacgcctacctgaaggccatcatctttttcgaccccgacgccaagggcctgagcgaccctggcaagatcaagcggctgagagcccaggtgcaagtgtccctggaagattacatcaacgaccggcagtacgacagccggggcagatttggcgaactgctcctgctgctgcccaccctgcagagcatcacctggcagatgatcgagcagatccagttcatcaagctgttcggcatggccaagatcgacaatctgctgcaggaaatgctgctcgggggcagcccttctgatgcccctcatgcccaccaccctctgcaccctcacctgatgcaagaacacatgggcaccaatgtgatcgtggccaacacaatgcccacccacctgagcaacggccagatgtgcgagtggcccagacctagaggacaggccgccacacctgagacacctcagccttctccacctggcggctctggcagcgagccttacaaactgctgcctggcgctgtggccaccatcgtgagacctctgagcgccatcccccagcccaccatcaccaagcaggaagtgatctgaggactagtccctgttcccagagcccacttttttttctttttttgaaataaaatagcctgtctttcagatctaaaaaaaaaaaaaaaaaaaaaaaaaaaaaaaaaaaaaaaaaaaaaaaaaaaaaaaaaaaaaaaaaaaaaaaaaaaaaaaaaaaaaaaaaaaaaaaaaaaa

SEQ ID NO: 4660 - RNA, 1673 nt, synthetic construct
  misc_feature 1..1673: note = mRNA a-1 (A100) (opt29) from Homo sapiens__NP_000448.3__HNF4A(1-474)(S142A_S143A_S167A_S313A_ S378A_T429A_T432A_S436A_K458R)
  source 1..1673: mol_type = other RNA
aggagagtcccgcagtcggcgtccagcggctctgcttgttcgtgtgtgtgtcgttgcaggccttattcaagcttaccatgagactgagcaagaccctggtggacatggacatggccgactactctgccgccctggaccctgcctacaccaccctggagttcgaaaacgtgcaagtgctgaccatgggcaacgacaccagccctagcgagggcaccaacctgaacgcccctaatagcctgggagtgtccgccctgtgtgccatctgtggcgatagagccaccggcaagcactacggcgccagctcttgtgatggctgcaagggcttcttccggcggagcgtgcggaagaaccacatgtacagctgccggttcagccggcagtgcgtggtggacaaggataagcggaaccagtgccggtactgcagactgaagaagtgcttcagagccggcatgaagaaagaagccgtgcagaacgagcgggaccggatcagcaccagaagagccgcctacgaggacagcagcctgcccagcatcaacgccctgctgcaggccgaggtgctgagcagacagatcaccgccccagtgtccggcatcaacggcgacatccgggccaagaagatcgccagcattgccgacgtgtgcgagagcatgaaggaacagctgctggtgctggtggaatgggccaagtacatccccgccttttgcgagctgcccctggacgatcaggtggccctgctgagagcacacgccggcgaacatctgctgctgggagccaccaagcggagcatggtgttcaaggacgtgctgctgctgggcaacgactacatcgtgcccagacactgccctgagctggccgagatgagccgggtgtccatcagaatcctggacgaactggtgctgccgtttcaggaactgcagatcgacgacaacgagtacgcctacctgaaggccatcatctttttcgaccccgacgccaagggcctgagcgaccctggcaagatcaagcggctgagagcccaggtgcaagtgtccctggaagattacatcaacgaccggcagtacgacagccggggcagatttggcgaactgctcctgctgctgcccaccctgcagagcatcacctggcagatgatcgagcagatccagttcatcaagctgttcggcatggccaagatcgacaatctgctgcaggaaatgctgctcgggggcgccccttctgatgcccctcatgcccaccaccctctgcaccctcacctgatgcaagaacacatgggcaccaatgtgatcgtggccaacacaatgcccacccacctgagcaacggccagatgtgcgagtggcccagacctagaggacaggccgccgcccctgaggcccctcagcctgccccacctggcggctctggcagcgagccttacaaactgctgcctggcgctgtggccaccatcgtgagacctctgagcgccatcccccagcccaccatcaccaagcaggaagtgatctgaggactagtccctgttcccagagcccacttttttttctttttttgaaataaaatagcctgtctttcagatctaaaaaaaaaaaaaaaaaaaaaaaaaaaaaaaaaaaaaaaaaaaaaaaaaaaaaaaaaaaaaaaaaaaaaaaaaaaaaaaaaaaaaaaaaaaaaaaaaaaa

SEQ ID NO: 4661 - RNA, 1673 nt, synthetic construct
  misc_feature 1..1673: note = mRNA a-1 (A100) (opt29) from Homo sapiens__NP_000448.3__HNF4A(1-474)(S142A_S143A_S148A_S167A_ S313A_S378A_T429A_T432A_S436A_K458R)
  source 1..1673: mol_type = other RNA
aggagagtcccgcagtcggcgtccagcggctctgcttgttcgtgtgtgtgtcgttgcaggccttattcaagcttaccatgagactgagcaagaccctggtggacatggacatggccgactactctgccgccctggaccctgcctacaccaccctggagttcgaaaacgtgcaagtgctgaccatgggcaacgacaccagccctagcgagggcaccaacctgaacgcccctaatagcctgggagtgtccgccctgtgtgccatctgtggcgatagagccaccggcaagcactacggcgccagctcttgtgatggctgcaagggcttcttccggcggagcgtgcggaagaaccacatgtacagctgccggttcagccggcagtgcgtggtggacaaggataagcggaaccagtgccggtactgcagactgaagaagtgcttcagagccggcatgaagaaagaagccgtgcagaacgagcgggaccggatcagcaccagaagagccgcctacgaggacagcgccctgcccagcatcaacgccctgctgcaggccgaggtgctgagcagacagatcaccgccccagtgtccggcatcaacggcgacatccgggccaagaagatcgccagcattgccgacgtgtgcgagagcatgaaggaacagctgctggtgctggtggaatgggccaagtacatccccgccttttgcgagctgcccctggacgatcaggtggccctgctgagagcacacgccggcgaacatctgctgctgggagccaccaagcggagcatggtgttcaaggacgtgctgctgctgggcaacgactacatcgtgcccagacactgccctgagctggccgagatgagccgggtgtccatcagaatcctggacgaactggtgctgccgtttcaggaactgcagatcgacgacaacgagtacgcctacctgaaggccatcatctttttcgaccccgacgccaagggcctgagcgaccctggcaagatcaagcggctgagagcccaggtgcaagtgtccctggaagattacatcaacgaccggcagtacgacagccggggcagatttggcgaactgctcctgctgctgcccaccctgcagagcatcacctggcagatgatcgagcagatccagttcatcaagctgttcggcatggccaagatcgacaatctgctgcaggaaatgctgctcgggggcgccccttctgatgcccctcatgcccaccaccctctgcaccctcacctgatgcaagaacacatgggcaccaatgtgatcgtggccaacacaatgcccacccacctgagcaacggccagatgtgcgagtggcccagacctagaggacaggccgccgcccctgaggcccctcagcctgccccacctggcggctctggcagcgagccttacaaactgctgcctggcgctgtggccaccatcgtgagacctctgagcgccatcccccagcccaccatcaccaagcaggaagtgatctgaggactagtccctgttcccagagcccacttttttttctttttttgaaataaaatagcctgtctttcagatctaaaaaaaaaaaaaaaaaaaaaaaaaaaaaaaaaaaaaaaaaaaaaaaaaaaaaaaaaaaaaaaaaaaaaaaaaaaaaaaaaaaaaaaaaaaaaaaaaaaa

SEQ ID NO: 4662 - RNA, 1673 nt, synthetic construct
  misc_feature 1..1673: note = mRNA a-1 (A100) (opt29) from Homo sapiens__NP_000448.3__HNF4A(1-474)(K106R_K108R_K126R_K127R_ S142A_S143A_S148A_S167A_S313A_S378A_T429A_T432A_S436A_K458R )
  source 1..1673: mol_type = other RNA
aggagagtcccgcagtcggcgtccagcggctctgcttgttcgtgtgtgtgtcgttgcaggccttattcaagcttaccatgagactgagcaagaccctggtggacatggacatggccgactactctgccgccctggaccctgcctacaccaccctggagttcgaaaacgtgcaagtgctgaccatgggcaacgacaccagccctagcgagggcaccaacctgaacgcccctaatagcctgggagtgtccgccctgtgtgccatctgtggcgatagagccaccggcaagcactacggcgccagctcttgtgatggctgcaagggcttcttccggcggagcgtgcggaagaaccacatgtacagctgccggttcagccggcagtgcgtggtggaccgggatagacggaaccagtgccggtactgcagactgaagaagtgcttcagagccggcatgcggagagaagccgtgcagaacgagcgggaccggatcagcaccagaagagccgcctacgaggacagcgccctgcccagcatcaacgccctgctgcaggccgaggtgctgagcagacagatcaccgccccagtgtccggcatcaacggcgacatccgggccaagaagatcgccagcattgccgacgtgtgcgagagcatgaaggaacagctgctggtgctggtggaatgggccaagtacatccccgccttttgcgagctgcccctggacgatcaggtggccctgctgagagcacacgccggcgaacatctgctgctgggagccaccaagcggagcatggtgttcaaggacgtgctgctgctgggcaacgactacatcgtgcccagacactgccctgagctggccgagatgagccgggtgtccatcagaatcctggacgaactggtgctgccgtttcaggaactgcagatcgacgacaacgagtacgcctacctgaaggccatcatctttttcgaccccgacgccaagggcctgagcgaccctggcaagatcaagcggctgagagcccaggtgcaagtgtccctggaagattacatcaacgaccggcagtacgacagccggggcagatttggcgaactgctcctgctgctgcccaccctgcagagcatcacctggcagatgatcgagcagatccagttcatcaagctgttcggcatggccaagatcgacaatctgctgcaggaaatgctgctcgggggcgccccttctgatgcccctcatgcccaccaccctctgcaccctcacctgatgcaagaacacatgggcaccaatgtgatcgtggccaacacaatgcccacccacctgagcaacggccagatgtgcgagtggcccagacctagaggacaggccgccgcccctgaggcccctcagcctgccccacctggcggctctggcagcgagccttacaaactgctgcctggcgctgtggccaccatcgtgagacctctgagcgccatcccccagcccaccatcaccaagcaggaagtgatctgaggactagtccctgttcccagagcccacttttttttctttttttgaaataaaatagcctgtctttcagatctaaaaaaaaaaaaaaaaaaaaaaaaaaaaaaaaaaaaaaaaaaaaaaaaaaaaaaaaaaaaaaaaaaaaaaaaaaaaaaaaaaaaaaaaaaaaaaaaaaaa

SEQ ID NO: 4663 - RNA, 1673 nt, synthetic construct
  misc_feature 1..1673: note = mRNA a-1 (A100) (opt29) from Homo sapiens__NP_000448.3__HNF4A(1-474)(S142A_S143A_S148A_T166A_ S167A_S313A_S378A_T429A_T432A_S436A_K458R)
  source 1..1673: mol_type = other RNA
aggagagtcccgcagtcggcgtccagcggctctgcttgttcgtgtgtgtgtcgttgcaggccttattcaagcttaccatgagactgagcaagaccctggtggacatggacatggccgactactctgccgccctggaccctgcctacaccaccctggagttcgaaaacgtgcaagtgctgaccatgggcaacgacaccagccctagcgagggcaccaacctgaacgcccctaatagcctgggagtgtccgccctgtgtgccatctgtggcgatagagccaccggcaagcactacggcgccagctcttgtgatggctgcaagggcttcttccggcggagcgtgcggaagaaccacatgtacagctgccggttcagccggcagtgcgtggtggacaaggataagcggaaccagtgccggtactgcagactgaagaagtgcttcagagccggcatgaagaaagaagccgtgcagaacgagcgggaccggatcagcaccagaagagccgcctacgaggacagcgccctgcccagcatcaacgccctgctgcaggccgaggtgctgagcagacagatcgccgccccagtgtccggcatcaacggcgacatccgggccaagaagatcgccagcattgccgacgtgtgcgagagcatgaaggaacagctgctggtgctggtggaatgggccaagtacatccccgccttttgcgagctgcccctggacgatcaggtggccctgctgagagcacacgccggcgaacatctgctgctgggagccaccaagcggagcatggtgttcaaggacgtgctgctgctgggcaacgactacatcgtgcccagacactgccctgagctggccgagatgagccgggtgtccatcagaatcctggacgaactggtgctgccgtttcaggaactgcagatcgacgacaacgagtacgcctacctgaaggccatcatctttttcgaccccgacgccaagggcctgagcgaccctggcaagatcaagcggctgagagcccaggtgcaagtgtccctggaagattacatcaacgaccggcagtacgacagccggggcagatttggcgaactgctcctgctgctgcccaccctgcagagcatcacctggcagatgatcgagcagatccagttcatcaagctgttcggcatggccaagatcgacaatctgctgcaggaaatgctgctcgggggcgccccttctgatgcccctcatgcccaccaccctctgcaccctcacctgatgcaagaacacatgggcaccaatgtgatcgtggccaacacaatgcccacccacctgagcaacggccagatgtgcgagtggcccagacctagaggacaggccgccgcccctgaggcccctcagcctgccccacctggcggctctggcagcgagccttacaaactgctgcctggcgctgtggccaccatcgtgagacctctgagcgccatcccccagcccaccatcaccaagcaggaagtgatctgaggactagtccctgttcccagagcccacttttttttctttttttgaaataaaatagcctgtctttcagatctaaaaaaaaaaaaaaaaaaaaaaaaaaaaaaaaaaaaaaaaaaaaaaaaaaaaaaaaaaaaaaaaaaaaaaaaaaaaaaaaaaaaaaaaaaaaaaaaaaaa

SEQ ID NO: 4664 - RNA, 1673 nt, synthetic construct
  misc_feature 1..1673: note = mRNA a-1 (A100) (opt29) from Homo sapiens__NP_000448.3__HNF4A(1-474)(S87A_S142A_S143A_S148A_T 166A_S167A_S313A_S378A_T429A_T432A_S436A_K458R)
  source 1..1673: mol_type = other RNA
aggagagtcccgcagtcggcgtccagcggctctgcttgttcgtgtgtgtgtcgttgcaggccttattcaagcttaccatgagactgagcaagaccctggtggacatggacatggccgactactctgccgccctggaccctgcctacaccaccctggagttcgaaaacgtgcaagtgctgaccatgggcaacgacaccagccctagcgagggcaccaacctgaacgcccctaatagcctgggagtgtccgccctgtgtgccatctgtggcgatagagccaccggcaagcactacggcgccagctcttgtgatggctgcaagggcttcttccggcgggccgtgcggaagaaccacatgtacagctgccggttcagccggcagtgcgtggtggacaaggataagcggaaccagtgccggtactgcagactgaagaagtgcttcagagccggcatgaagaaagaagccgtgcagaacgagcgggaccggatcagcaccagaagagccgcctacgaggacagcgccctgcccagcatcaacgccctgctgcaggccgaggtgctgagcagacagatcgccgccccagtgtccggcatcaacggcgacatccgggccaagaagatcgccagcattgccgacgtgtgcgagagcatgaaggaacagctgctggtgctggtggaatgggccaagtacatccccgccttttgcgagctgcccctggacgatcaggtggccctgctgagagcacacgccggcgaacatctgctgctgggagccaccaagcggagcatggtgttcaaggacgtgctgctgctgggcaacgactacatcgtgcccagacactgccctgagctggccgagatgagccgggtgtccatcagaatcctggacgaactggtgctgccgtttcaggaactgcagatcgacgacaacgagtacgcctacctgaaggccatcatctttttcgaccccgacgccaagggcctgagcgaccctggcaagatcaagcggctgagagcccaggtgcaagtgtccctggaagattacatcaacgaccggcagtacgacagccggggcagatttggcgaactgctcctgctgctgcccaccctgcagagcatcacctggcagatgatcgagcagatccagttcatcaagctgttcggcatggccaagatcgacaatctgctgcaggaaatgctgctcgggggcgccccttctgatgcccctcatgcccaccaccctctgcaccctcacctgatgcaagaacacatgggcaccaatgtgatcgtggccaacacaatgcccacccacctgagcaacggccagatgtgcgagtggcccagacctagaggacaggccgccgcccctgaggcccctcagcctgccccacctggcggctctggcagcgagccttacaaactgctgcctggcgctgtggccaccatcgtgagacctctgagcgccatcccccagcccaccatcaccaagcaggaagtgatctgaggactagtccctgttcccagagcccacttttttttctttttttgaaataaaatagcctgtctttcagatctaaaaaaaaaaaaaaaaaaaaaaaaaaaaaaaaaaaaaaaaaaaaaaaaaaaaaaaaaaaaaaaaaaaaaaaaaaaaaaaaaaaaaaaaaaaaaaaaaaaa

SEQ ID NO: 4665 - RNA, 1673 nt, synthetic construct
  misc_feature 1..1673: note = mRNA a-1 (A100) (opt29) from Homo sapiens__NP_000448.3__HNF4A(1-474)(S87A_K106R_K108R_K126R_K 127R_S142A_S143A_S148A_T166A_S167A_S313A_S378A_T429A_T432A_ S436A_K458R)
  source 1..1673: mol_type = other RNA
aggagagtcccgcagtcggcgtccagcggctctgcttgttcgtgtgtgtgtcgttgcaggccttattcaagcttaccatgagactgagcaagaccctggtggacatggacatggccgactactctgccgccctggaccctgcctacaccaccctggagttcgaaaacgtgcaagtgctgaccatgggcaacgacaccagccctagcgagggcaccaacctgaacgcccctaatagcctgggagtgtccgccctgtgtgccatctgtggcgatagagccaccggcaagcactacggcgccagctcttgtgatggctgcaagggcttcttccggcgggccgtgcggaagaaccacatgtacagctgccggttcagccggcagtgcgtggtggaccgggatagacggaaccagtgccggtactgcagactgaagaagtgcttcagagccggcatgcggagagaagccgtgcagaacgagcgggaccggatcagcaccagaagagccgcctacgaggacagcgccctgcccagcatcaacgccctgctgcaggccgaggtgctgagcagacagatcgccgccccagtgtccggcatcaacggcgacatccgggccaagaagatcgccagcattgccgacgtgtgcgagagcatgaaggaacagctgctggtgctggtggaatgggccaagtacatccccgccttttgcgagctgcccctggacgatcaggtggccctgctgagagcacacgccggcgaacatctgctgctgggagccaccaagcggagcatggtgttcaaggacgtgctgctgctgggcaacgactacatcgtgcccagacactgccctgagctggccgagatgagccgggtgtccatcagaatcctggacgaactggtgctgccgtttcaggaactgcagatcgacgacaacgagtacgcctacctgaaggccatcatctttttcgaccccgacgccaagggcctgagcgaccctggcaagatcaagcggctgagagcccaggtgcaagtgtccctggaagattacatcaacgaccggcagtacgacagccggggcagatttggcgaactgctcctgctgctgcccaccctgcagagcatcacctggcagatgatcgagcagatccagttcatcaagctgttcggcatggccaagatcgacaatctgctgcaggaaatgctgctcgggggcgccccttctgatgcccctcatgcccaccaccctctgcaccctcacctgatgcaagaacacatgggcaccaatgtgatcgtggccaacacaatgcccacccacctgagcaacggccagatgtgcgagtggcccagacctagaggacaggccgccgcccctgaggcccctcagcctgccccacctggcggctctggcagcgagccttacaaactgctgcctggcgctgtggccaccatcgtgagacctctgagcgccatcccccagcccaccatcaccaagcaggaagtgatctgaggactagtccctgttcccagagcccacttttttttctttttttgaaataaaatagcctgtctttcagatctaaaaaaaaaaaaaaaaaaaaaaaaaaaaaaaaaaaaaaaaaaaaaaaaaaaaaaaaaaaaaaaaaaaaaaaaaaaaaaaaaaaaaaaaaaaaaaaaaaaa

SEQ ID NO: 4666 - RNA, 1673 nt, synthetic construct
  misc_feature 1..1673: note = mRNA a-1 (A100) (opt29) from Homo sapiens__NP_000448.3__HNF4A(1-474)(S87A_K106R_K108R_K126R_K 127R)
  source 1..1673: mol_type = other RNA
aggagagtcccgcagtcggcgtccagcggctctgcttgttcgtgtgtgtgtcgttgcaggccttattcaagcttaccatgagactgagcaagaccctggtggacatggacatggccgactactctgccgccctggaccctgcctacaccaccctggagttcgaaaacgtgcaagtgctgaccatgggcaacgacaccagccctagcgagggcaccaacctgaacgcccctaatagcctgggagtgtccgccctgtgtgccatctgtggcgatagagccaccggcaagcactacggcgccagctcttgtgatggctgcaagggcttcttccggcgggccgtgcggaagaaccacatgtacagctgccggttcagccggcagtgcgtggtggaccgggatagacggaaccagtgccggtactgcagactgaagaagtgcttcagagccggcatgcggagagaagccgtgcagaacgagcgggaccggatcagcaccagaagaagcagctacgaggacagcagcctgcccagcatcaacgccctgctgcaggccgaggtgctgagcagacagatcaccagcccagtgtccggcatcaacggcgacatccgggccaagaagatcgccagcattgccgacgtgtgcgagagcatgaaggaacagctgctggtgctggtggaatgggccaagtacatccccgccttttgcgagctgcccctggacgatcaggtggccctgctgagagcacacgccggcgaacatctgctgctgggagccaccaagcggagcatggtgttcaaggacgtgctgctgctgggcaacgactacatcgtgcccagacactgccctgagctggccgagatgagccgggtgtccatcagaatcctggacgaactggtgctgccgtttcaggaactgcagatcgacgacaacgagtacgcctacctgaaggccatcatctttttcgaccccgacgccaagggcctgagcgaccctggcaagatcaagcggctgagaagccaggtgcaagtgtccctggaagattacatcaacgaccggcagtacgacagccggggcagatttggcgaactgctcctgctgctgcccaccctgcagagcatcacctggcagatgatcgagcagatccagttcatcaagctgttcggcatggccaagatcgacaatctgctgcaggaaatgctgctcgggggcagcccttctgatgcccctcatgcccaccaccctctgcaccctcacctgatgcaagaacacatgggcaccaatgtgatcgtggccaacacaatgcccacccacctgagcaacggccagatgtgcgagtggcccagacctagaggacaggccgccacacctgagacacctcagccttctccacctggcggctctggcagcgagccttacaaactgctgcctggcgctgtggccaccatcgtgaaacctctgagcgccatcccccagcccaccatcaccaagcaggaagtgatctgaggactagtccctgttcccagagcccacttttttttctttttttgaaataaaatagcctgtctttcagatctaaaaaaaaaaaaaaaaaaaaaaaaaaaaaaaaaaaaaaaaaaaaaaaaaaaaaaaaaaaaaaaaaaaaaaaaaaaaaaaaaaaaaaaaaaaaaaaaaaaa

SEQ ID NO: 4667 - RNA, 1673 nt, synthetic construct
  misc_feature 1..1673: note = mRNA a-1 (A100) (opt29) from Homo sapiens__NP_000448.3__HNF4A(1-474)(S87A_K106R_K108R_K126R_K 127R_S142A_S143A_S148A_T166A_S167A_S313A_S378A_T429A_T432A_ S436A_K458R_S461A)
  source 1..1673: mol_type = other RNA
aggagagtcccgcagtcggcgtccagcggctctgcttgttcgtgtgtgtgtcgttgcaggccttattcaagcttaccatgagactgagcaagaccctggtggacatggacatggccgactactctgccgccctggaccctgcctacaccaccctggagttcgaaaacgtgcaagtgctgaccatgggcaacgacaccagccctagcgagggcaccaacctgaacgcccctaatagcctgggagtgtccgccctgtgtgccatctgtggcgatagagccaccggcaagcactacggcgccagctcttgtgatggctgcaagggcttcttccggcgggccgtgcggaagaaccacatgtacagctgccggttcagccggcagtgcgtggtggaccgggatagacggaaccagtgccggtactgcagactgaagaagtgcttcagagccggcatgcggagagaagccgtgcagaacgagcgggaccggatcagcaccagaagagccgcctacgaggacagcgccctgcccagcatcaacgccctgctgcaggccgaggtgctgagcagacagatcgccgccccagtgtccggcatcaacggcgacatccgggccaagaagatcgccagcattgccgacgtgtgcgagagcatgaaggaacagctgctggtgctggtggaatgggccaagtacatccccgccttttgcgagctgcccctggacgatcaggtggccctgctgagagcacacgccggcgaacatctgctgctgggagccaccaagcggagcatggtgttcaaggacgtgctgctgctgggcaacgactacatcgtgcccagacactgccctgagctggccgagatgagccgggtgtccatcagaatcctggacgaactggtgctgccgtttcaggaactgcagatcgacgacaacgagtacgcctacctgaaggccatcatctttttcgaccccgacgccaagggcctgagcgaccctggcaagatcaagcggctgagagcccaggtgcaagtgtccctggaagattacatcaacgaccggcagtacgacagccggggcagatttggcgaactgctcctgctgctgcccaccctgcagagcatcacctggcagatgatcgagcagatccagttcatcaagctgttcggcatggccaagatcgacaatctgctgcaggaaatgctgctcgggggcgccccttctgatgcccctcatgcccaccaccctctgcaccctcacctgatgcaagaacacatgggcaccaatgtgatcgtggccaacacaatgcccacccacctgagcaacggccagatgtgcgagtggcccagacctagaggacaggccgccgcccctgaggcccctcagcctgccccacctggcggctctggcagcgagccttacaaactgctgcctggcgctgtggccaccatcgtgagacctctggccgccatcccccagcccaccatcaccaagcaggaagtgatctgaggactagtccctgttcccagagcccacttttttttctttttttgaaataaaatagcctgtctttcagatctaaaaaaaaaaaaaaaaaaaaaaaaaaaaaaaaaaaaaaaaaaaaaaaaaaaaaaaaaaaaaaaaaaaaaaaaaaaaaaaaaaaaaaaaaaaaaaaaaaaa

SEQ ID NO: 4668 - RNA, 1673 nt, synthetic construct
  misc_feature 1..1673: note = mRNA a-1 (A100) (opt29) from Homo sapiens__NP_000448.3__HNF4A(1-474)(S87A_K106R_K108R_K126R_K 127R_S142A_S143A_S148A_T166A_S167A_S313A_S378A_T429A_T432A_ S436A_K458R_S461E)
  source 1..1673: mol_type = other RNA
aggagagtcccgcagtcggcgtccagcggctctgcttgttcgtgtgtgtgtcgttgcaggccttattcaagcttaccatgagactgagcaagaccctggtggacatggacatggccgactactctgccgccctggaccctgcctacaccaccctggagttcgaaaacgtgcaagtgctgaccatgggcaacgacaccagccctagcgagggcaccaacctgaacgcccctaatagcctgggagtgtccgccctgtgtgccatctgtggcgatagagccaccggcaagcactacggcgccagctcttgtgatggctgcaagggcttcttccggcgggccgtgcggaagaaccacatgtacagctgccggttcagccggcagtgcgtggtggaccgggatagacggaaccagtgccggtactgcagactgaagaagtgcttcagagccggcatgcggagagaagccgtgcagaacgagcgggaccggatcagcaccagaagagccgcctacgaggacagcgccctgcccagcatcaacgccctgctgcaggccgaggtgctgagcagacagatcgccgccccagtgtccggcatcaacggcgacatccgggccaagaagatcgccagcattgccgacgtgtgcgagagcatgaaggaacagctgctggtgctggtggaatgggccaagtacatccccgccttttgcgagctgcccctggacgatcaggtggccctgctgagagcacacgccggcgaacatctgctgctgggagccaccaagcggagcatggtgttcaaggacgtgctgctgctgggcaacgactacatcgtgcccagacactgccctgagctggccgagatgagccgggtgtccatcagaatcctggacgaactggtgctgccgtttcaggaactgcagatcgacgacaacgagtacgcctacctgaaggccatcatctttttcgaccccgacgccaagggcctgagcgaccctggcaagatcaagcggctgagagcccaggtgcaagtgtccctggaagattacatcaacgaccggcagtacgacagccggggcagatttggcgaactgctcctgctgctgcccaccctgcagagcatcacctggcagatgatcgagcagatccagttcatcaagctgttcggcatggccaagatcgacaatctgctgcaggaaatgctgctcgggggcgccccttctgatgcccctcatgcccaccaccctctgcaccctcacctgatgcaagaacacatgggcaccaatgtgatcgtggccaacacaatgcccacccacctgagcaacggccagatgtgcgagtggcccagacctagaggacaggccgccgcccctgaggcccctcagcctgccccacctggcggctctggcagcgagccttacaaactgctgcctggcgctgtggccaccatcgtgagacctctggaggccatcccccagcccaccatcaccaagcaggaagtgatctgaggactagtccctgttcccagagcccacttttttttctttttttgaaataaaatagcctgtctttcagatctaaaaaaaaaaaaaaaaaaaaaaaaaaaaaaaaaaaaaaaaaaaaaaaaaaaaaaaaaaaaaaaaaaaaaaaaaaaaaaaaaaaaaaaaaaaaaaaaaaaa

SEQ ID NO: 4669 - RNA, 1673 nt, synthetic construct
  misc_feature 1..1673: note = mRNA a-1 (A100) (opt29) from Homo sapiens__NP_000448.3__HNF4A(1-474)(S87A_K106R_K108R_K126R_K 127R_S142A_S143A_S148E_T166A_S167E_S313A_S378E_T429E_T432E_ S436E_K458R_S461E)
  source 1..1673: mol_type = other RNA
aggagagtcccgcagtcggcgtccagcggctctgcttgttcgtgtgtgtgtcgttgcaggccttattcaagcttaccatgagactgagcaagaccctggtggacatggacatggccgactactctgccgccctggaccctgcctacaccaccctggagttcgaaaacgtgcaagtgctgaccatgggcaacgacaccagccctagcgagggcaccaacctgaacgcccctaatagcctgggagtgtccgccctgtgtgccatctgtggcgatagagccaccggcaagcactacggcgccagctcttgtgatggctgcaagggcttcttccggcgggccgtgcggaagaaccacatgtacagctgccggttcagccggcagtgcgtggtggaccgggatagacggaaccagtgccggtactgcagactgaagaagtgcttcagagccggcatgcggagagaagccgtgcagaacgagcgggaccggatcagcaccagaagagccgcctacgaggacagcgaactgcccagcatcaacgccctgctgcaggccgaggtgctgagcagacagatcgccgaaccagtgtccggcatcaacggcgacatccgggccaagaagatcgccagcattgccgacgtgtgcgagagcatgaaggaacagctgctggtgctggtggaatgggccaagtacatccccgccttttgcgagctgcccctggacgatcaggtggccctgctgagagcacacgccggcgaacatctgctgctgggagccaccaagcggagcatggtgttcaaggacgtgctgctgctgggcaacgactacatcgtgcccagacactgccctgagctggccgagatgagccgggtgtccatcagaatcctggacgaactggtgctgccgtttcaggaactgcagatcgacgacaacgagtacgcctacctgaaggccatcatctttttcgaccccgacgccaagggcctgagcgaccctggcaagatcaagcggctgagagcccaggtgcaagtgtccctggaagattacatcaacgaccggcagtacgacagccggggcagatttggcgaactgctcctgctgctgcccaccctgcagagcatcacctggcagatgatcgagcagatccagttcatcaagctgttcggcatggccaagatcgacaatctgctgcaggaaatgctgctcgggggcgagccttctgatgcccctcatgcccaccaccctctgcaccctcacctgatgcaagaacacatgggcaccaatgtgatcgtggccaacacaatgcccacccacctgagcaacggccagatgtgcgagtggcccagacctagaggacaggccgccgaacctgaggagcctcagcctgaaccacctggcggctctggcagcgagccttacaaactgctgcctggcgctgtggccaccatcgtgagacctctggaggccatcccccagcccaccatcaccaagcaggaagtgatctgaggactagtccctgttcccagagcccacttttttttctttttttgaaataaaatagcctgtctttcagatctaaaaaaaaaaaaaaaaaaaaaaaaaaaaaaaaaaaaaaaaaaaaaaaaaaaaaaaaaaaaaaaaaaaaaaaaaaaaaaaaaaaaaaaaaaaaaaaaaaaa

SEQ ID NO: 4670 - RNA, 1673 nt, synthetic construct
  misc_feature 1..1673: note = mRNA a-1 (A100) (opt29) from Homo sapiens__NP_000448.3__HNF4A(1-474)(S87A_K106R_K108R_K126R_K 127R_S142A_S143A_S148A_T166A_S167A_K179R_K180R_S313A_S378A_ T429A_T432A_S436A_K458R_S461E)
  source 1..1673: mol_type = other RNA
aggagagtcccgcagtcggcgtccagcggctctgcttgttcgtgtgtgtgtcgttgcaggccttattcaagcttaccatgagactgagcaagaccctggtggacatggacatggccgactactctgccgccctggaccctgcctacaccaccctggagttcgaaaacgtgcaagtgctgaccatgggcaacgacaccagccctagcgagggcaccaacctgaacgcccctaatagcctgggagtgtccgccctgtgtgccatctgtggcgatagagccaccggcaagcactacggcgccagctcttgtgatggctgcaagggcttcttccggcgggccgtgcggaagaaccacatgtacagctgccggttcagccggcagtgcgtggtggaccgggatagacggaaccagtgccggtactgcagactgaagaagtgcttcagagccggcatgcggagagaagccgtgcagaacgagcgggaccggatcagcaccagaagagccgcctacgaggacagcgccctgcccagcatcaacgccctgctgcaggccgaggtgctgagcagacagatcgccgccccagtgtccggcatcaacggcgacatccgggcccggagaatcgccagcattgccgacgtgtgcgagagcatgaaggaacagctgctggtgctggtggaatgggccaagtacatccccgccttttgcgagctgcccctggacgatcaggtggccctgctgagagcacacgccggcgaacatctgctgctgggagccaccaagcggagcatggtgttcaaggacgtgctgctgctgggcaacgactacatcgtgcccagacactgccctgagctggccgagatgagccgggtgtccatcagaatcctggacgaactggtgctgccgtttcaggaactgcagatcgacgacaacgagtacgcctacctgaaggccatcatctttttcgaccccgacgccaagggcctgagcgaccctggcaagatcaagcggctgagagcccaggtgcaagtgtccctggaagattacatcaacgaccggcagtacgacagccggggcagatttggcgaactgctcctgctgctgcccaccctgcagagcatcacctggcagatgatcgagcagatccagttcatcaagctgttcggcatggccaagatcgacaatctgctgcaggaaatgctgctcgggggcgccccttctgatgcccctcatgcccaccaccctctgcaccctcacctgatgcaagaacacatgggcaccaatgtgatcgtggccaacacaatgcccacccacctgagcaacggccagatgtgcgagtggcccagacctagaggacaggccgccgcccctgaggcccctcagcctgccccacctggcggctctggcagcgagccttacaaactgctgcctggcgctgtggccaccatcgtgagacctctggaggccatcccccagcccaccatcaccaagcaggaagtgatctgaggactagtccctgttcccagagcccacttttttttctttttttgaaataaaatagcctgtctttcagatctaaaaaaaaaaaaaaaaaaaaaaaaaaaaaaaaaaaaaaaaaaaaaaaaaaaaaaaaaaaaaaaaaaaaaaaaaaaaaaaaaaaaaaaaaaaaaaaaaaaa

SEQ ID NO: 4671 - RNA, 1673 nt, synthetic construct
  misc_feature 1..1673: note = mRNA a-1 (A100) (opt29) from Homo sapiens__NP_000448.3__HNF4A(1-474)(S87A_K106R_K108R_K126R_K 127R_S142A_S143A_S148A_T166A_S167A_K300R_K307R_K309R_S313A_ S378A_T429A_T432A_S436A_K458R_S461E)
  source 1..1673: mol_type = other RNA
aggagagtcccgcagtcggcgtccagcggctctgcttgttcgtgtgtgtgtcgttgcaggccttattcaagcttaccatgagactgagcaagaccctggtggacatggacatggccgactactctgccgccctggaccctgcctacaccaccctggagttcgaaaacgtgcaagtgctgaccatgggcaacgacaccagccctagcgagggcaccaacctgaacgcccctaatagcctgggagtgtccgccctgtgtgccatctgtggcgatagagccaccggcaagcactacggcgccagctcttgtgatggctgcaagggcttcttccggcgggccgtgcggaagaaccacatgtacagctgccggttcagccggcagtgcgtggtggaccgggatagacggaaccagtgccggtactgcagactgaagaagtgcttcagagccggcatgcggagagaagccgtgcagaacgagcgggaccggatcagcaccagaagagccgcctacgaggacagcgccctgcccagcatcaacgccctgctgcaggccgaggtgctgagcagacagatcgccgccccagtgtccggcatcaacggcgacatccgggccaagaagatcgccagcattgccgacgtgtgcgagagcatgaaggaacagctgctggtgctggtggaatgggccaagtacatccccgccttttgcgagctgcccctggacgatcaggtggccctgctgagagcacacgccggcgaacatctgctgctgggagccaccaagcggagcatggtgttcaaggacgtgctgctgctgggcaacgactacatcgtgcccagacactgccctgagctggccgagatgagccgggtgtccatcagaatcctggacgaactggtgctgccgtttcaggaactgcagatcgacgacaacgagtacgcctacctgaaggccatcatctttttcgaccccgacgccagaggcctgagcgaccctggccggatcagacggctgagagcccaggtgcaagtgtccctggaagattacatcaacgaccggcagtacgacagccggggcagatttggcgaactgctcctgctgctgcccaccctgcagagcatcacctggcagatgatcgagcagatccagttcatcaagctgttcggcatggccaagatcgacaatctgctgcaggaaatgctgctcgggggcgccccttctgatgcccctcatgcccaccaccctctgcaccctcacctgatgcaagaacacatgggcaccaatgtgatcgtggccaacacaatgcccacccacctgagcaacggccagatgtgcgagtggcccagacctagaggacaggccgccgcccctgaggcccctcagcctgccccacctggcggctctggcagcgagccttacaaactgctgcctggcgctgtggccaccatcgtgagacctctggaggccatcccccagcccaccatcaccaagcaggaagtgatctgaggactagtccctgttcccagagcccacttttttttctttttttgaaataaaatagcctgtctttcagatctaaaaaaaaaaaaaaaaaaaaaaaaaaaaaaaaaaaaaaaaaaaaaaaaaaaaaaaaaaaaaaaaaaaaaaaaaaaaaaaaaaaaaaaaaaaaaaaaaaaa

SEQ ID NO: 4672 - RNA, 1673 nt, synthetic construct
  misc_feature 1..1673: note = mRNA a-1 (A100) (opt29) from Homo sapiens__NP_000448.3__HNF4A(1-474)(S87A_K106R_K108R_K126R_K 127R_S142A_S143A_S148A_T166A_S167A_S313A_S378A_T429A_T432A_ S436A_K447R_K458R_S461E_K470R)
  source 1..1673: mol_type = other RNA
aggagagtcccgcagtcggcgtccagcggctctgcttgttcgtgtgtgtgtcgttgcaggccttattcaagcttaccatgagactgagcaagaccctggtggacatggacatggccgactactctgccgccctggaccctgcctacaccaccctggagttcgaaaacgtgcaagtgctgaccatgggcaacgacaccagccctagcgagggcaccaacctgaacgcccctaatagcctgggagtgtccgccctgtgtgccatctgtggcgatagagccaccggcaagcactacggcgccagctcttgtgatggctgcaagggcttcttccggcgggccgtgcggaagaaccacatgtacagctgccggttcagccggcagtgcgtggtggaccgggatagacggaaccagtgccggtactgcagactgaagaagtgcttcagagccggcatgcggagagaagccgtgcagaacgagcgggaccggatcagcaccagaagagccgcctacgaggacagcgccctgcccagcatcaacgccctgctgcaggccgaggtgctgagcagacagatcgccgccccagtgtccggcatcaacggcgacatccgggccaagaagatcgccagcattgccgacgtgtgcgagagcatgaaggaacagctgctggtgctggtggaatgggccaagtacatccccgccttttgcgagctgcccctggacgatcaggtggccctgctgagagcacacgccggcgaacatctgctgctgggagccaccaagcggagcatggtgttcaaggacgtgctgctgctgggcaacgactacatcgtgcccagacactgccctgagctggccgagatgagccgggtgtccatcagaatcctggacgaactggtgctgccgtttcaggaactgcagatcgacgacaacgagtacgcctacctgaaggccatcatctttttcgaccccgacgccaagggcctgagcgaccctggcaagatcaagcggctgagagcccaggtgcaagtgtccctggaagattacatcaacgaccggcagtacgacagccggggcagatttggcgaactgctcctgctgctgcccaccctgcagagcatcacctggcagatgatcgagcagatccagttcatcaagctgttcggcatggccaagatcgacaatctgctgcaggaaatgctgctcgggggcgccccttctgatgcccctcatgcccaccaccctctgcaccctcacctgatgcaagaacacatgggcaccaatgtgatcgtggccaacacaatgcccacccacctgagcaacggccagatgtgcgagtggcccagacctagaggacaggccgccgcccctgaggcccctcagcctgccccacctggcggctctggcagcgagccttaccggctgctgcctggcgctgtggccaccatcgtgagacctctggaggccatcccccagcccaccatcacccggcaggaagtgatctgaggactagtccctgttcccagagcccacttttttttctttttttgaaataaaatagcctgtctttcagatctaaaaaaaaaaaaaaaaaaaaaaaaaaaaaaaaaaaaaaaaaaaaaaaaaaaaaaaaaaaaaaaaaaaaaaaaaaaaaaaaaaaaaaaaaaaaaaaaaaaa

SEQ ID NO: 4673 - RNA, 1673 nt, synthetic construct
  misc_feature 1..1673: note = mRNA a-1 (A100) (opt29) from Homo sapiens__NP_000448.3__HNF4A(1-474)(S87A_K106R_K108R_K126R_K 127R_S142A_S143A_S148A_T166A_S167A_K179R_K180R_K234R_K300R_ K307R_K309R_S313A_S378A_T429A_T432A_S436A_K447R_K458R_S461E _K470R)
  source 1..1673: mol_type = other RNA
aggagagtcccgcagtcggcgtccagcggctctgcttgttcgtgtgtgtgtcgttgcaggccttattcaagcttaccatgagactgagcaagaccctggtggacatggacatggccgactactctgccgccctggaccctgcctacaccaccctggagttcgaaaacgtgcaagtgctgaccatgggcaacgacaccagccctagcgagggcaccaacctgaacgcccctaatagcctgggagtgtccgccctgtgtgccatctgtggcgatagagccaccggcaagcactacggcgccagctcttgtgatggctgcaagggcttcttccggcgggccgtgcggaagaaccacatgtacagctgccggttcagccggcagtgcgtggtggaccgggatagacggaaccagtgccggtactgcagactgaagaagtgcttcagagccggcatgcggagagaagccgtgcagaacgagcgggaccggatcagcaccagaagagccgcctacgaggacagcgccctgcccagcatcaacgccctgctgcaggccgaggtgctgagcagacagatcgccgccccagtgtccggcatcaacggcgacatccgggcccggagaatcgccagcattgccgacgtgtgcgagagcatgaaggaacagctgctggtgctggtggaatgggccaagtacatccccgccttttgcgagctgcccctggacgatcaggtggccctgctgagagcacacgccggcgaacatctgctgctgggagccacccggcggagcatggtgttcaaggacgtgctgctgctgggcaacgactacatcgtgcccagacactgccctgagctggccgagatgagccgggtgtccatcagaatcctggacgaactggtgctgccgtttcaggaactgcagatcgacgacaacgagtacgcctacctgaaggccatcatctttttcgaccccgacgccagaggcctgagcgaccctggccggatcagacggctgagagcccaggtgcaagtgtccctggaagattacatcaacgaccggcagtacgacagccggggcagatttggcgaactgctcctgctgctgcccaccctgcagagcatcacctggcagatgatcgagcagatccagttcatcaagctgttcggcatggccaagatcgacaatctgctgcaggaaatgctgctcgggggcgccccttctgatgcccctcatgcccaccaccctctgcaccctcacctgatgcaagaacacatgggcaccaatgtgatcgtggccaacacaatgcccacccacctgagcaacggccagatgtgcgagtggcccagacctagaggacaggccgccgcccctgaggcccctcagcctgccccacctggcggctctggcagcgagccttaccggctgctgcctggcgctgtggccaccatcgtgagacctctggaggccatcccccagcccaccatcacccggcaggaagtgatctgaggactagtccctgttcccagagcccacttttttttctttttttgaaataaaatagcctgtctttcagatctaaaaaaaaaaaaaaaaaaaaaaaaaaaaaaaaaaaaaaaaaaaaaaaaaaaaaaaaaaaaaaaaaaaaaaaaaaaaaaaaaaaaaaaaaaaaaaaaaaaa

SEQ ID NO: 4674 - RNA, 1673 nt, synthetic construct
  misc_feature 1..1673: note = mRNA a-1 (A100) (opt29) from Homo sapiens__NP_000448.3__HNF4A(1-474)(S87A_S95A_S99A_K106R_K10 8R_K126R_K127R_S142A_S143A_S148A_T166A_S167A_S313A_S378A_T4 29A_T432A_S436A_K458R_S461E)
  source 1..1673: mol_type = other RNA
aggagagtcccgcagtcggcgtccagcggctctgcttgttcgtgtgtgtgtcgttgcaggccttattcaagcttaccatgagactgagcaagaccctggtggacatggacatggccgactactctgccgccctggaccctgcctacaccaccctggagttcgaaaacgtgcaagtgctgaccatgggcaacgacaccagccctagcgagggcaccaacctgaacgcccctaatagcctgggagtgtccgccctgtgtgccatctgtggcgatagagccaccggcaagcactacggcgccagctcttgtgatggctgcaagggcttcttccggcgggccgtgcggaagaaccacatgtacgcctgccggttcgcccggcagtgcgtggtggaccgggatagacggaaccagtgccggtactgcagactgaagaagtgcttcagagccggcatgcggagagaagccgtgcagaacgagcgggaccggatcagcaccagaagagccgcctacgaggacagcgccctgcccagcatcaacgccctgctgcaggccgaggtgctgagcagacagatcgccgccccagtgtccggcatcaacggcgacatccgggccaagaagatcgccagcattgccgacgtgtgcgagagcatgaaggaacagctgctggtgctggtggaatgggccaagtacatccccgccttttgcgagctgcccctggacgatcaggtggccctgctgagagcacacgccggcgaacatctgctgctgggagccaccaagcggagcatggtgttcaaggacgtgctgctgctgggcaacgactacatcgtgcccagacactgccctgagctggccgagatgagccgggtgtccatcagaatcctggacgaactggtgctgccgtttcaggaactgcagatcgacgacaacgagtacgcctacctgaaggccatcatctttttcgaccccgacgccaagggcctgagcgaccctggcaagatcaagcggctgagagcccaggtgcaagtgtccctggaagattacatcaacgaccggcagtacgacagccggggcagatttggcgaactgctcctgctgctgcccaccctgcagagcatcacctggcagatgatcgagcagatccagttcatcaagctgttcggcatggccaagatcgacaatctgctgcaggaaatgctgctcgggggcgccccttctgatgcccctcatgcccaccaccctctgcaccctcacctgatgcaagaacacatgggcaccaatgtgatcgtggccaacacaatgcccacccacctgagcaacggccagatgtgcgagtggcccagacctagaggacaggccgccgcccctgaggcccctcagcctgccccacctggcggctctggcagcgagccttacaaactgctgcctggcgctgtggccaccatcgtgagacctctggaggccatcccccagcccaccatcaccaagcaggaagtgatctgaggactagtccctgttcccagagcccacttttttttctttttttgaaataaaatagcctgtctttcagatctaaaaaaaaaaaaaaaaaaaaaaaaaaaaaaaaaaaaaaaaaaaaaaaaaaaaaaaaaaaaaaaaaaaaaaaaaaaaaaaaaaaaaaaaaaaaaaaaaaaa

SEQ ID NO: 4675 - RNA, 1673 nt, synthetic construct
  misc_feature 1..1673: note = mRNA a-1 (A100) (opt29) from Homo sapiens__NP_000448.3__HNF4A(1-474)(S87A_K106R_K108R_K126R_K 127R_S138A_T139A_S142A_S143A_S148A_T166A_S167A_S313A_S378A_ T429A_T432A_S436A_K458R_S461E)
  source 1..1673: mol_type = other RNA
aggagagtcccgcagtcggcgtccagcggctctgcttgttcgtgtgtgtgtcgttgcaggccttattcaagcttaccatgagactgagcaagaccctggtggacatggacatggccgactactctgccgccctggaccctgcctacaccaccctggagttcgaaaacgtgcaagtgctgaccatgggcaacgacaccagccctagcgagggcaccaacctgaacgcccctaatagcctgggagtgtccgccctgtgtgccatctgtggcgatagagccaccggcaagcactacggcgccagctcttgtgatggctgcaagggcttcttccggcgggccgtgcggaagaaccacatgtacagctgccggttcagccggcagtgcgtggtggaccgggatagacggaaccagtgccggtactgcagactgaagaagtgcttcagagccggcatgcggagagaagccgtgcagaacgagcgggaccggatcgccgccagaagagccgcctacgaggacagcgccctgcccagcatcaacgccctgctgcaggccgaggtgctgagcagacagatcgccgccccagtgtccggcatcaacggcgacatccgggccaagaagatcgccagcattgccgacgtgtgcgagagcatgaaggaacagctgctggtgctggtggaatgggccaagtacatccccgccttttgcgagctgcccctggacgatcaggtggccctgctgagagcacacgccggcgaacatctgctgctgggagccaccaagcggagcatggtgttcaaggacgtgctgctgctgggcaacgactacatcgtgcccagacactgccctgagctggccgagatgagccgggtgtccatcagaatcctggacgaactggtgctgccgtttcaggaactgcagatcgacgacaacgagtacgcctacctgaaggccatcatctttttcgaccccgacgccaagggcctgagcgaccctggcaagatcaagcggctgagagcccaggtgcaagtgtccctggaagattacatcaacgaccggcagtacgacagccggggcagatttggcgaactgctcctgctgctgcccaccctgcagagcatcacctggcagatgatcgagcagatccagttcatcaagctgttcggcatggccaagatcgacaatctgctgcaggaaatgctgctcgggggcgccccttctgatgcccctcatgcccaccaccctctgcaccctcacctgatgcaagaacacatgggcaccaatgtgatcgtggccaacacaatgcccacccacctgagcaacggccagatgtgcgagtggcccagacctagaggacaggccgccgcccctgaggcccctcagcctgccccacctggcggctctggcagcgagccttacaaactgctgcctggcgctgtggccaccatcgtgagacctctggaggccatcccccagcccaccatcaccaagcaggaagtgatctgaggactagtccctgttcccagagcccacttttttttctttttttgaaataaaatagcctgtctttcagatctaaaaaaaaaaaaaaaaaaaaaaaaaaaaaaaaaaaaaaaaaaaaaaaaaaaaaaaaaaaaaaaaaaaaaaaaaaaaaaaaaaaaaaaaaaaaaaaaaaaa

SEQ ID NO: 4676 - RNA, 1673 nt, synthetic construct
  misc_feature 1..1673: note = mRNA a-1 (A100) (opt29) from Homo sapiens__NP_000448.3__HNF4A(1-474)(S87A_S95A_S99A_K106R_K10 8R_K126R_K127R_S138A_T139A_S142A_S143A_S148A_T166A_S167A_S3 13A_S378A_T429A_T432A_S436A_K458R_S461E)
  source 1..1673: mol_type = other RNA
aggagagtcccgcagtcggcgtccagcggctctgcttgttcgtgtgtgtgtcgttgcaggccttattcaagcttaccatgagactgagcaagaccctggtggacatggacatggccgactactctgccgccctggaccctgcctacaccaccctggagttcgaaaacgtgcaagtgctgaccatgggcaacgacaccagccctagcgagggcaccaacctgaacgcccctaatagcctgggagtgtccgccctgtgtgccatctgtggcgatagagccaccggcaagcactacggcgccagctcttgtgatggctgcaagggcttcttccggcgggccgtgcggaagaaccacatgtacgcctgccggttcgcccggcagtgcgtggtggaccgggatagacggaaccagtgccggtactgcagactgaagaagtgcttcagagccggcatgcggagagaagccgtgcagaacgagcgggaccggatcgccgccagaagagccgcctacgaggacagcgccctgcccagcatcaacgccctgctgcaggccgaggtgctgagcagacagatcgccgccccagtgtccggcatcaacggcgacatccgggccaagaagatcgccagcattgccgacgtgtgcgagagcatgaaggaacagctgctggtgctggtggaatgggccaagtacatccccgccttttgcgagctgcccctggacgatcaggtggccctgctgagagcacacgccggcgaacatctgctgctgggagccaccaagcggagcatggtgttcaaggacgtgctgctgctgggcaacgactacatcgtgcccagacactgccctgagctggccgagatgagccgggtgtccatcagaatcctggacgaactggtgctgccgtttcaggaactgcagatcgacgacaacgagtacgcctacctgaaggccatcatctttttcgaccccgacgccaagggcctgagcgaccctggcaagatcaagcggctgagagcccaggtgcaagtgtccctggaagattacatcaacgaccggcagtacgacagccggggcagatttggcgaactgctcctgctgctgcccaccctgcagagcatcacctggcagatgatcgagcagatccagttcatcaagctgttcggcatggccaagatcgacaatctgctgcaggaaatgctgctcgggggcgccccttctgatgcccctcatgcccaccaccctctgcaccctcacctgatgcaagaacacatgggcaccaatgtgatcgtggccaacacaatgcccacccacctgagcaacggccagatgtgcgagtggcccagacctagaggacaggccgccgcccctgaggcccctcagcctgccccacctggcggctctggcagcgagccttacaaactgctgcctggcgctgtggccaccatcgtgagacctctggaggccatcccccagcccaccatcaccaagcaggaagtgatctgaggactagtccctgttcccagagcccacttttttttctttttttgaaataaaatagcctgtctttcagatctaaaaaaaaaaaaaaaaaaaaaaaaaaaaaaaaaaaaaaaaaaaaaaaaaaaaaaaaaaaaaaaaaaaaaaaaaaaaaaaaaaaaaaaaaaaaaaaaaaaa

SEQ ID NO: 4677 - RNA, 1376 nt, synthetic construct
  misc_feature 1..1376: note = mRNA a-1 (A100) (wt) from Homo sapiens__NP_000448.3__HNF4A(1-375)
  source 1..1376: mol_type = other RNA
aggagagtcccgcagtcggcgtccagcggctctgcttgttcgtgtgtgtgtcgttgcaggccttattcaagcttaccatgcgactctccaaaaccctcgtcgacatggacatggccgactacagtgctgcactggacccagcctacaccaccctggaatttgagaatgtgcaggtgttgacgatgggcaatgacacgtccccatcagaaggcaccaacctcaacgcgcccaacagcctgggtgtcagcgccctgtgtgccatctgcggggaccgggccacgggcaaacactacggtgcctcgagctgtgacggctgcaagggcttcttccggaggagcgtgcggaagaaccacatgtactcctgcagatttagccggcagtgcgtggtggacaaagacaagaggaaccagtgccgctactgcaggctcaagaaatgcttccgggctggcatgaagaaggaagccgtccagaatgagcgggaccggatcagcactcgaaggtcaagctatgaggacagcagcctgccctccatcaatgcgctcctgcaggcggaggtcctgtcccgacagatcacctcccccgtctccgggatcaacggcgacattcgggcgaagaagattgccagcatcgcagatgtgtgtgagtccatgaaggagcagctgctggttctcgttgagtgggccaagtacatcccagctttctgcgagctccccctggacgaccaggtggccctgctcagagcccatgctggcgagcacctgctgctcggagccaccaagagatccatggtgttcaaggacgtgctgctcctaggcaatgactacattgtccctcggcactgcccggagctggcggagatgagccgggtgtccatacgcatccttgacgagctggtgctgcccttccaggagctgcagatcgatgacaatgagtatgcctacctcaaagccatcatcttctttgacccagatgccaaggggctgagcgatccagggaagatcaagcggctgcgttcccaggtgcaggtgagcttggaggactacatcaacgaccgccagtatgactcgcgtggccgctttggagagctgctgctgctgctgcccaccttgcagagcatcacctggcagatgatcgagcagatccagttcatcaagctcttcggcatggccaagattgacaacctgttgcaggagatgctgctgtgaggactagtccctgttcccagagcccacttttttttctttttttgaaataaaatagcctgtctttcagatctaaaaaaaaaaaaaaaaaaaaaaaaaaaaaaaaaaaaaaaaaaaaaaaaaaaaaaaaaaaaaaaaaaaaaaaaaaaaaaaaaaaaaaaaaaaaaaaaaaaa

SEQ ID NO: 4678 - RNA, 1376 nt, synthetic construct
  misc_feature 1..1376: note = mRNA a-1 (A100) (wt mod) from Homo sapiens__NP_000448.3__HNF4A(1-375)
  source 1..1376: mol_type = other RNA
aggagagtcccgcagtcggcgtccagcggctctgcttgttcgtgtgtgtgtcgttgcaggccttattcaagcttaccatgcgactctccaaaaccctcgtcgacatggacatggccgactacagtgctgcactggacccagcctacaccaccctggaatttgagaatgtccaggtgttgacgatgggcaatgacacgtccccatcagaaggcaccaacctcaacgcgcccaacagcctgggtgtgagcgccctgtgtgccatctgcggggaccgggccacgggcaaacactacggtgcctcgagctgtgacggctgcaagggcttcttccggaggagcgtgcggaagaaccacatgtactcctgcagatttagccggcagtgcgtggtggacaaagacaagaggaaccagtgccgctactgcaggctcaagaaatgcttccgggctggcatgaagaaggaagccgtccagaatgagcgggaccggatcagcactcgaaggtcaagctatgaggacagcagcctgccctccatcaatgcgctcctgcaggcggaggtcctgtcccgacagatcacctcccccgtctccgggatcaacggcgacattcgggcgaagaagattgccagcatcgcagatgtgtgtgagtccatgaaggagcagctgctggttctcgttgagtgggccaagtacatcccagctttctgcgagctccccctggacgaccaggtggccctgctcagagcccatgctggcgagcacctcctgctcggagccaccaagagatccatggtgttcaaggacgtgctgctcctaggcaatgactacattgtccctcggcactgcccggagctggcggagatgagccgggtgtccatacgcatccttgacgagctggtgctgcccttccaggagctgcagatcgatgacaatgagtatgcctacctcaaagccatcatcttctttgacccagatgccaaggggctgagcgatccagggaagatcaagcggctgcgttcccaggtccaggtgagcttggaggactacatcaacgaccgccagtatgactcgcgtggccgctttggagagctgctgctgctgctgcccaccttgcagagcatcacctggcagatgatcgagcagatccagttcatcaagctgttcggcatggccaagattgacaacctgttgcaggagatgctgctgtgaggactagtccctgttcccagagcccacttttttttctttttttgaaataaaatagcctgtctttcagatctaaaaaaaaaaaaaaaaaaaaaaaaaaaaaaaaaaaaaaaaaaaaaaaaaaaaaaaaaaaaaaaaaaaaaaaaaaaaaaaaaaaaaaaaaaaaaaaaaaaa

SEQ ID NO: 4679 - RNA, 1376 nt, synthetic construct
  misc_feature 1..1376: note = mRNA a-1 (A100) (opt1) from Homo sapiens__NP_000448.3__HNF4A(1-375)
  source 1..1376: mol_type = other RNA
aggagagtcccgcagtcggcgtccagcggctctgcttgttcgtgtgtgtgtcgttgcaggccttattcaagcttaccatgcgcctgagcaagaccctcgtggacatggacatggccgactactccgccgcgctggaccccgcctacaccacgctggagttcgagaacgtccaggtgctcaccatgggcaacgacaccagcccgtccgaggggaccaacctgaacgcccccaacagcctgggcgtgtccgccctctgcgccatctgcggggaccgggcgacgggcaagcactacggggccagctcctgcgacggctgcaagggcttcttccgccggagcgtccgcaagaaccacatgtactcctgccggttcagccgccagtgcgtggtggacaaggacaagcggaaccagtgccgctactgccggctgaagaagtgcttccgcgccgggatgaagaaggaggccgtccagaacgagcgggaccgcatctccacccggcgcagctcctacgaggacagctccctgcccagcatcaacgcgctcctgcaggccgaggtgctgtcccggcagatcaccagccccgtgtccggcatcaacggggacatccgcgccaagaagatcgccagcatcgccgacgtctgcgagagcatgaaggagcagctcctggtgctggtggagtgggcgaagtacatcccggccttctgcgagctccccctggacgaccaggtcgccctgctccgggcccacgccggcgagcacctcctgctgggggcgaccaagcgctccatggtgttcaaggacgtgctgctgctcggcaacgactacatcgtcccccggcactgccccgagctggccgagatgagccgcgtgtccatccggatcctggacgagctcgtgctgccgttccaggagctgcagatcgacgacaacgagtacgcctacctcaaggccatcatcttcttcgaccccgacgccaagggcctgagcgaccccgggaagatcaagcgcctgcgctcccaggtccaggtgagcctcgaggactacatcaacgaccggcagtacgactcccgcggccggttcggggagctgctgctcctgctgcccacgctccagagcatcacctggcagatgatcgagcagatccagttcatcaagctgttcggcatggcgaagatcgacaacctgctccaggagatgctgctgtgaggactagtccctgttcccagagcccacttttttttctttttttgaaataaaatagcctgtctttcagatctaaaaaaaaaaaaaaaaaaaaaaaaaaaaaaaaaaaaaaaaaaaaaaaaaaaaaaaaaaaaaaaaaaaaaaaaaaaaaaaaaaaaaaaaaaaaaaaaaaaa

SEQ ID NO: 4680 - RNA, 1376 nt, synthetic construct
  misc_feature 1..1376: note = mRNA a-1 (A100) (opt1) from Homo sapiens__NP_000448.3__HNF4A(1-375)(S313A)
  source 1..1376: mol_type = other RNA
aggagagtcccgcagtcggcgtccagcggctctgcttgttcgtgtgtgtgtcgttgcaggccttattcaagcttaccatgcgcctgagcaagaccctcgtggacatggacatggccgactactccgccgcgctggaccccgcctacaccacgctggagttcgagaacgtccaggtgctcaccatgggcaacgacaccagcccgtccgaggggaccaacctgaacgcccccaacagcctgggcgtgtccgccctctgcgccatctgcggggaccgggcgacgggcaagcactacggggccagctcctgcgacggctgcaagggcttcttccgccggagcgtccgcaagaaccacatgtactcctgccggttcagccgccagtgcgtggtggacaaggacaagcggaaccagtgccgctactgccggctgaagaagtgcttccgcgccgggatgaagaaggaggccgtccagaacgagcgggaccgcatctccacccggcgcagctcctacgaggacagctccctgcccagcatcaacgcgctcctgcaggccgaggtgctgtcccggcagatcaccagccccgtgtccggcatcaacggggacatccgcgccaagaagatcgccagcatcgccgacgtctgcgagagcatgaaggagcagctcctggtgctggtggagtgggcgaagtacatcccggccttctgcgagctccccctggacgaccaggtcgccctgctccgggcccacgccggcgagcacctcctgctgggggcgaccaagcgctccatggtgttcaaggacgtgctgctgctcggcaacgactacatcgtcccccggcactgccccgagctggccgagatgagccgcgtgtccatccggatcctggacgagctcgtgctgccgttccaggagctgcagatcgacgacaacgagtacgcctacctcaaggccatcatcttcttcgaccccgacgccaagggcctgagcgaccccgggaagatcaagcgcctgcgcgcgcaggtccaggtgagcctcgaggactacatcaacgaccggcagtacgactcccgcggccggttcggggagctgctgctcctgctgcccacgctccagagcatcacctggcagatgatcgagcagatccagttcatcaagctgttcggcatggcgaagatcgacaacctgctccaggagatgctgctgtgaggactagtccctgttcccagagcccacttttttttctttttttgaaataaaatagcctgtctttcagatctaaaaaaaaaaaaaaaaaaaaaaaaaaaaaaaaaaaaaaaaaaaaaaaaaaaaaaaaaaaaaaaaaaaaaaaaaaaaaaaaaaaaaaaaaaaaaaaaaaaa

SEQ ID NO: 4681 - RNA, 1376 nt, synthetic construct
  misc_feature 1..1376: note = mRNA a-1 (A100) (opt1) from Homo sapiens__NP_000448.3__HNF4A(1-375)(S313E)
  source 1..1376: mol_type = other RNA
aggagagtcccgcagtcggcgtccagcggctctgcttgttcgtgtgtgtgtcgttgcaggccttattcaagcttaccatgcgcctgagcaagaccctcgtggacatggacatggccgactactccgccgcgctggaccccgcctacaccacgctggagttcgagaacgtccaggtgctcaccatgggcaacgacaccagcccgtccgaggggaccaacctgaacgcccccaacagcctgggcgtgtccgccctctgcgccatctgcggggaccgggcgacgggcaagcactacggggccagctcctgcgacggctgcaagggcttcttccgccggagcgtccgcaagaaccacatgtactcctgccggttcagccgccagtgcgtggtggacaaggacaagcggaaccagtgccgctactgccggctgaagaagtgcttccgcgccgggatgaagaaggaggccgtccagaacgagcgggaccgcatctccacccggcgcagctcctacgaggacagctccctgcccagcatcaacgcgctcctgcaggccgaggtgctgtcccggcagatcaccagccccgtgtccggcatcaacggggacatccgcgccaagaagatcgccagcatcgccgacgtctgcgagagcatgaaggagcagctcctggtgctggtggagtgggcgaagtacatcccggccttctgcgagctccccctggacgaccaggtcgccctgctccgggcccacgccggcgagcacctcctgctgggggcgaccaagcgctccatggtgttcaaggacgtgctgctgctcggcaacgactacatcgtcccccggcactgccccgagctggccgagatgagccgcgtgtccatccggatcctggacgagctcgtgctgccgttccaggagctgcagatcgacgacaacgagtacgcctacctcaaggccatcatcttcttcgaccccgacgccaagggcctgagcgaccccgggaagatcaagcgcctgcgcgagcaggtccaggtgagcctcgaggactacatcaacgaccggcagtacgactcccgcggccggttcggggagctgctgctcctgctgcccacgctccagagcatcacctggcagatgatcgagcagatccagttcatcaagctgttcggcatggcgaagatcgacaacctgctccaggagatgctgctgtgaggactagtccctgttcccagagcccacttttttttctttttttgaaataaaatagcctgtctttcagatctaaaaaaaaaaaaaaaaaaaaaaaaaaaaaaaaaaaaaaaaaaaaaaaaaaaaaaaaaaaaaaaaaaaaaaaaaaaaaaaaaaaaaaaaaaaaaaaaaaaa

SEQ ID NO: 4682 - RNA, 1376 nt, synthetic construct
  misc_feature 1..1376: note = mRNA a-1 (A100) (opt1) from Homo sapiens__NP_000448.3__HNF4A(1-375)(S142A_S143A)
  source 1..1376: mol_type = other RNA
aggagagtcccgcagtcggcgtccagcggctctgcttgttcgtgtgtgtgtcgttgcaggccttattcaagcttaccatgcgcctgagcaagaccctcgtggacatggacatggccgactactccgccgcgctggaccccgcctacaccacgctggagttcgagaacgtccaggtgctcaccatgggcaacgacaccagcccgtccgaggggaccaacctgaacgcccccaacagcctgggcgtgtccgccctctgcgccatctgcggggaccgggcgacgggcaagcactacggggccagctcctgcgacggctgcaagggcttcttccgccggagcgtccgcaagaaccacatgtactcctgccggttcagccgccagtgcgtggtggacaaggacaagcggaaccagtgccgctactgccggctgaagaagtgcttccgcgccgggatgaagaaggaggccgtccagaacgagcgggaccgcatctccacccggcgcgcggcctacgaggacagctccctgcccagcatcaacgcgctcctgcaggccgaggtgctgtcccggcagatcaccagccccgtgtccggcatcaacggggacatccgcgccaagaagatcgccagcatcgccgacgtctgcgagagcatgaaggagcagctcctggtgctggtggagtgggcgaagtacatcccggccttctgcgagctccccctggacgaccaggtcgccctgctccgggcccacgccggcgagcacctcctgctgggggcgaccaagcgctccatggtgttcaaggacgtgctgctgctcggcaacgactacatcgtcccccggcactgccccgagctggccgagatgagccgcgtgtccatccggatcctggacgagctcgtgctgccgttccaggagctgcagatcgacgacaacgagtacgcctacctcaaggccatcatcttcttcgaccccgacgccaagggcctgagcgaccccgggaagatcaagcgcctgcgctcccaggtccaggtgagcctcgaggactacatcaacgaccggcagtacgactcccgcggccggttcggggagctgctgctcctgctgcccacgctccagagcatcacctggcagatgatcgagcagatccagttcatcaagctgttcggcatggcgaagatcgacaacctgctccaggagatgctgctgtgaggactagtccctgttcccagagcccacttttttttctttttttgaaataaaatagcctgtctttcagatctaaaaaaaaaaaaaaaaaaaaaaaaaaaaaaaaaaaaaaaaaaaaaaaaaaaaaaaaaaaaaaaaaaaaaaaaaaaaaaaaaaaaaaaaaaaaaaaaaaaa

SEQ ID NO: 4683 - RNA, 1376 nt, synthetic construct
  misc_feature 1..1376: note = mRNA a-1 (A100) (opt1) from Homo sapiens__NP_000448.3__HNF4A(1-375)(S142E_S143E)
  source 1..1376: mol_type = other RNA
aggagagtcccgcagtcggcgtccagcggctctgcttgttcgtgtgtgtgtcgttgcaggccttattcaagcttaccatgcgcctgagcaagaccctcgtggacatggacatggccgactactccgccgcgctggaccccgcctacaccacgctggagttcgagaacgtccaggtgctcaccatgggcaacgacaccagcccgtccgaggggaccaacctgaacgcccccaacagcctgggcgtgtccgccctctgcgccatctgcggggaccgggcgacgggcaagcactacggggccagctcctgcgacggctgcaagggcttcttccgccggagcgtccgcaagaaccacatgtactcctgccggttcagccgccagtgcgtggtggacaaggacaagcggaaccagtgccgctactgccggctgaagaagtgcttccgcgccgggatgaagaaggaggccgtccagaacgagcgggaccgcatctccacccggcgcgaggagtacgaggacagctccctgcccagcatcaacgcgctcctgcaggccgaggtgctgtcccggcagatcaccagccccgtgtccggcatcaacggggacatccgcgccaagaagatcgccagcatcgccgacgtctgcgagagcatgaaggagcagctcctggtgctggtggagtgggcgaagtacatcccggccttctgcgagctccccctggacgaccaggtcgccctgctccgggcccacgccggcgagcacctcctgctgggggcgaccaagcgctccatggtgttcaaggacgtgctgctgctcggcaacgactacatcgtcccccggcactgccccgagctggccgagatgagccgcgtgtccatccggatcctggacgagctcgtgctgccgttccaggagctgcagatcgacgacaacgagtacgcctacctcaaggccatcatcttcttcgaccccgacgccaagggcctgagcgaccccgggaagatcaagcgcctgcgctcccaggtccaggtgagcctcgaggactacatcaacgaccggcagtacgactcccgcggccggttcggggagctgctgctcctgctgcccacgctccagagcatcacctggcagatgatcgagcagatccagttcatcaagctgttcggcatggcgaagatcgacaacctgctccaggagatgctgctgtgaggactagtccctgttcccagagcccacttttttttctttttttgaaataaaatagcctgtctttcagatctaaaaaaaaaaaaaaaaaaaaaaaaaaaaaaaaaaaaaaaaaaaaaaaaaaaaaaaaaaaaaaaaaaaaaaaaaaaaaaaaaaaaaaaaaaaaaaaaaaaa

SEQ ID NO: 4684 - RNA, 1376 nt, synthetic construct
  misc_feature 1..1376: note = mRNA a-1 (A100) (opt1) from Homo sapiens__NP_000448.3__HNF4A(1-375)(S143A)
  source 1..1376: mol_type = other RNA
aggagagtcccgcagtcggcgtccagcggctctgcttgttcgtgtgtgtgtcgttgcaggccttattcaagcttaccatgcgcctgagcaagaccctcgtggacatggacatggccgactactccgccgcgctggaccccgcctacaccacgctggagttcgagaacgtccaggtgctcaccatgggcaacgacaccagcccgtccgaggggaccaacctgaacgcccccaacagcctgggcgtgtccgccctctgcgccatctgcggggaccgggcgacgggcaagcactacggggccagctcctgcgacggctgcaagggcttcttccgccggagcgtccgcaagaaccacatgtactcctgccggttcagccgccagtgcgtggtggacaaggacaagcggaaccagtgccgctactgccggctgaagaagtgcttccgcgccgggatgaagaaggaggccgtccagaacgagcgggaccgcatctccacccggcgcagcgcgtacgaggacagctccctgcccagcatcaacgcgctcctgcaggccgaggtgctgtcccggcagatcaccagccccgtgtccggcatcaacggggacatccgcgccaagaagatcgccagcatcgccgacgtctgcgagagcatgaaggagcagctcctggtgctggtggagtgggcgaagtacatcccggccttctgcgagctccccctggacgaccaggtcgccctgctccgggcccacgccggcgagcacctcctgctgggggcgaccaagcgctccatggtgttcaaggacgtgctgctgctcggcaacgactacatcgtcccccggcactgccccgagctggccgagatgagccgcgtgtccatccggatcctggacgagctcgtgctgccgttccaggagctgcagatcgacgacaacgagtacgcctacctcaaggccatcatcttcttcgaccccgacgccaagggcctgagcgaccccgggaagatcaagcgcctgcgctcccaggtccaggtgagcctcgaggactacatcaacgaccggcagtacgactcccgcggccggttcggggagctgctgctcctgctgcccacgctccagagcatcacctggcagatgatcgagcagatccagttcatcaagctgttcggcatggcgaagatcgacaacctgctccaggagatgctgctgtgaggactagtccctgttcccagagcccacttttttttctttttttgaaataaaatagcctgtctttcagatctaaaaaaaaaaaaaaaaaaaaaaaaaaaaaaaaaaaaaaaaaaaaaaaaaaaaaaaaaaaaaaaaaaaaaaaaaaaaaaaaaaaaaaaaaaaaaaaaaaaa

SEQ ID NO: 4685 - RNA, 1376 nt, synthetic construct
  misc_feature 1..1376: note = mRNA a-1 (A100) (opt1) from Homo sapiens__NP_000448.3__HNF4A(1-375)(T166A)
  source 1..1376: mol_type = other RNA
aggagagtcccgcagtcggcgtccagcggctctgcttgttcgtgtgtgtgtcgttgcaggccttattcaagcttaccatgcgcctgagcaagaccctcgtggacatggacatggccgactactccgccgcgctggaccccgcctacaccacgctggagttcgagaacgtccaggtgctcaccatgggcaacgacaccagcccgtccgaggggaccaacctgaacgcccccaacagcctgggcgtgtccgccctctgcgccatctgcggggaccgggcgacgggcaagcactacggggccagctcctgcgacggctgcaagggcttcttccgccggagcgtccgcaagaaccacatgtactcctgccggttcagccgccagtgcgtggtggacaaggacaagcggaaccagtgccgctactgccggctgaagaagtgcttccgcgccgggatgaagaaggaggccgtccagaacgagcgggaccgcatctccacccggcgcagctcctacgaggacagctccctgcccagcatcaacgcgctcctgcaggccgaggtgctgtcccggcagatcgcgagccccgtgtccggcatcaacggggacatccgcgccaagaagatcgccagcatcgccgacgtctgcgagagcatgaaggagcagctcctggtgctggtggagtgggcgaagtacatcccggccttctgcgagctccccctggacgaccaggtcgccctgctccgggcccacgccggcgagcacctcctgctgggggcgaccaagcgctccatggtgttcaaggacgtgctgctgctcggcaacgactacatcgtcccccggcactgccccgagctggccgagatgagccgcgtgtccatccggatcctggacgagctcgtgctgccgttccaggagctgcagatcgacgacaacgagtacgcctacctcaaggccatcatcttcttcgaccccgacgccaagggcctgagcgaccccgggaagatcaagcgcctgcgctcccaggtccaggtgagcctcgaggactacatcaacgaccggcagtacgactcccgcggccggttcggggagctgctgctcctgctgcccacgctccagagcatcacctggcagatgatcgagcagatccagttcatcaagctgttcggcatggcgaagatcgacaacctgctccaggagatgctgctgtgaggactagtccctgttcccagagcccacttttttttctttttttgaaataaaatagcctgtctttcagatctaaaaaaaaaaaaaaaaaaaaaaaaaaaaaaaaaaaaaaaaaaaaaaaaaaaaaaaaaaaaaaaaaaaaaaaaaaaaaaaaaaaaaaaaaaaaaaaaaaaa

SEQ ID NO: 4686 - RNA, 1376 nt, synthetic construct
  misc_feature 1..1376: note = mRNA a-1 (A100) (opt1) from Homo sapiens__NP_000448.3__HNF4A(1-375)(S167E)
  source 1..1376: mol_type = other RNA
aggagagtcccgcagtcggcgtccagcggctctgcttgttcgtgtgtgtgtcgttgcaggccttattcaagcttaccatgcgcctgagcaagaccctcgtggacatggacatggccgactactccgccgcgctggaccccgcctacaccacgctggagttcgagaacgtccaggtgctcaccatgggcaacgacaccagcccgtccgaggggaccaacctgaacgcccccaacagcctgggcgtgtccgccctctgcgccatctgcggggaccgggcgacgggcaagcactacggggccagctcctgcgacggctgcaagggcttcttccgccggagcgtccgcaagaaccacatgtactcctgccggttcagccgccagtgcgtggtggacaaggacaagcggaaccagtgccgctactgccggctgaagaagtgcttccgcgccgggatgaagaaggaggccgtccagaacgagcgggaccgcatctccacccggcgcagctcctacgaggacagctccctgcccagcatcaacgcgctcctgcaggccgaggtgctgtcccggcagatcaccgagcccgtgtccggcatcaacggggacatccgcgccaagaagatcgccagcatcgccgacgtctgcgagagcatgaaggagcagctcctggtgctggtggagtgggcgaagtacatcccggccttctgcgagctccccctggacgaccaggtcgccctgctccgggcccacgccggcgagcacctcctgctgggggcgaccaagcgctccatggtgttcaaggacgtgctgctgctcggcaacgactacatcgtcccccggcactgccccgagctggccgagatgagccgcgtgtccatccggatcctggacgagctcgtgctgccgttccaggagctgcagatcgacgacaacgagtacgcctacctcaaggccatcatcttcttcgaccccgacgccaagggcctgagcgaccccgggaagatcaagcgcctgcgctcccaggtccaggtgagcctcgaggactacatcaacgaccggcagtacgactcccgcggccggttcggggagctgctgctcctgctgcccacgctccagagcatcacctggcagatgatcgagcagatccagttcatcaagctgttcggcatggcgaagatcgacaacctgctccaggagatgctgctgtgaggactagtccctgttcccagagcccacttttttttctttttttgaaataaaatagcctgtctttcagatctaaaaaaaaaaaaaaaaaaaaaaaaaaaaaaaaaaaaaaaaaaaaaaaaaaaaaaaaaaaaaaaaaaaaaaaaaaaaaaaaaaaaaaaaaaaaaaaaaaaa

SEQ ID NO: 4687 - RNA, 1376 nt, synthetic construct
  misc_feature 1..1376: note = mRNA a-1 (A100) (opt1) from Homo sapiens__NP_000448.3__HNF4A(1-375)(S167A)
  source 1..1376: mol_type = other RNA
aggagagtcccgcagtcggcgtccagcggctctgcttgttcgtgtgtgtgtcgttgcaggccttattcaagcttaccatgcgcctgagcaagaccctcgtggacatggacatggccgactactccgccgcgctggaccccgcctacaccacgctggagttcgagaacgtccaggtgctcaccatgggcaacgacaccagcccgtccgaggggaccaacctgaacgcccccaacagcctgggcgtgtccgccctctgcgccatctgcggggaccgggcgacgggcaagcactacggggccagctcctgcgacggctgcaagggcttcttccgccggagcgtccgcaagaaccacatgtactcctgccggttcagccgccagtgcgtggtggacaaggacaagcggaaccagtgccgctactgccggctgaagaagtgcttccgcgccgggatgaagaaggaggccgtccagaacgagcgggaccgcatctccacccggcgcagctcctacgaggacagctccctgcccagcatcaacgcgctcctgcaggccgaggtgctgtcccggcagatcaccgcgcccgtgtccggcatcaacggggacatccgcgccaagaagatcgccagcatcgccgacgtctgcgagagcatgaaggagcagctcctggtgctggtggagtgggcgaagtacatcccggccttctgcgagctccccctggacgaccaggtcgccctgctccgggcccacgccggcgagcacctcctgctgggggcgaccaagcgctccatggtgttcaaggacgtgctgctgctcggcaacgactacatcgtcccccggcactgccccgagctggccgagatgagccgcgtgtccatccggatcctggacgagctcgtgctgccgttccaggagctgcagatcgacgacaacgagtacgcctacctcaaggccatcatcttcttcgaccccgacgccaagggcctgagcgaccccgggaagatcaagcgcctgcgctcccaggtccaggtgagcctcgaggactacatcaacgaccggcagtacgactcccgcggccggttcggggagctgctgctcctgctgcccacgctccagagcatcacctggcagatgatcgagcagatccagttcatcaagctgttcggcatggcgaagatcgacaacctgctccaggagatgctgctgtgaggactagtccctgttcccagagcccacttttttttctttttttgaaataaaatagcctgtctttcagatctaaaaaaaaaaaaaaaaaaaaaaaaaaaaaaaaaaaaaaaaaaaaaaaaaaaaaaaaaaaaaaaaaaaaaaaaaaaaaaaaaaaaaaaaaaaaaaaaaaaa

SEQ ID NO: 4688 - RNA, 1376 nt, synthetic construct; identical to SEQ ID NO: 4687
  misc_feature 1..1376: note = mRNA a-1 (A100) (opt1) from Homo sapiens__NP_000448.3__HNF4A(1-375)(S167A_S378A_T429A_T432A_ S436A)
  source 1..1376: mol_type = other RNA

SEQ ID NO: 4689 - RNA, 1376 nt, synthetic construct; identical to SEQ ID NO: 4686
  misc_feature 1..1376: note = mRNA a-1 (A100) (opt1) from Homo sapiens__NP_000448.3__HNF4A(1-375)(S167E_S378E_T429E_T432E_ S436E)
  source 1..1376: mol_type = other RNA

SEQ ID NO: 4690 - RNA, 1376 nt, synthetic construct
  misc_feature 1..1376: note = mRNA a-1 (A100) (opt1) from Homo sapiens__NP_000448.3__HNF4A(1-375)(S87A)
  source 1..1376: mol_type = other RNA
aggagagtcccgcagtcggcgtccagcggctctgcttgttcgtgtgtgtgtcgttgcaggccttattcaagcttaccatgcgcctgagcaagaccctcgtggacatggacatggccgactactccgccgcgctggaccccgcctacaccacgctggagttcgagaacgtccaggtgctcaccatgggcaacgacaccagcccgtccgaggggaccaacctgaacgcccccaacagcctgggcgtgtccgccctctgcgccatctgcggggaccgggcgacgggcaagcactacggggccagctcctgcgacggctgcaagggcttcttccgccgggcggtccgcaagaaccacatgtactcctgccggttcagccgccagtgcgtggtggacaaggacaagcggaaccagtgccgctactgccggctgaagaagtgcttccgcgccgggatgaagaaggaggccgtccagaacgagcgggaccgcatctccacccggcgcagctcctacgaggacagctccctgcccagcatcaacgcgctcctgcaggccgaggtgctgtcccggcagatcaccagccccgtgtccggcatcaacggggacatccgcgccaagaagatcgccagcatcgccgacgtctgcgagagcatgaaggagcagctcctggtgctggtggagtgggcgaagtacatcccggccttctgcgagctccccctggacgaccaggtcgccctgctccgggcccacgccggcgagcacctcctgctgggggcgaccaagcgctccatggtgttcaaggacgtgctgctgctcggcaacgactacatcgtcccccggcactgccccgagctggccgagatgagccgcgtgtccatccggatcctggacgagctcgtgctgccgttccaggagctgcagatcgacgacaacgagtacgcctacctcaaggccatcatcttcttcgaccccgacgccaagggcctgagcgaccccgggaagatcaagcgcctgcgctcccaggtccaggtgagcctcgaggactacatcaacgaccggcagtacgactcccgcggccggttcggggagctgctgctcctgctgcccacgctccagagcatcacctggcagatgatcgagcagatccagttcatcaagctgttcggcatggcgaagatcgacaacctgctccaggagatgctgctgtgaggactagtccctgttcccagagcccacttttttttctttttttgaaataaaatagcctgtctttcagatctaaaaaaaaaaaaaaaaaaaaaaaaaaaaaaaaaaaaaaaaaaaaaaaaaaaaaaaaaaaaaaaaaaaaaaaaaaaaaaaaaaaaaaaaaaaaaaaaaaaa

SEQ ID NO: 4691 - RNA, 1376 nt, synthetic construct
  misc_feature 1..1376: note = mRNA a-1 (A100) (opt1) from Homo sapiens__NP_000448.3__HNF4A(1-375)(S87E)
  source 1..1376: mol_type = other RNA
aggagagtcccgcagtcggcgtccagcggctctgcttgttcgtgtgtgtgtcgttgcaggccttattcaagcttaccatgcgcctgagcaagaccctcgtggacatggacatggccgactactccgccgcgctggaccccgcctacaccacgctggagttcgagaacgtccaggtgctcaccatgggcaacgacaccagcccgtccgaggggaccaacctgaacgcccccaacagcctgggcgtgtccgccctctgcgccatctgcggggaccgggcgacgggcaagcactacggggccagctcctgcgacggctgcaagggcttcttccgccgggaggtccgcaagaaccacatgtactcctgccggttcagccgccagtgcgtggtggacaaggacaagcggaaccagtgccgctactgccggctgaagaagtgcttccgcgccgggatgaagaaggaggccgtccagaacgagcgggaccgcatctccacccggcgcagctcctacgaggacagctccctgcccagcatcaacgcgctcctgcaggccgaggtgctgtcccggcagatcaccagccccgtgtccggcatcaacggggacatccgcgccaagaagatcgccagcatcgccgacgtctgcgagagcatgaaggagcagctcctggtgctggtggagtgggcgaagtacatcccggccttctgcgagctccccctggacgaccaggtcgccctgctccgggcccacgccggcgagcacctcctgctgggggcgaccaagcgctccatggtgttcaaggacgtgctgctgctcggcaacgactacatcgtcccccggcactgccccgagctggccgagatgagccgcgtgtccatccggatcctggacgagctcgtgctgccgttccaggagctgcagatcgacgacaacgagtacgcctacctcaaggccatcatcttcttcgaccccgacgccaagggcctgagcgaccccgggaagatcaagcgcctgcgctcccaggtccaggtgagcctcgaggactacatcaacgaccggcagtacgactcccgcggccggttcggggagctgctgctcctgctgcccacgctccagagcatcacctggcagatgatcgagcagatccagttcatcaagctgttcggcatggcgaagatcgacaacctgctccaggagatgctgctgtgaggactagtccctgttcccagagcccacttttttttctttttttgaaataaaatagcctgtctttcagatctaaaaaaaaaaaaaaaaaaaaaaaaaaaaaaaaaaaaaaaaaaaaaaaaaaaaaaaaaaaaaaaaaaaaaaaaaaaaaaaaaaaaaaaaaaaaaaaaaaaa

SEQ ID NO: 4692 - RNA, 1376 nt, synthetic construct
  misc_feature 1..1376: note = mRNA a-1 (A100) (opt1) from Homo sapiens__NP_000448.3__HNF4A(1-375)(R2V)
  source 1..1376: mol_type = other RNA
aggagagtcccgcagtcggcgtccagcggctctgcttgttcgtgtgtgtgtcgttgcaggccttattcaagcttaccatggtgctgagcaagaccctcgtggacatggacatggccgactactccgccgcgctggaccccgcctacaccacgctggagttcgagaacgtccaggtgctcaccatgggcaacgacaccagcccgtccgaggggaccaacctgaacgcccccaacagcctgggcgtgtccgccctctgcgccatctgcggggaccgggcgacgggcaagcactacggggccagctcctgcgacggctgcaagggcttcttccgccggagcgtccgcaagaaccacatgtactcctgccggttcagccgccagtgcgtggtggacaaggacaagcggaaccagtgccgctactgccggctgaagaagtgcttccgcgccgggatgaagaaggaggccgtccagaacgagcgggaccgcatctccacccggcgcagctcctacgaggacagctccctgcccagcatcaacgcgctcctgcaggccgaggtgctgtcccggcagatcaccagccccgtgtccggcatcaacggggacatccgcgccaagaagatcgccagcatcgccgacgtctgcgagagcatgaaggagcagctcctggtgctggtggagtgggcgaagtacatcccggccttctgcgagctccccctggacgaccaggtcgccctgctccgggcccacgccggcgagcacctcctgctgggggcgaccaagcgctccatggtgttcaaggacgtgctgctgctcggcaacgactacatcgtcccccggcactgccccgagctggccgagatgagccgcgtgtccatccggatcctggacgagctcgtgctgccgttccaggagctgcagatcgacgacaacgagtacgcctacctcaaggccatcatcttcttcgaccccgacgccaagggcctgagcgaccccgggaagatcaagcgcctgcgctcccaggtccaggtgagcctcgaggactacatcaacgaccggcagtacgactcccgcggccggttcggggagctgctgctcctgctgcccacgctccagagcatcacctggcagatgatcgagcagatccagttcatcaagctgttcggcatggcgaagatcgacaacctgctccaggagatgctgctgtgaggactagtccctgttcccagagcccacttttttttctttttttgaaataaaatagcctgtctttcagatctaaaaaaaaaaaaaaaaaaaaaaaaaaaaaaaaaaaaaaaaaaaaaaaaaaaaaaaaaaaaaaaaaaaaaaaaaaaaaaaaaaaaaaaaaaaaaaaaaaaa

SEQ ID NO: 4693 - RNA, 1376 nt, synthetic construct
  misc_feature 1..1376: note = mRNA a-1 (A100) (opt1) from Homo sapiens__NP_000448.3__HNF4A(1-375)(R2V_K5V)
  source 1..1376: mol_type = other RNA
aggagagtcccgcagtcggcgtccagcggctctgcttgttcgtgtgtgtgtcgttgcaggccttattcaagcttaccatggtgctgagcgtgaccctcgtggacatggacatggccgactactccgccgcgctggaccccgcctacaccacgctggagttcgagaacgtccaggtgctcaccatgggcaacgacaccagcccgtccgaggggaccaacctgaacgcccccaacagcctgggcgtgtccgccctctgcgccatctgcggggaccgggcgacgggcaagcactacggggccagctcctgcgacggctgcaagggcttcttccgccggagcgtccgcaagaaccacatgtactcctgccggttcagccgccagtgcgtggtggacaaggacaagcggaaccagtgccgctactgccggctgaagaagtgcttccgcgccgggatgaagaaggaggccgtccagaacgagcgggaccgcatctccacccggcgcagctcctacgaggacagctccctgcccagcatcaacgcgctcctgcaggccgaggtgctgtcccggcagatcaccagccccgtgtccggcatcaacggggacatccgcgccaagaagatcgccagcatcgccgacgtctgcgagagcatgaaggagcagctcctggtgctggtggagtgggcgaagtacatcccggccttctgcgagctccccctggacgaccaggtcgccctgctccgggcccacgccggcgagcacctcctgctgggggcgaccaagcgctccatggtgttcaaggacgtgctgctgctcggcaacgactacatcgtcccccggcactgccccgagctggccgagatgagccgcgtgtccatccggatcctggacgagctcgtgctgccgttccaggagctgcagatcgacgacaacgagtacgcctacctcaaggccatcatcttcttcgaccccgacgccaagggcctgagcgaccccgggaagatcaagcgcctgcgctcccaggtccaggtgagcctcgaggactacatcaacgaccggcagtacgactcccgcggccggttcggggagctgctgctcctgctgcccacgctccagagcatcacctggcagatgatcgagcagatccagttcatcaagctgttcggcatggcgaagatcgacaacctgctccaggagatgctgctgtgaggactagtccctgttcccagagcccacttttttttctttttttgaaataaaatagcctgtctttcagatctaaaaaaaaaaaaaaaaaaaaaaaaaaaaaaaaaaaaaaaaaaaaaaaaaaaaaaaaaaaaaaaaaaaaaaaaaaaaaaaaaaaaaaaaaaaaaaaaaaaa

SEQ ID NO: 4694 - RNA, 1376 nt, synthetic construct
  misc_feature 1..1376: note = mRNA a-1 (A100) (opt1) from Homo sapiens__NP_000448.3__HNF4A(1-375)(K179R_K180R)
  source 1..1376: mol_type = other RNA
aggagagtcccgcagtcggcgtccagcggctctgcttgttcgtgtgtgtgtcgttgcaggccttattcaagcttaccatgcgcctgagcaagaccctcgtggacatggacatggccgactactccgccgcgctggaccccgcctacaccacgctggagttcgagaacgtccaggtgctcaccatgggcaacgacaccagcccgtccgaggggaccaacctgaacgcccccaacagcctgggcgtgtccgccctctgcgccatctgcggggaccgggcgacgggcaagcactacggggccagctcctgcgacggctgcaagggcttcttccgccggagcgtccgcaagaaccacatgtactcctgccggttcagccgccagtgcgtggtggacaaggacaagcggaaccagtgccgctactgccggctgaagaagtgcttccgcgccgggatgaagaaggaggccgtccagaacgagcgggaccgcatctccacccggcgcagctcctacgaggacagctccctgcccagcatcaacgcgctcctgcaggccgaggtgctgtcccggcagatcaccagccccgtgtccggcatcaacggggacatccgcgcccggcgcatcgccagcatcgccgacgtctgcgagagcatgaaggagcagctcctggtgctggtggagtgggcgaagtacatcccggccttctgcgagctccccctggacgaccaggtcgccctgctccgggcccacgccggcgagcacctcctgctgggggcgaccaagcgctccatggtgttcaaggacgtgctgctgctcggcaacgactacatcgtcccccggcactgccccgagctggccgagatgagccgcgtgtccatccggatcctggacgagctcgtgctgccgttccaggagctgcagatcgacgacaacgagtacgcctacctcaaggccatcatcttcttcgaccccgacgccaagggcctgagcgaccccgggaagatcaagcgcctgcgctcccaggtccaggtgagcctcgaggactacatcaacgaccggcagtacgactcccgcggccggttcggggagctgctgctcctgctgcccacgctccagagcatcacctggcagatgatcgagcagatccagttcatcaagctgttcggcatggcgaagatcgacaacctgctccaggagatgctgctgtgaggactagtccctgttcccagagcccacttttttttctttttttgaaataaaatagcctgtctttcagatctaaaaaaaaaaaaaaaaaaaaaaaaaaaaaaaaaaaaaaaaaaaaaaaaaaaaaaaaaaaaaaaaaaaaaaaaaaaaaaaaaaaaaaaaaaaaaaaaaaaa

SEQ ID NO: 4695 - RNA, 1376 nt, synthetic construct
  misc_feature 1..1376: note = mRNA a-1 (A100) (opt1) from Homo sapiens__NP_000448.3__HNF4A(1-375)(K234R)
  source 1..1376: mol_type = other RNA
aggagagtcccgcagtcggcgtccagcggctctgcttgttcgtgtgtgtgtcgttgcaggccttattcaagcttaccatgcgcctgagcaagaccctcgtggacatggacatggccgactactccgccgcgctggaccccgcctacaccacgctggagttcgagaacgtccaggtgctcaccatgggcaacgacaccagcccgtccgaggggaccaacctgaacgcccccaacagcctgggcgtgtccgccctctgcgccatctgcggggaccgggcgacgggcaagcactacggggccagctcctgcgacggctgcaagggcttcttccgccggagcgtccgcaagaaccacatgtactcctgccggttcagccgccagtgcgtggtggacaaggacaagcggaaccagtgccgctactgccggctgaagaagtgcttccgcgccgggatgaagaaggaggccgtccagaacgagcgggaccgcatctccacccggcgcagctcctacgaggacagctccctgcccagcatcaacgcgctcctgcaggccgaggtgctgtcccggcagatcaccagccccgtgtccggcatcaacggggacatccgcgccaagaagatcgccagcatcgccgacgtctgcgagagcatgaaggagcagctcctggtgctggtggagtgggcgaagtacatcccggccttctgcgagctccccctggacgaccaggtcgccctgctccgggcccacgccggcgagcacctcctgctgggggcgacccgccgctccatggtgttcaaggacgtgctgctgctcggcaacgactacatcgtcccccggcactgccccgagctggccgagatgagccgcgtgtccatccggatcctggacgagctcgtgctgccgttccaggagctgcagatcgacgacaacgagtacgcctacctcaaggccatcatcttcttcgaccccgacgccaagggcctgagcgaccccgggaagatcaagcgcctgcgctcccaggtccaggtgagcctcgaggactacatcaacgaccggcagtacgactcccgcggccggttcggggagctgctgctcctgctgcccacgctccagagcatcacctggcagatgatcgagcagatccagttcatcaagctgttcggcatggcgaagatcgacaacctgctccaggagatgctgctgtgaggactagtccctgttcccagagcccacttttttttctttttttgaaataaaatagcctgtctttcagatctaaaaaaaaaaaaaaaaaaaaaaaaaaaaaaaaaaaaaaaaaaaaaaaaaaaaaaaaaaaaaaaaaaaaaaaaaaaaaaaaaaaaaaaaaaaaaaaaaaaa

SEQ ID NO: 4696 - RNA, 1376 nt, synthetic construct
  misc_feature 1..1376: note = mRNA a-1 (A100) (opt1) from Homo sapiens__NP_000448.3__HNF4A(1-375)(K300R)
  source 1..1376: mol_type = other RNA
aggagagtcccgcagtcggcgtccagcggctctgcttgttcgtgtgtgtgtcgttgcaggccttattcaagcttaccatgcgcctgagcaagaccctcgtggacatggacatggccgactactccgccgcgctggaccccgcctacaccacgctggagttcgagaacgtccaggtgctcaccatgggcaacgacaccagcccgtccgaggggaccaacctgaacgcccccaacagcctgggcgtgtccgccctctgcgccatctgcggggaccgggcgacgggcaagcactacggggccagctcctgcgacggctgcaagggcttcttccgccggagcgtccgcaagaaccacatgtactcctgccggttcagccgccagtgcgtggtggacaaggacaagcggaaccagtgccgctactgccggctgaagaagtgcttccgcgccgggatgaagaaggaggccgtccagaacgagcgggaccgcatctccacccggcgcagctcctacgaggacagctccctgcccagcatcaacgcgctcctgcaggccgaggtgctgtcccggcagatcaccagccccgtgtccggcatcaacggggacatccgcgccaagaagatcgccagcatcgccgacgtctgcgagagcatgaaggagcagctcctggtgctggtggagtgggcgaagtacatcccggccttctgcgagctccccctggacgaccaggtcgccctgctccgggcccacgccggcgagcacctcctgctgggggcgaccaagcgctccatggtgttcaaggacgtgctgctgctcggcaacgactacatcgtcccccggcactgccccgagctggccgagatgagccgcgtgtccatccggatcctggacgagctcgtgctgccgttccaggagctgcagatcgacgacaacgagtacgcctacctcaaggccatcatcttcttcgaccccgacgcccgcggcctgagcgaccccgggaagatcaagcgcctgcgctcccaggtccaggtgagcctcgaggactacatcaacgaccggcagtacgactcccgcggccggttcggggagctgctgctcctgctgcccacgctccagagcatcacctggcagatgatcgagcagatccagttcatcaagctgttcggcatggcgaagatcgacaacctgctccaggagatgctgctgtgaggactagtccctgttcccagagcccacttttttttctttttttgaaataaaatagcctgtctttcagatctaaaaaaaaaaaaaaaaaaaaaaaaaaaaaaaaaaaaaaaaaaaaaaaaaaaaaaaaaaaaaaaaaaaaaaaaaaaaaaaaaaaaaaaaaaaaaaaaaaaa

SEQ ID NO: 4697 - RNA, 1376 nt, synthetic construct
  misc_feature 1..1376: note = mRNA a-1 (A100) (opt1) from Homo sapiens__NP_000448.3__HNF4A(1-375)(K300R_K307R_K309R)
  source 1..1376: mol_type = other RNA
aggagagtcccgcagtcggcgtccagcggctctgcttgttcgtgtgtgtgtcgttgcaggccttattcaagcttaccatgcgcctgagcaagaccctcgtggacatggacatggccgactactccgccgcgctggaccccgcctacaccacgctggagttcgagaacgtccaggtgctcaccatgggcaacgacaccagcccgtccgaggggaccaacctgaacgcccccaacagcctgggcgtgtccgccctctgcgccatctgcggggaccgggcgacgggcaagcactacggggccagctcctgcgacggctgcaagggcttcttccgccggagcgtccgcaagaaccacatgtactcctgccggttcagccgccagtgcgtggtggacaaggacaagcggaaccagtgccgctactgccggctgaagaagtgcttccgcgccgggatgaagaaggaggccgtccagaacgagcgggaccgcatctccacccggcgcagctcctacgaggacagctccctgcccagcatcaacgcgctcctgcaggccgaggtgctgtcccggcagatcaccagccccgtgtccggcatcaacggggacatccgcgccaagaagatcgccagcatcgccgacgtctgcgagagcatgaaggagcagctcctggtgctggtggagtgggcgaagtacatcccggccttctgcgagctccccctggacgaccaggtcgccctgctccgggcccacgccggcgagcacctcctgctgggggcgaccaagcgctccatggtgttcaaggacgtgctgctgctcggcaacgactacatcgtcccccggcactgccccgagctggccgagatgagccgcgtgtccatccggatcctggacgagctcgtgctgccgttccaggagctgcagatcgacgacaacgagtacgcctacctcaaggccatcatcttcttcgaccccgacgcccgcggcctgagcgaccccgggcgcatccggcgcctgcgctcccaggtccaggtgagcctcgaggactacatcaacgaccggcagtacgactcccgcggccggttcggggagctgctgctcctgctgcccacgctccagagcatcacctggcagatgatcgagcagatccagttcatcaagctgttcggcatggcgaagatcgacaacctgctccaggagatgctgctgtgaggactagtccctgttcccagagcccacttttttttctttttttgaaataaaatagcctgtctttcagatctaaaaaaaaaaaaaaaaaaaaaaaaaaaaaaaaaaaaaaaaaaaaaaaaaaaaaaaaaaaaaaaaaaaaaaaaaaaaaaaaaaaaaaaaaaaaaaaaaaaa

SEQ ID NO: 4698 - RNA, 1376 nt, synthetic construct; identical to SEQ ID NO: 4679
  misc_feature 1..1376: note = mRNA a-1 (A100) (opt1) from Homo sapiens__NP_000448.3__HNF4A(1-375)(K447R_K470R)
  source 1..1376: mol_type = other RNA

SEQ ID NO: 4699 - RNA, 1376 nt, synthetic construct; identical to SEQ ID NO: 4679
  misc_feature 1..1376: note = mRNA a-1 (A100) (opt1) from Homo sapiens__NP_000448.3__HNF4A(1-375)(K458R)
  source 1..1376: mol_type = other RNA

SEQ ID NO: 4700 - RNA, 1376 nt, synthetic construct
  misc_feature 1..1376: note = mRNA a-1 (A100) (opt1) from Homo sapiens__NP_000448.3__HNF4A(1-375)(K106R_K108R_K126R_K127R)
  source 1..1376: mol_type = other RNA
aggagagtcccgcagtcggcgtccagcggctctgcttgttcgtgtgtgtgtcgttgcaggccttattcaagcttaccatgcgcctgagcaagaccctcgtggacatggacatggccgactactccgccgcgctggaccccgcctacaccacgctggagttcgagaacgtccaggtgctcaccatgggcaacgacaccagcccgtccgaggggaccaacctgaacgcccccaacagcctgggcgtgtccgccctctgcgccatctgcggggaccgggcgacgggcaagcactacggggccagctcctgcgacggctgcaagggcttcttccgccggagcgtccgcaagaaccacatgtactcctgccggttcagccgccagtgcgtggtggaccgcgaccggcggaaccagtgccgctactgccggctgaagaagtgcttccgcgccgggatgcgccgcgaggccgtccagaacgagcgggaccgcatctccacccggcgcagctcctacgaggacagctccctgcccagcatcaacgcgctcctgcaggccgaggtgctgtcccggcagatcaccagccccgtgtccggcatcaacggggacatccgcgccaagaagatcgccagcatcgccgacgtctgcgagagcatgaaggagcagctcctggtgctggtggagtgggcgaagtacatcccggccttctgcgagctccccctggacgaccaggtcgccctgctccgggcccacgccggcgagcacctcctgctgggggcgaccaagcgctccatggtgttcaaggacgtgctgctgctcggcaacgactacatcgtcccccggcactgccccgagctggccgagatgagccgcgtgtccatccggatcctggacgagctcgtgctgccgttccaggagctgcagatcgacgacaacgagtacgcctacctcaaggccatcatcttcttcgaccccgacgccaagggcctgagcgaccccgggaagatcaagcgcctgcgctcccaggtccaggtgagcctcgaggactacatcaacgaccggcagtacgactcccgcggccggttcggggagctgctgctcctgctgcccacgctccagagcatcacctggcagatgatcgagcagatccagttcatcaagctgttcggcatggcgaagatcgacaacctgctccaggagatgctgctgtgaggactagtccctgttcccagagcccacttttttttctttttttgaaataaaatagcctgtctttcagatctaaaaaaaaaaaaaaaaaaaaaaaaaaaaaaaaaaaaaaaaaaaaaaaaaaaaaaaaaaaaaaaaaaaaaaaaaaaaaaaaaaaaaaaaaaaaaaaaaaaa

SEQ ID NO: 4701 - RNA, 1376 nt, synthetic construct
  misc_feature 1..1376: note = mRNA a-1 (A100) (opt1) from Homo sapiens__NP_000448.3__HNF4A(1-375)(E285Q)
  source 1..1376: mol_type = other RNA
aggagagtcccgcagtcggcgtccagcggctctgcttgttcgtgtgtgtgtcgttgcaggccttattcaagcttaccatgcgcctgagcaagaccctcgtggacatggacatggccgactactccgccgcgctggaccccgcctacaccacgctggagttcgagaacgtccaggtgctcaccatgggcaacgacaccagcccgtccgaggggaccaacctgaacgcccccaacagcctgggcgtgtccgccctctgcgccatctgcggggaccgggcgacgggcaagcactacggggccagctcctgcgacggctgcaagggcttcttccgccggagcgtccgcaagaaccacatgtactcctgccggttcagccgccagtgcgtggtggacaaggacaagcggaaccagtgccgctactgccggctgaagaagtgcttccgcgccgggatgaagaaggaggccgtccagaacgagcgggaccgcatctccacccggcgcagctcctacgaggacagctccctgcccagcatcaacgcgctcctgcaggccgaggtgctgtcccggcagatcaccagccccgtgtccggcatcaacggggacatccgcgccaagaagatcgccagcatcgccgacgtctgcgagagcatgaaggagcagctcctggtgctggtggagtgggcgaagtacatcccggccttctgcgagctccccctggacgaccaggtcgccctgctccgggcccacgccggcgagcacctcctgctgggggcgaccaagcgctccatggtgttcaaggacgtgctgctgctcggcaacgactacatcgtcccccggcactgccccgagctggccgagatgagccgcgtgtccatccggatcctggacgagctcgtgctgccgttccaggagctgcagatcgacgacaaccagtacgcctacctcaaggccatcatcttcttcgaccccgacgccaagggcctgagcgaccccgggaagatcaagcgcctgcgctcccaggtccaggtgagcctcgaggactacatcaacgaccggcagtacgactcccgcggccggttcggggagctgctgctcctgctgcccacgctccagagcatcacctggcagatgatcgagcagatccagttcatcaagctgttcggcatggcgaagatcgacaacctgctccaggagatgctgctgtgaggactagtccctgttcccagagcccacttttttttctttttttgaaataaaatagcctgtctttcagatctaaaaaaaaaaaaaaaaaaaaaaaaaaaaaaaaaaaaaaaaaaaaaaaaaaaaaaaaaaaaaaaaaaaaaaaaaaaaaaaaaaaaaaaaaaaaaaaaaaaa

SEQ ID NO: 4702 - RNA, 1376 nt, synthetic construct
  misc_feature 1..1376: note = mRNA a-1 (A100) (opt1) from Homo sapiens__NP_000448.3__HNF4A(1-375)(T166E)
  source 1..1376: mol_type = other RNA
aggagagtcccgcagtcggcgtccagcggctctgcttgttcgtgtgtgtgtcgttgcaggccttattcaagcttaccatgcgcctgagcaagaccctcgtggacatggacatggccgactactccgccgcgctggaccccgcctacaccacgctggagttcgagaacgtccaggtgctcaccatgggcaacgacaccagcccgtccgaggggaccaacctgaacgcccccaacagcctgggcgtgtccgccctctgcgccatctgcggggaccgggcgacgggcaagcactacggggccagctcctgcgacggctgcaagggcttcttccgccggagcgtccgcaagaaccacatgtactcctgccggttcagccgccagtgcgtggtggacaaggacaagcggaaccagtgccgctactgccggctgaagaagtgcttccgcgccgggatgaagaaggaggccgtccagaacgagcgggaccgcatctccacccggcgcagctcctacgaggacagctccctgcccagcatcaacgcgctcctgcaggccgaggtgctgtcccggcagatcgagagccccgtgtccggcatcaacggggacatccgcgccaagaagatcgccagcatcgccgacgtctgcgagagcatgaaggagcagctcctggtgctggtggagtgggcgaagtacatcccggccttctgcgagctccccctggacgaccaggtcgccctgctccgggcccacgccggcgagcacctcctgctgggggcgaccaagcgctccatggtgttcaaggacgtgctgctgctcggcaacgactacatcgtcccccggcactgccccgagctggccgagatgagccgcgtgtccatccggatcctggacgagctcgtgctgccgttccaggagctgcagatcgacgacaacgagtacgcctacctcaaggccatcatcttcttcgaccccgacgccaagggcctgagcgaccccgggaagatcaagcgcctgcgctcccaggtccaggtgagcctcgaggactacatcaacgaccggcagtacgactcccgcggccggttcggggagctgctgctcctgctgcccacgctccagagcatcacctggcagatgatcgagcagatccagttcatcaagctgttcggcatggcgaagatcgacaacctgctccaggagatgctgctgtgaggactagtccctgttcccagagcccacttttttttctttttttgaaataaaatagcctgtctttcagatctaaaaaaaaaaaaaaaaaaaaaaaaaaaaaaaaaaaaaaaaaaaaaaaaaaaaaaaaaaaaaaaaaaaaaaaaaaaaaaaaaaaaaaaaaaaaaaaaaaaa

SEQ ID NO: 4703 - RNA, 1376 nt, synthetic construct
  misc_feature 1..1376: note = mRNA a-1 (A100) (opt1) from Homo sapiens__NP_000448.3__HNF4A(1-375)(S148A)
  source 1..1376: mol_type = other RNA
aggagagtcccgcagtcggcgtccagcggctctgcttgttcgtgtgtgtgtcgttgcaggccttattcaagcttaccatgcgcctgagcaagaccctcgtggacatggacatggccgactactccgccgcgctggaccccgcctacaccacgctggagttcgagaacgtccaggtgctcaccatgggcaacgacaccagcccgtccgaggggaccaacctgaacgcccccaacagcctgggcgtgtccgccctctgcgccatctgcggggaccgggcgacgggcaagcactacggggccagctcctgcgacggctgcaagggcttcttccgccggagcgtccgcaagaaccacatgtactcctgccggttcagccgccagtgcgtggtggacaaggacaagcggaaccagtgccgctactgccggctgaagaagtgcttccgcgccgggatgaagaaggaggccgtccagaacgagcgggaccgcatctccacccggcgcagctcctacgaggacagcgcgctgcccagcatcaacgcgctcctgcaggccgaggtgctgtcccggcagatcaccagccccgtgtccggcatcaacggggacatccgcgccaagaagatcgccagcatcgccgacgtctgcgagagcatgaaggagcagctcctggtgctggtggagtgggcgaagtacatcccggccttctgcgagctccccctggacgaccaggtcgccctgctccgggcccacgccggcgagcacctcctgctgggggcgaccaagcgctccatggtgttcaaggacgtgctgctgctcggcaacgactacatcgtcccccggcactgccccgagctggccgagatgagccgcgtgtccatccggatcctggacgagctcgtgctgccgttccaggagctgcagatcgacgacaacgagtacgcctacctcaaggccatcatcttcttcgaccccgacgccaagggcctgagcgaccccgggaagatcaagcgcctgcgctcccaggtccaggtgagcctcgaggactacatcaacgaccggcagtacgactcccgcggccggttcggggagctgctgctcctgctgcccacgctccagagcatcacctggcagatgatcgagcagatccagttcatcaagctgttcggcatggcgaagatcgacaacctgctccaggagatgctgctgtgaggactagtccctgttcccagagcccacttttttttctttttttgaaataaaatagcctgtctttcagatctaaaaaaaaaaaaaaaaaaaaaaaaaaaaaaaaaaaaaaaaaaaaaaaaaaaaaaaaaaaaaaaaaaaaaaaaaaaaaaaaaaaaaaaaaaaaaaaaaaaa

SEQ ID NO: 4704 - RNA, 1376 nt, synthetic construct
  misc_feature 1..1376: note = mRNA a-1 (A100) (opt1) from Homo sapiens__NP_000448.3__HNF4A(1-375)(S148E)
  source 1..1376: mol_type = other RNA
aggagagtcccgcagtcggcgtccagcggctctgcttgttcgtgtgtgtgtcgttgcaggccttattcaagcttaccatgcgcctgagcaagaccctcgtggacatggacatggccgactactccgccgcgctggaccccgcctacaccacgctggagttcgagaacgtccaggtgctcaccatgggcaacgacaccagcccgtccgaggggaccaacctgaacgcccccaacagcctgggcgtgtccgccctctgcgccatctgcggggaccgggcgacgggcaagcactacggggccagctcctgcgacggctgcaagggcttcttccgccggagcgtccgcaagaaccacatgtactcctgccggttcagccgccagtgcgtggtggacaaggacaagcggaaccagtgccgctactgccggctgaagaagtgcttccgcgccgggatgaagaaggaggccgtccagaacgagcgggaccgcatctccacccggcgcagctcctacgaggacagcgagctgcccagcatcaacgcgctcctgcaggccgaggtgctgtcccggcagatcaccagccccgtgtccggcatcaacggggacatccgcgccaagaagatcgccagcatcgccgacgtctgcgagagcatgaaggagcagctcctggtgctggtggagtgggcgaagtacatcccggccttctgcgagctccccctggacgaccaggtcgccctgctccgggcccacgccggcgagcacctcctgctgggggcgaccaagcgctccatggtgttcaaggacgtgctgctgctcggcaacgactacatcgtcccccggcactgccccgagctggccgagatgagccgcgtgtccatccggatcctggacgagctcgtgctgccgttccaggagctgcagatcgacgacaacgagtacgcctacctcaaggccatcatcttcttcgaccccgacgccaagggcctgagcgaccccgggaagatcaagcgcctgcgctcccaggtccaggtgagcctcgaggactacatcaacgaccggcagtacgactcccgcggccggttcggggagctgctgctcctgctgcccacgctccagagcatcacctggcagatgatcgagcagatccagttcatcaagctgttcggcatggcgaagatcgacaacctgctccaggagatgctgctgtgaggactagtccctgttcccagagcccacttttttttctttttttgaaataaaatagcctgtctttcagatctaaaaaaaaaaaaaaaaaaaaaaaaaaaaaaaaaaaaaaaaaaaaaaaaaaaaaaaaaaaaaaaaaaaaaaaaaaaaaaaaaaaaaaaaaaaaaaaaaaaa

SEQ ID NO: 4705 - RNA, 1376 nt, synthetic construct
  misc_feature 1..1376: note = mRNA a-1 (A100) (opt1) from Homo sapiens__NP_000448.3__HNF4A(1-375)(S183A)
  source 1..1376: mol_type = other RNA
aggagagtcccgcagtcggcgtccagcggctctgcttgttcgtgtgtgtgtcgttgcaggccttattcaagcttaccatgcgcctgagcaagaccctcgtggacatggacatggccgactactccgccgcgctggaccccgcctacaccacgctggagttcgagaacgtccaggtgctcaccatgggcaacgacaccagcccgtccgaggggaccaacctgaacgcccccaacagcctgggcgtgtccgccctctgcgccatctgcggggaccgggcgacgggcaagcactacggggccagctcctgcgacggctgcaagggcttcttccgccggagcgtccgcaagaaccacatgtactcctgccggttcagccgccagtgcgtggtggacaaggacaagcggaaccagtgccgctactgccggctgaagaagtgcttccgcgccgggatgaagaaggaggccgtccagaacgagcgggaccgcatctccacccggcgcagctcctacgaggacagctccctgcccagcatcaacgcgctcctgcaggccgaggtgctgtcccggcagatcaccagccccgtgtccggcatcaacggggacatccgcgccaagaagatcgccgcgatcgccgacgtctgcgagagcatgaaggagcagctcctggtgctggtggagtgggcgaagtacatcccggccttctgcgagctccccctggacgaccaggtcgccctgctccgggcccacgccggcgagcacctcctgctgggggcgaccaagcgctccatggtgttcaaggacgtgctgctgctcggcaacgactacatcgtcccccggcactgccccgagctggccgagatgagccgcgtgtccatccggatcctggacgagctcgtgctgccgttccaggagctgcagatcgacgacaacgagtacgcctacctcaaggccatcatcttcttcgaccccgacgccaagggcctgagcgaccccgggaagatcaagcgcctgcgctcccaggtccaggtgagcctcgaggactacatcaacgaccggcagtacgactcccgcggccggttcggggagctgctgctcctgctgcccacgctccagagcatcacctggcagatgatcgagcagatccagttcatcaagctgttcggcatggcgaagatcgacaacctgctccaggagatgctgctgtgaggactagtccctgttcccagagcccacttttttttctttttttgaaataaaatagcctgtctttcagatctaaaaaaaaaaaaaaaaaaaaaaaaaaaaaaaaaaaaaaaaaaaaaaaaaaaaaaaaaaaaaaaaaaaaaaaaaaaaaaaaaaaaaaaaaaaaaaaaaaaa

SEQ ID NO: 4706 - RNA, 1376 nt, synthetic construct
  misc_feature 1..1376: note = mRNA a-1 (A100) (opt1) from Homo sapiens__NP_000448.3__HNF4A(1-375)(S183E)
  source 1..1376: mol_type = other RNA
aggagagtcccgcagtcggcgtccagcggctctgcttgttcgtgtgtgtgtcgttgcaggccttattcaagcttaccatgcgcctgagcaagaccctcgtggacatggacatggccgactactccgccgcgctggaccccgcctacaccacgctggagttcgagaacgtccaggtgctcaccatgggcaacgacaccagcccgtccgaggggaccaacctgaacgcccccaacagcctgggcgtgtccgccctctgcgccatctgcggggaccgggcgacgggcaagcactacggggccagctcctgcgacggctgcaagggcttcttccgccggagcgtccgcaagaaccacatgtactcctgccggttcagccgccagtgcgtggtggacaaggacaagcggaaccagtgccgctactgccggctgaagaagtgcttccgcgccgggatgaagaaggaggccgtccagaacgagcgggaccgcatctccacccggcgcagctcctacgaggacagctccctgcccagcatcaacgcgctcctgcaggccgaggtgctgtcccggcagatcaccagccccgtgtccggcatcaacggggacatccgcgccaagaagatcgccgagatcgccgacgtctgcgagagcatgaaggagcagctcctggtgctggtggagtgggcgaagtacatcccggccttctgcgagctccccctggacgaccaggtcgccctgctccgggcccacgccggcgagcacctcctgctgggggcgaccaagcgctccatggtgttcaaggacgtgctgctgctcggcaacgactacatcgtcccccggcactgccccgagctggccgagatgagccgcgtgtccatccggatcctggacgagctcgtgctgccgttccaggagctgcagatcgacgacaacgagtacgcctacctcaaggccatcatcttcttcgaccccgacgccaagggcctgagcgaccccgggaagatcaagcgcctgcgctcccaggtccaggtgagcctcgaggactacatcaacgaccggcagtacgactcccgcggccggttcggggagctgctgctcctgctgcccacgctccagagcatcacctggcagatgatcgagcagatccagttcatcaagctgttcggcatggcgaagatcgacaacctgctccaggagatgctgctgtgaggactagtccctgttcccagagcccacttttttttctttttttgaaataaaatagcctgtctttcagatctaaaaaaaaaaaaaaaaaaaaaaaaaaaaaaaaaaaaaaaaaaaaaaaaaaaaaaaaaaaaaaaaaaaaaaaaaaaaaaaaaaaaaaaaaaaaaaaaaaaa

SEQ ID NO: 4707 - RNA, 1376 nt, synthetic construct; identical to SEQ ID NO: 4679
  misc_feature 1..1376: note = mRNA a-1 (A100) (opt1) from Homo sapiens__NP_000448.3__HNF4A(1-375)(S461A)
  source 1..1376: mol_type = other RNA

SEQ ID NO: 4708 - RNA, 1376 nt, synthetic construct; identical to SEQ ID NO: 4679
  misc_feature 1..1376: note = mRNA a-1 (A100) (opt1) from Homo sapiens__NP_000448.3__HNF4A(1-375)(S461E)
  source 1..1376: mol_type = other RNA

SEQ ID NO: 4709 - RNA, 1376 nt, synthetic construct
  misc_feature 1..1376: note = mRNA a-1 (A100) (opt1) from Homo sapiens__NP_000448.3__HNF4A(1-375)(S142A_S143A_S313A)
  source 1..1376: mol_type = other RNA
aggagagtcccgcagtcggcgtccagcggctctgcttgttcgtgtgtgtgtcgttgcaggccttattcaagcttaccatgcgcctgagcaagaccctcgtggacatggacatggccgactactccgccgcgctggaccccgcctacaccacgctggagttcgagaacgtccaggtgctcaccatgggcaacgacaccagcccgtccgaggggaccaacctgaacgcccccaacagcctgggcgtgtccgccctctgcgccatctgcggggaccgggcgacgggcaagcactacggggccagctcctgcgacggctgcaagggcttcttccgccggagcgtccgcaagaaccacatgtactcctgccggttcagccgccagtgcgtggtggacaaggacaagcggaaccagtgccgctactgccggctgaagaagtgcttccgcgccgggatgaagaaggaggccgtccagaacgagcgggaccgcatctccacccggcgcgcggcctacgaggacagctccctgcccagcatcaacgcgctcctgcaggccgaggtgctgtcccggcagatcaccagccccgtgtccggcatcaacggggacatccgcgccaagaagatcgccagcatcgccgacgtctgcgagagcatgaaggagcagctcctggtgctggtggagtgggcgaagtacatcccggccttctgcgagctccccctggacgaccaggtcgccctgctccgggcccacgccggcgagcacctcctgctgggggcgaccaagcgctccatggtgttcaaggacgtgctgctgctcggcaacgactacatcgtcccccggcactgccccgagctggccgagatgagccgcgtgtccatccggatcctggacgagctcgtgctgccgttccaggagctgcagatcgacgacaacgagtacgcctacctcaaggccatcatcttcttcgaccccgacgccaagggcctgagcgaccccgggaagatcaagcgcctgcgcgcgcaggtccaggtgagcctcgaggactacatcaacgaccggcagtacgactcccgcggccggttcggggagctgctgctcctgctgcccacgctccagagcatcacctggcagatgatcgagcagatccagttcatcaagctgttcggcatggcgaagatcgacaacctgctccaggagatgctgctgtgaggactagtccctgttcccagagcccacttttttttctttttttgaaataaaatagcctgtctttcagatctaaaaaaaaaaaaaaaaaaaaaaaaaaaaaaaaaaaaaaaaaaaaaaaaaaaaaaaaaaaaaaaaaaaaaaaaaaaaaaaaaaaaaaaaaaaaaaaaaaaa

SEQ ID NO: 4710 - RNA, 1376 nt, synthetic construct; identical to SEQ ID NO: 4709
  misc_feature 1..1376: note = mRNA a-1 (A100) (opt1) from Homo sapiens__NP_000448.3__HNF4A(1-375)(S142A_S143A_S313A_K458R)
  source 1..1376: mol_type = other RNA

SEQ ID NO: 4711 - RNA, 1376 nt, synthetic construct
  misc_feature 1..1376: note = mRNA a-1 (A100) (opt1) from Homo sapiens__NP_000448.3__HNF4A(1-375)(S142A_S143A_S167A_S313A_ S378A_T429A_T432A_S436A_K458R)
  source 1..1376: mol_type = other RNA
aggagagtcccgcagtcggcgtccagcggctctgcttgttcgtgtgtgtgtcgttgcaggccttattcaagcttaccatgcgcctgagcaagaccctcgtggacatggacatggccgactactccgccgcgctggaccccgcctacaccacgctggagttcgagaacgtccaggtgctcaccatgggcaacgacaccagcccgtccgaggggaccaacctgaacgcccccaacagcctgggcgtgtccgccctctgcgccatctgcggggaccgggcgacgggcaagcactacggggccagctcctgcgacggctgcaagggcttcttccgccggagcgtccgcaagaaccacatgtactcctgccggttcagccgccagtgcgtggtggacaaggacaagcggaaccagtgccgctactgccggctgaagaagtgcttccgcgccgggatgaagaaggaggccgtccagaacgagcgggaccgcatctccacccggcgcgcggcctacgaggacagctccctgcccagcatcaacgcgctcctgcaggccgaggtgctgtcccggcagatcaccgcgcccgtgtccggcatcaacggggacatccgcgccaagaagatcgccagcatcgccgacgtctgcgagagcatgaaggagcagctcctggtgctggtggagtgggcgaagtacatcccggccttctgcgagctccccctggacgaccaggtcgccctgctccgggcccacgccggcgagcacctcctgctgggggcgaccaagcgctccatggtgttcaaggacgtgctgctgctcggcaacgactacatcgtcccccggcactgccccgagctggccgagatgagccgcgtgtccatccggatcctggacgagctcgtgctgccgttccaggagctgcagatcgacgacaacgagtacgcctacctcaaggccatcatcttcttcgaccccgacgccaagggcctgagcgaccccgggaagatcaagcgcctgcgcgcgcaggtccaggtgagcctcgaggactacatcaacgaccggcagtacgactcccgcggccggttcggggagctgctgctcctgctgcccacgctccagagcatcacctggcagatgatcgagcagatccagttcatcaagctgttcggcatggcgaagatcgacaacctgctccaggagatgctgctgtgaggactagtccctgttcccagagcccacttttttttctttttttgaaataaaatagcctgtctttcagatctaaaaaaaaaaaaaaaaaaaaaaaaaaaaaaaaaaaaaaaaaaaaaaaaaaaaaaaaaaaaaaaaaaaaaaaaaaaaaaaaaaaaaaaaaaaaaaaaaaaa

SEQ ID NO: 4712 - RNA, 1376 nt, synthetic construct
  misc_feature 1..1376: note = mRNA a-1 (A100) (opt1) from Homo sapiens__NP_000448.3__HNF4A(1-375)(S142A_S143A_S148A_S167A_ S313A_S378A_T429A_T432A_S436A_K458R)
  source 1..1376: mol_type = other RNA
aggagagtcccgcagtcggcgtccagcggctctgcttgttcgtgtgtgtgtcgttgcaggccttattcaagcttaccatgcgcctgagcaagaccctcgtggacatggacatggccgactactccgccgcgctggaccccgcctacaccacgctggagttcgagaacgtccaggtgctcaccatgggcaacgacaccagcccgtccgaggggaccaacctgaacgcccccaacagcctgggcgtgtccgccctctgcgccatctgcggggaccgggcgacgggcaagcactacggggccagctcctgcgacggctgcaagggcttcttccgccggagcgtccgcaagaaccacatgtactcctgccggttcagccgccagtgcgtggtggacaaggacaagcggaaccagtgccgctactgccggctgaagaagtgcttccgcgccgggatgaagaaggaggccgtccagaacgagcgggaccgcatctccacccggcgcgcggcctacgaggacagcgcgctgcccagcatcaacgcgctcctgcaggccgaggtgctgtcccggcagatcaccgcgcccgtgtccggcatcaacggggacatccgcgccaagaagatcgccagcatcgccgacgtctgcgagagcatgaaggagcagctcctggtgctggtggagtgggcgaagtacatcccggccttctgcgagctccccctggacgaccaggtcgccctgctccgggcccacgccggcgagcacctcctgctgggggcgaccaagcgctccatggtgttcaaggacgtgctgctgctcggcaacgactacatcgtcccccggcactgccccgagctggccgagatgagccgcgtgtccatccggatcctggacgagctcgtgctgccgttccaggagctgcagatcgacgacaacgagtacgcctacctcaaggccatcatcttcttcgaccccgacgccaagggcctgagcgaccccgggaagatcaagcgcctgcgcgcgcaggtccaggtgagcctcgaggactacatcaacgaccggcagtacgactcccgcggccggttcggggagctgctgctcctgctgcccacgctccagagcatcacctggcagatgatcgagcagatccagttcatcaagctgttcggcatggcgaagatcgacaacctgctccaggagatgctgctgtgaggactagtccctgttcccagagcccacttttttttctttttttgaaataaaatagcctgtctttcagatctaaaaaaaaaaaaaaaaaaaaaaaaaaaaaaaaaaaaaaaaaaaaaaaaaaaaaaaaaaaaaaaaaaaaaaaaaaaaaaaaaaaaaaaaaaaaaaaaaaaa

SEQ ID NO: 4713 - RNA, 1376 nt, synthetic construct
  misc_feature 1..1376: note = mRNA a-1 (A100) (opt1) from Homo sapiens__NP_000448.3__HNF4A(1-375)(K106R_K108R_K126R_K127R_ S142A_S143A_S148A_S167A_S313A_S378A_T429A_T432A_S436A_K458R )
  source 1..1376: mol_type = other RNA
aggagagtcccgcagtcggcgtccagcggctctgcttgttcgtgtgtgtgtcgttgcaggccttattcaagcttaccatgcgcctgagcaagaccctcgtggacatggacatggccgactactccgccgcgctggaccccgcctacaccacgctggagttcgagaacgtccaggtgctcaccatgggcaacgacaccagcccgtccgaggggaccaacctgaacgcccccaacagcctgggcgtgtccgccctctgcgccatctgcggggaccgggcgacgggcaagcactacggggccagctcctgcgacggctgcaagggcttcttccgccggagcgtccgcaagaaccacatgtactcctgccggttcagccgccagtgcgtggtggaccgcgaccggcggaaccagtgccgctactgccggctgaagaagtgcttccgcgccgggatgcgccgcgaggccgtccagaacgagcgggaccgcatctccacccggcgcgcggcctacgaggacagcgcgctgcccagcatcaacgcgctcctgcaggccgaggtgctgtcccggcagatcaccgcgcccgtgtccggcatcaacggggacatccgcgccaagaagatcgccagcatcgccgacgtctgcgagagcatgaaggagcagctcctggtgctggtggagtgggcgaagtacatcccggccttctgcgagctccccctggacgaccaggtcgccctgctccgggcccacgccggcgagcacctcctgctgggggcgaccaagcgctccatggtgttcaaggacgtgctgctgctcggcaacgactacatcgtcccccggcactgccccgagctggccgagatgagccgcgtgtccatccggatcctggacgagctcgtgctgccgttccaggagctgcagatcgacgacaacgagtacgcctacctcaaggccatcatcttcttcgaccccgacgccaagggcctgagcgaccccgggaagatcaagcgcctgcgcgcgcaggtccaggtgagcctcgaggactacatcaacgaccggcagtacgactcccgcggccggttcggggagctgctgctcctgctgcccacgctccagagcatcacctggcagatgatcgagcagatccagttcatcaagctgttcggcatggcgaagatcgacaacctgctccaggagatgctgctgtgaggactagtccctgttcccagagcccacttttttttctttttttgaaataaaatagcctgtctttcagatctaaaaaaaaaaaaaaaaaaaaaaaaaaaaaaaaaaaaaaaaaaaaaaaaaaaaaaaaaaaaaaaaaaaaaaaaaaaaaaaaaaaaaaaaaaaaaaaaaaaa

SEQ ID NO: 4714 - RNA, 1376 nt, synthetic construct
  misc_feature 1..1376: note = mRNA a-1 (A100) (opt1) from Homo sapiens__NP_000448.3__HNF4A(1-375)(S142A_S143A_S148A_T166A_ S167A_S313A_S378A_T429A_T432A_S436A_K458R)
  source 1..1376: mol_type = other RNA
aggagagtcccgcagtcggcgtccagcggctctgcttgttcgtgtgtgtgtcgttgcaggccttattcaagcttaccatgcgcctgagcaagaccctcgtggacatggacatggccgactactccgccgcgctggaccccgcctacaccacgctggagttcgagaacgtccaggtgctcaccatgggcaacgacaccagcccgtccgaggggaccaacctgaacgcccccaacagcctgggcgtgtccgccctctgcgccatctgcggggaccgggcgacgggcaagcactacggggccagctcctgcgacggctgcaagggcttcttccgccggagcgtccgcaagaaccacatgtactcctgccggttcagccgccagtgcgtggtggacaaggacaagcggaaccagtgccgctactgccggctgaagaagtgcttccgcgccgggatgaagaaggaggccgtccagaacgagcgggaccgcatctccacccggcgcgcggcctacgaggacagcgcgctgcccagcatcaacgcgctcctgcaggccgaggtgctgtcccggcagatcgcggcgcccgtgtccggcatcaacggggacatccgcgccaagaagatcgccagcatcgccgacgtctgcgagagcatgaaggagcagctcctggtgctggtggagtgggcgaagtacatcccggccttctgcgagctccccctggacgaccaggtcgccctgctccgggcccacgccggcgagcacctcctgctgggggcgaccaagcgctccatggtgttcaaggacgtgctgctgctcggcaacgactacatcgtcccccggcactgccccgagctggccgagatgagccgcgtgtccatccggatcctggacgagctcgtgctgccgttccaggagctgcagatcgacgacaacgagtacgcctacctcaaggccatcatcttcttcgaccccgacgccaagggcctgagcgaccccgggaagatcaagcgcctgcgcgcgcaggtccaggtgagcctcgaggactacatcaacgaccggcagtacgactcccgcggccggttcggggagctgctgctcctgctgcccacgctccagagcatcacctggcagatgatcgagcagatccagttcatcaagctgttcggcatggcgaagatcgacaacctgctccaggagatgctgctgtgaggactagtccctgttcccagagcccacttttttttctttttttgaaataaaatagcctgtctttcagatctaaaaaaaaaaaaaaaaaaaaaaaaaaaaaaaaaaaaaaaaaaaaaaaaaaaaaaaaaaaaaaaaaaaaaaaaaaaaaaaaaaaaaaaaaaaaaaaaaaaa

SEQ ID NO: 4715 - RNA, 1376 nt, synthetic construct
  misc_feature 1..1376: note = mRNA a-1 (A100) (opt1) from Homo sapiens__NP_000448.3__HNF4A(1-375)(S87A_S142A_S143A_S148A_T 166A_S167A_S313A_S378A_T429A_T432A_S436A_K458R)
  source 1..1376: mol_type = other RNA
aggagagtcccgcagtcggcgtccagcggctctgcttgttcgtgtgtgtgtcgttgcaggccttattcaagcttaccatgcgcctgagcaagaccctcgtggacatggacatggccgactactccgccgcgctggaccccgcctacaccacgctggagttcgagaacgtccaggtgctcaccatgggcaacgacaccagcccgtccgaggggaccaacctgaacgcccccaacagcctgggcgtgtccgccctctgcgccatctgcggggaccgggcgacgggcaagcactacggggccagctcctgcgacggctgcaagggcttcttccgccgggcggtccgcaagaaccacatgtactcctgccggttcagccgccagtgcgtggtggacaaggacaagcggaaccagtgccgctactgccggctgaagaagtgcttccgcgccgggatgaagaaggaggccgtccagaacgagcgggaccgcatctccacccggcgcgcggcctacgaggacagcgcgctgcccagcatcaacgcgctcctgcaggccgaggtgctgtcccggcagatcgcggcgcccgtgtccggcatcaacggggacatccgcgccaagaagatcgccagcatcgccgacgtctgcgagagcatgaaggagcagctcctggtgctggtggagtgggcgaagtacatcccggccttctgcgagctccccctggacgaccaggtcgccctgctccgggcccacgccggcgagcacctcctgctgggggcgaccaagcgctccatggtgttcaaggacgtgctgctgctcggcaacgactacatcgtcccccggcactgccccgagctggccgagatgagccgcgtgtccatccggatcctggacgagctcgtgctgccgttccaggagctgcagatcgacgacaacgagtacgcctacctcaaggccatcatcttcttcgaccccgacgccaagggcctgagcgaccccgggaagatcaagcgcctgcgcgcgcaggtccaggtgagcctcgaggactacatcaacgaccggcagtacgactcccgcggccggttcggggagctgctgctcctgctgcccacgctccagagcatcacctggcagatgatcgagcagatccagttcatcaagctgttcggcatggcgaagatcgacaacctgctccaggagatgctgctgtgaggactagtccctgttcccagagcccacttttttttctttttttgaaataaaatagcctgtctttcagatctaaaaaaaaaaaaaaaaaaaaaaaaaaaaaaaaaaaaaaaaaaaaaaaaaaaaaaaaaaaaaaaaaaaaaaaaaaaaaaaaaaaaaaaaaaaaaaaaaaaa

SEQ ID NO: 4716 - RNA, 1376 nt, synthetic construct
  misc_feature 1..1376: note = mRNA a-1 (A100) (opt1) from Homo sapiens__NP_000448.3__HNF4A(1-375)(S87A_K106R_K108R_K126R_K 127R_S142A_S143A_S148A_T166A_S167A_S313A_S378A_T429A_T432A_ S436A_K458R)
  source 1..1376: mol_type = other RNA
aggagagtcccgcagtcggcgtccagcggctctgcttgttcgtgtgtgtgtcgttgcaggccttattcaagcttaccatgcgcctgagcaagaccctcgtggacatggacatggccgactactccgccgcgctggaccccgcctacaccacgctggagttcgagaacgtccaggtgctcaccatgggcaacgacaccagcccgtccgaggggaccaacctgaacgcccccaacagcctgggcgtgtccgccctctgcgccatctgcggggaccgggcgacgggcaagcactacggggccagctcctgcgacggctgcaagggcttcttccgccgggcggtccgcaagaaccacatgtactcctgccggttcagccgccagtgcgtggtggaccgcgaccggcggaaccagtgccgctactgccggctgaagaagtgcttccgcgccgggatgcgccgcgaggccgtccagaacgagcgggaccgcatctccacccggcgcgcggcctacgaggacagcgcgctgcccagcatcaacgcgctcctgcaggccgaggtgctgtcccggcagatcgcggcgcccgtgtccggcatcaacggggacatccgcgccaagaagatcgccagcatcgccgacgtctgcgagagcatgaaggagcagctcctggtgctggtggagtgggcgaagtacatcccggccttctgcgagctccccctggacgaccaggtcgccctgctccgggcccacgccggcgagcacctcctgctgggggcgaccaagcgctccatggtgttcaaggacgtgctgctgctcggcaacgactacatcgtcccccggcactgccccgagctggccgagatgagccgcgtgtccatccggatcctggacgagctcgtgctgccgttccaggagctgcagatcgacgacaacgagtacgcctacctcaaggccatcatcttcttcgaccccgacgccaagggcctgagcgaccccgggaagatcaagcgcctgcgcgcgcaggtccaggtgagcctcgaggactacatcaacgaccggcagtacgactcccgcggccggttcggggagctgctgctcctgctgcccacgctccagagcatcacctggcagatgatcgagcagatccagttcatcaagctgttcggcatggcgaagatcgacaacctgctccaggagatgctgctgtgaggactagtccctgttcccagagcccacttttttttctttttttgaaataaaatagcctgtctttcagatctaaaaaaaaaaaaaaaaaaaaaaaaaaaaaaaaaaaaaaaaaaaaaaaaaaaaaaaaaaaaaaaaaaaaaaaaaaaaaaaaaaaaaaaaaaaaaaaaaaaa

SEQ ID NO: 4717 - RNA, 1376 nt, synthetic construct
  misc_feature 1..1376: note = mRNA a-1 (A100) (opt1) from Homo sapiens__NP_000448.3__HNF4A(1-375)(S87A_K106R_K108R_K126R_K 127R)
  source 1..1376: mol_type = other RNA
aggagagtcccgcagtcggcgtccagcggctctgcttgttcgtgtgtgtgtcgttgcaggccttattcaagcttaccatgcgcctgagcaagaccctcgtggacatggacatggccgactactccgccgcgctggaccccgcctacaccacgctggagttcgagaacgtccaggtgctcaccatgggcaacgacaccagcccgtccgaggggaccaacctgaacgcccccaacagcctgggcgtgtccgccctctgcgccatctgcggggaccgggcgacgggcaagcactacggggccagctcctgcgacggctgcaagggcttcttccgccgggcggtccgcaagaaccacatgtactcctgccggttcagccgccagtgcgtggtggaccgcgaccggcggaaccagtgccgctactgccggctgaagaagtgcttccgcgccgggatgcgccgggaggccgtccagaacgagcgggaccgcatctccacccggcgcagctcctacgaggacagctccctgcccagcatcaacgcgctcctgcaggccgaggtgctgtcccggcagatcaccagccccgtgtccggcatcaacggggacatccgcgccaagaagatcgccagcatcgccgacgtctgcgagagcatgaaggagcagctcctggtgctggtggagtgggcgaagtacatcccggccttctgcgagctccccctggacgaccaggtcgccctgctccgggcccacgccggcgagcacctcctgctgggggcgaccaagcgctccatggtgttcaaggacgtgctgctgctcggcaacgactacatcgtcccccggcactgccccgagctggccgagatgagccgcgtgtccatccggatcctggacgagctcgtgctgccgttccaggagctgcagatcgacgacaacgagtacgcctacctcaaggccatcatcttcttcgaccccgacgccaagggcctgagcgaccccgggaagatcaagcgcctgcgctcccaggtccaggtgagcctcgaggactacatcaacgaccggcagtacgactcccgcggccggttcggggagctgctgctcctgctgcccacgctccagagcatcacctggcagatgatcgagcagatccagttcatcaagctgttcggcatggcgaagatcgacaacctgctccaggagatgctgctgtgaggactagtccctgttcccagagcccacttttttttctttttttgaaataaaatagcctgtctttcagatctaaaaaaaaaaaaaaaaaaaaaaaaaaaaaaaaaaaaaaaaaaaaaaaaaaaaaaaaaaaaaaaaaaaaaaaaaaaaaaaaaaaaaaaaaaaaaaaaaaaa

SEQ ID NO: 4718 - RNA, 1376 nt, synthetic construct
  misc_feature 1..1376: note = mRNA a-1 (A100) (opt1) from Homo sapiens__NP_000448.3__HNF4A(1-375)(S87A_K106R_K108R_K126R_K 127R_S142A_S143A_S148A_T166A_S167A_S313A_S378A_T429A_T432A_ S436A_K458R_S461A)
  source 1..1376: mol_type = other RNA
aggagagtcccgcagtcggcgtccagcggctctgcttgttcgtgtgtgtgtcgttgcaggccttattcaagcttaccatgcgcctgagcaagaccctcgtggacatggacatggccgactactccgccgcgctggaccccgcctacaccacgctggagttcgagaacgtccaggtgctcaccatgggcaacgacaccagcccgtccgaggggaccaacctgaacgcccccaacagcctgggcgtgtccgccctctgcgccatctgcggggaccgggcgacgggcaagcactacggggccagctcctgcgacggctgcaagggcttcttccgccgggcggtccgcaagaaccacatgtactcctgccggttcagccgccagtgcgtggtggaccgcgaccggcggaaccagtgccgctactgccggctgaagaagtgcttccgcgccgggatgcgccgggaggccgtccagaacgagcgggaccgcatctccacccggcgcgccgcctacgaggacagcgccctgcccagcatcaacgcgctcctgcaggccgaggtgctgtcccggcagatcgccgcgcccgtgtccggcatcaacggggacatccgcgccaagaagatcgccagcatcgccgacgtctgcgagagcatgaaggagcagctcctggtgctggtggagtgggcgaagtacatcccggccttctgcgagctccccctggacgaccaggtcgccctgctccgggcccacgccggcgagcacctcctgctgggggcgaccaagcgctccatggtgttcaaggacgtgctgctgctcggcaacgactacatcgtcccccggcactgccccgagctggccgagatgagccgcgtgtccatccggatcctggacgagctcgtgctgccgttccaggagctgcagatcgacgacaacgagtacgcctacctcaaggccatcatcttcttcgaccccgacgccaagggcctgagcgaccccgggaagatcaagcgcctgcgcgcccaggtccaggtgagcctcgaggactacatcaacgaccggcagtacgactcccgcggccggttcggggagctgctgctcctgctgcccacgctccagagcatcacctggcagatgatcgagcagatccagttcatcaagctgttcggcatggcgaagatcgacaacctgctccaggagatgctgctgtgaggactagtccctgttcccagagcccacttttttttctttttttgaaataaaatagcctgtctttcagatctaaaaaaaaaaaaaaaaaaaaaaaaaaaaaaaaaaaaaaaaaaaaaaaaaaaaaaaaaaaaaaaaaaaaaaaaaaaaaaaaaaaaaaaaaaaaaaaaaaaa

SEQ ID NO: 4719 - RNA, 1376 nt, synthetic construct; identical to SEQ ID NO: 4718
  misc_feature 1..1376: note = mRNA a-1 (A100) (opt1) from Homo sapiens__NP_000448.3__HNF4A(1-375)(S87A_K106R_K108R_K126R_K 127R_S142A_S143A_S148A_T166A_S167A_S313A_S378A_T429A_T432A_ S436A_K458R_S461E)
  source 1..1376: mol_type = other RNA

SEQ ID NO: 4720 - RNA, 1376 nt, synthetic construct
  misc_feature 1..1376: note = mRNA a-1 (A100) (opt1) from Homo sapiens__NP_000448.3__HNF4A(1-375)(S87A_K106R_K108R_K126R_K 127R_S142A_S143A_S148E_T166A_S167E_S313A_S378E_T429E_T432E_ S436E_K458R_S461E)
  source 1..1376: mol_type = other RNA
aggagagtcccgcagtcggcgtccagcggctctgcttgttcgtgtgtgtgtcgttgcaggccttattcaagcttaccatgcgcctgagcaagaccctcgtggacatggacatggccgactactccgccgcgctggaccccgcctacaccacgctggagttcgagaacgtccaggtgctcaccatgggcaacgacaccagcccgtccgaggggaccaacctgaacgcccccaacagcctgggcgtgtccgccctctgcgccatctgcggggaccgggcgacgggcaagcactacggggccagctcctgcgacggctgcaagggcttcttccgccgggcggtccgcaagaaccacatgtactcctgccggttcagccgccagtgcgtggtggaccgcgaccggcggaaccagtgccgctactgccggctgaagaagtgcttccgcgccgggatgcgccgggaggccgtccagaacgagcgggaccgcatctccacccggcgcgccgcctacgaggacagcgagctgcccagcatcaacgcgctcctgcaggccgaggtgctgtcccggcagatcgccgagcccgtgtccggcatcaacggggacatccgcgccaagaagatcgccagcatcgccgacgtctgcgagagcatgaaggagcagctcctggtgctggtggagtgggcgaagtacatcccggccttctgcgagctccccctggacgaccaggtcgccctgctccgggcccacgccggcgagcacctcctgctgggggcgaccaagcgctccatggtgttcaaggacgtgctgctgctcggcaacgactacatcgtcccccggcactgccccgagctggccgagatgagccgcgtgtccatccggatcctggacgagctcgtgctgccgttccaggagctgcagatcgacgacaacgagtacgcctacctcaaggccatcatcttcttcgaccccgacgccaagggcctgagcgaccccgggaagatcaagcgcctgcgcgcccaggtccaggtgagcctcgaggactacatcaacgaccggcagtacgactcccgcggccggttcggggagctgctgctcctgctgcccacgctccagagcatcacctggcagatgatcgagcagatccagttcatcaagctgttcggcatggcgaagatcgacaacctgctccaggagatgctgctgtgaggactagtccctgttcccagagcccacttttttttctttttttgaaataaaatagcctgtctttcagatctaaaaaaaaaaaaaaaaaaaaaaaaaaaaaaaaaaaaaaaaaaaaaaaaaaaaaaaaaaaaaaaaaaaaaaaaaaaaaaaaaaaaaaaaaaaaaaaaaaaa

SEQ ID NO: 4721 - RNA, 1376 nt, synthetic construct
  misc_feature 1..1376: note = mRNA a-1 (A100) (opt1) from Homo sapiens__NP_000448.3__HNF4A(1-375)(S87A_K106R_K108R_K126R_K 127R_S142A_S143A_S148A_T166A_S167A_K179R_K180R_S313A_S378A_ T429A_T432A_S436A_K458R_S461E)
  source 1..1376: mol_type = other RNA
aggagagtcccgcagtcggcgtccagcggctctgcttgttcgtgtgtgtgtcgttgcaggccttattcaagcttaccatgcgcctgagcaagaccctcgtggacatggacatggccgactactccgccgcgctggaccccgcctacaccacgctggagttcgagaacgtccaggtgctcaccatgggcaacgacaccagcccgtccgaggggaccaacctgaacgcccccaacagcctgggcgtgtccgccctctgcgccatctgcggggaccgggcgacgggcaagcactacggggccagctcctgcgacggctgcaagggcttcttccgccgggcggtccgcaagaaccacatgtactcctgccggttcagccgccagtgcgtggtggaccgcgaccggcggaaccagtgccgctactgccggctgaagaagtgcttccgcgccgggatgcgccgggaggccgtccagaacgagcgggaccgcatctccacccggcgcgccgcctacgaggacagcgccctgcccagcatcaacgcgctcctgcaggccgaggtgctgtcccggcagatcgccgcgcccgtgtccggcatcaacggggacatccgcgcccgccggatcgccagcatcgccgacgtctgcgagagcatgaaggagcagctcctggtgctggtggagtgggcgaagtacatcccggccttctgcgagctccccctggacgaccaggtcgccctgctccgggcccacgccggcgagcacctcctgctgggggcgaccaagcgctccatggtgttcaaggacgtgctgctgctcggcaacgactacatcgtcccccggcactgccccgagctggccgagatgagccgcgtgtccatccggatcctggacgagctcgtgctgccgttccaggagctgcagatcgacgacaacgagtacgcctacctcaaggccatcatcttcttcgaccccgacgccaagggcctgagcgaccccgggaagatcaagcgcctgcgcgcccaggtccaggtgagcctcgaggactacatcaacgaccggcagtacgactcccgcggccggttcggggagctgctgctcctgctgcccacgctccagagcatcacctggcagatgatcgagcagatccagttcatcaagctgttcggcatggcgaagatcgacaacctgctccaggagatgctgctgtgaggactagtccctgttcccagagcccacttttttttctttttttgaaataaaatagcctgtctttcagatctaaaaaaaaaaaaaaaaaaaaaaaaaaaaaaaaaaaaaaaaaaaaaaaaaaaaaaaaaaaaaaaaaaaaaaaaaaaaaaaaaaaaaaaaaaaaaaaaaaaa

SEQ ID NO: 4722 - RNA, 1376 nt, synthetic construct
  misc_feature 1..1376: note = mRNA a-1 (A100) (opt1) from Homo sapiens__NP_000448.3__HNF4A(1-375)(S87A_K106R_K108R_K126R_K 127R_S142A_S143A_S148A_T166A_S167A_K300R_K307R_K309R_S313A_ S378A_T429A_T432A_S436A_K458R_S461E)
  source 1..1376: mol_type = other RNA
aggagagtcccgcagtcggcgtccagcggctctgcttgttcgtgtgtgtgtcgttgcaggccttattcaagcttaccatgcgcctgagcaagaccctcgtggacatggacatggccgactactccgccgcgctggaccccgcctacaccacgctggagttcgagaacgtccaggtgctcaccatgggcaacgacaccagcccgtccgaggggaccaacctgaacgcccccaacagcctgggcgtgtccgccctctgcgccatctgcggggaccgggcgacgggcaagcactacggggccagctcctgcgacggctgcaagggcttcttccgccgggcggtccgcaagaaccacatgtactcctgccggttcagccgccagtgcgtggtggaccgcgaccggcggaaccagtgccgctactgccggctgaagaagtgcttccgcgccgggatgcgccgggaggccgtccagaacgagcgggaccgcatctccacccggcgcgccgcctacgaggacagcgccctgcccagcatcaacgcgctcctgcaggccgaggtgctgtcccggcagatcgccgcgcccgtgtccggcatcaacggggacatccgcgccaagaagatcgccagcatcgccgacgtctgcgagagcatgaaggagcagctcctggtgctggtggagtgggcgaagtacatcccggccttctgcgagctccccctggacgaccaggtcgccctgctccgggcccacgccggcgagcacctcctgctgggggcgaccaagcgctccatggtgttcaaggacgtgctgctgctcggcaacgactacatcgtcccccggcactgccccgagctggccgagatgagccgcgtgtccatccggatcctggacgagctcgtgctgccgttccaggagctgcagatcgacgacaacgagtacgcctacctcaaggccatcatcttcttcgaccccgacgcccgcggcctgagcgaccccgggcggatccgccgcctgcgcgcccaggtccaggtgagcctcgaggactacatcaacgaccggcagtacgactcccgcggccggttcggggagctgctgctcctgctgcccacgctccagagcatcacctggcagatgatcgagcagatccagttcatcaagctgttcggcatggcgaagatcgacaacctgctccaggagatgctgctgtgaggactagtccctgttcccagagcccacttttttttctttttttgaaataaaatagcctgtctttcagatctaaaaaaaaaaaaaaaaaaaaaaaaaaaaaaaaaaaaaaaaaaaaaaaaaaaaaaaaaaaaaaaaaaaaaaaaaaaaaaaaaaaaaaaaaaaaaaaaaaaa

SEQ ID NO: 4723 - RNA, 1376 nt, synthetic construct; identical to SEQ ID NO: 4718
  misc_feature 1..1376: note = mRNA a-1 (A100) (opt1) from Homo sapiens__NP_000448.3__HNF4A(1-375)(S87A_K106R_K108R_K126R_K 127R_S142A_S143A_S148A_T166A_S167A_S313A_S378A_T429A_T432A_ S436A_K447R_K458R_S461E_K470R)
  source 1..1376: mol_type = other RNA

SEQ ID NO: 4724 - RNA, 1376 nt, synthetic construct
  misc_feature 1..1376: note = mRNA a-1 (A100) (opt1) from Homo sapiens__NP_000448.3__HNF4A(1-375)(S87A_K106R_K108R_K126R_K 127R_S142A_S143A_S148A_T166A_S167A_K179R_K180R_K234R_K300R_ K307R_K309R_S313A_S378A_T429A_T432A_S436A_K447R_K458R_S461E _K470R)
  source 1..1376: mol_type = other RNA
aggagagtcccgcagtcggcgtccagcggctctgcttgttcgtgtgtgtgtcgttgcaggccttattcaagcttaccatgcgcctgagcaagaccctcgtggacatggacatggccgactactccgccgcgctggaccccgcctacaccacgctggagttcgagaacgtccaggtgctcaccatgggcaacgacaccagcccgtccgaggggaccaacctgaacgcccccaacagcctgggcgtgtccgccctctgcgccatctgcggggaccgggcgacgggcaagcactacggggccagctcctgcgacggctgcaagggcttcttccgccgggcggtccgcaagaaccacatgtactcctgccggttcagccgccagtgcgtggtggaccgcgaccggcggaaccagtgccgctactgccggctgaagaagtgcttccgcgccgggatgcgccgggaggccgtccagaacgagcgggaccgcatctccacccggcgcgccgcctacgaggacagcgccctgcccagcatcaacgcgctcctgcaggccgaggtgctgtcccggcagatcgccgcgcccgtgtccggcatcaacggggacatccgcgcccgccggatcgccagcatcgccgacgtctgcgagagcatgaaggagcagctcctggtgctggtggagtgggcgaagtacatcccggccttctgcgagctccccctggacgaccaggtcgccctgctccgggcccacgccggcgagcacctcctgctgggggcgacccggcgctccatggtgttcaaggacgtgctgctgctcggcaacgactacatcgtcccccggcactgccccgagctggccgagatgagccgcgtgtccatccggatcctggacgagctcgtgctgccgttccaggagctgcagatcgacgacaacgagtacgcctacctcaaggccatcatcttcttcgaccccgacgcccgcggcctgagcgaccccgggcggatccgccgcctgcgcgcccaggtccaggtgagcctcgaggactacatcaacgaccggcagtacgactcccgcggccggttcggggagctgctgctcctgctgcccacgctccagagcatcacctggcagatgatcgagcagatccagttcatcaagctgttcggcatggcgaagatcgacaacctgctccaggagatgctgctgtgaggactagtccctgttcccagagcccacttttttttctttttttgaaataaaatagcctgtctttcagatctaaaaaaaaaaaaaaaaaaaaaaaaaaaaaaaaaaaaaaaaaaaaaaaaaaaaaaaaaaaaaaaaaaaaaaaaaaaaaaaaaaaaaaaaaaaaaaaaaaaa

SEQ ID NO: 4725 - RNA, 1376 nt, synthetic construct
  misc_feature 1..1376: note = mRNA a-1 (A100) (opt1) from Homo sapiens__NP_000448.3__HNF4A(1-375)(S87A_S95A_S99A_K106R_K10 8R_K126R_K127R_S142A_S143A_S148A_T166A_S167A_S313A_S378A_T4 29A_T432A_S436A_K458R_S461E)
  source 1..1376: mol_type = other RNA
aggagagtcccgcagtcggcgtccagcggctctgcttgttcgtgtgtgtgtcgttgcaggccttattcaagcttaccatgcgcctgagcaagaccctcgtggacatggacatggccgactactccgccgcgctggaccccgcctacaccacgctggagttcgagaacgtccaggtgctcaccatgggcaacgacaccagcccgtccgaggggaccaacctgaacgcccccaacagcctgggcgtgtccgccctctgcgccatctgcggggaccgggcgacgggcaagcactacggggccagctcctgcgacggctgcaagggcttcttccgccgggcggtccgcaagaaccacatgtacgcctgccggttcgcccgccagtgcgtggtggaccgcgaccggcggaaccagtgccgctactgccggctgaagaagtgcttccgcgccgggatgcgccgggaggccgtccagaacgagcgggaccgcatctccacccggcgcgccgcctacgaggacagcgccctgcccagcatcaacgcgctcctgcaggccgaggtgctgtcccggcagatcgccgcgcccgtgtccggcatcaacggggacatccgcgccaagaagatcgccagcatcgccgacgtctgcgagagcatgaaggagcagctcctggtgctggtggagtgggcgaagtacatcccggccttctgcgagctccccctggacgaccaggtcgccctgctccgggcccacgccggcgagcacctcctgctgggggcgaccaagcgctccatggtgttcaaggacgtgctgctgctcggcaacgactacatcgtcccccggcactgccccgagctggccgagatgagccgcgtgtccatccggatcctggacgagctcgtgctgccgttccaggagctgcagatcgacgacaacgagtacgcctacctcaaggccatcatcttcttcgaccccgacgccaagggcctgagcgaccccgggaagatcaagcgcctgcgcgcccaggtccaggtgagcctcgaggactacatcaacgaccggcagtacgactcccgcggccggttcggggagctgctgctcctgctgcccacgctccagagcatcacctggcagatgatcgagcagatccagttcatcaagctgttcggcatggcgaagatcgacaacctgctccaggagatgctgctgtgaggactagtccctgttcccagagcccacttttttttctttttttgaaataaaatagcctgtctttcagatctaaaaaaaaaaaaaaaaaaaaaaaaaaaaaaaaaaaaaaaaaaaaaaaaaaaaaaaaaaaaaaaaaaaaaaaaaaaaaaaaaaaaaaaaaaaaaaaaaaaa

SEQ ID NO: 4726 - RNA, 1376 nt, synthetic construct
  misc_feature 1..1376: note = mRNA a-1 (A100) (opt1) from Homo sapiens__NP_000448.3__HNF4A(1-375)(S87A_K106R_K108R_K126R_K 127R_S138A_T139A_S142A_S143A_S148A_T166A_S167A_S313A_S378A_ T429A_T432A_S436A_K458R_S461E)
  source 1..1376: mol_type = other RNA
aggagagtcccgcagtcggcgtccagcggctctgcttgttcgtgtgtgtgtcgttgcaggccttattcaagcttaccatgcgcctgagcaagaccctcgtggacatggacatggccgactactccgccgcgctggaccccgcctacaccacgctggagttcgagaacgtccaggtgctcaccatgggcaacgacaccagcccgtccgaggggaccaacctgaacgcccccaacagcctgggcgtgtccgccctctgcgccatctgcggggaccgggcgacgggcaagcactacggggccagctcctgcgacggctgcaagggcttcttccgccgggcggtccgcaagaaccacatgtactcctgccggttcagccgccagtgcgtggtggaccgcgaccggcggaaccagtgccgctactgccggctgaagaagtgcttccgcgccgggatgcgccgggaggccgtccagaacgagcgggaccgcatcgccgcccggcgcgccgcctacgaggacagcgccctgcccagcatcaacgcgctcctgcaggccgaggtgctgtcccggcagatcgccgcgcccgtgtccggcatcaacggggacatccgcgccaagaagatcgccagcatcgccgacgtctgcgagagcatgaaggagcagctcctggtgctggtggagtgggcgaagtacatcccggccttctgcgagctccccctggacgaccaggtcgccctgctccgggcccacgccggcgagcacctcctgctgggggcgaccaagcgctccatggtgttcaaggacgtgctgctgctcggcaacgactacatcgtcccccggcactgccccgagctggccgagatgagccgcgtgtccatccggatcctggacgagctcgtgctgccgttccaggagctgcagatcgacgacaacgagtacgcctacctcaaggccatcatcttcttcgaccccgacgccaagggcctgagcgaccccgggaagatcaagcgcctgcgcgcccaggtccaggtgagcctcgaggactacatcaacgaccggcagtacgactcccgcggccggttcggggagctgctgctcctgctgcccacgctccagagcatcacctggcagatgatcgagcagatccagttcatcaagctgttcggcatggcgaagatcgacaacctgctccaggagatgctgctgtgaggactagtccctgttcccagagcccacttttttttctttttttgaaataaaatagcctgtctttcagatctaaaaaaaaaaaaaaaaaaaaaaaaaaaaaaaaaaaaaaaaaaaaaaaaaaaaaaaaaaaaaaaaaaaaaaaaaaaaaaaaaaaaaaaaaaaaaaaaaaaa

SEQ ID NO: 4727 - RNA, 1376 nt, synthetic construct
  misc_feature 1..1376: note = mRNA a-1 (A100) (opt1) from Homo sapiens__NP_000448.3__HNF4A(1-375)(S87A_S95A_S99A_K106R_K10 8R_K126R_K127R_S138A_T139A_S142A_S143A_S148A_T166A_S167A_S3 13A_S378A_T429A_T432A_S436A_K458R_S461E)
  source 1..1376: mol_type = other RNA
aggagagtcccgcagtcggcgtccagcggctctgcttgttcgtgtgtgtgtcgttgcaggccttattcaagcttaccatgcgcctgagcaagaccctcgtggacatggacatggccgactactccgccgcgctggaccccgcctacaccacgctggagttcgagaacgtccaggtgctcaccatgggcaacgacaccagcccgtccgaggggaccaacctgaacgcccccaacagcctgggcgtgtccgccctctgcgccatctgcggggaccgggcgacgggcaagcactacggggccagctcctgcgacggctgcaagggcttcttccgccgggcggtccgcaagaaccacatgtacgcctgccggttcgcccgccagtgcgtggtggaccgcgaccggcggaaccagtgccgctactgccggctgaagaagtgcttccgcgccgggatgcgccgggaggccgtccagaacgagcgggaccgcatcgccgcccggcgcgccgcctacgaggacagcgccctgcccagcatcaacgcgctcctgcaggccgaggtgctgtcccggcagatcgccgcgcccgtgtccggcatcaacggggacatccgcgccaagaagatcgccagcatcgccgacgtctgcgagagcatgaaggagcagctcctggtgctggtggagtgggcgaagtacatcccggccttctgcgagctccccctggacgaccaggtcgccctgctccgggcccacgccggcgagcacctcctgctgggggcgaccaagcgctccatggtgttcaaggacgtgctgctgctcggcaacgactacatcgtcccccggcactgccccgagctggccgagatgagccgcgtgtccatccggatcctggacgagctcgtgctgccgttccaggagctgcagatcgacgacaacgagtacgcctacctcaaggccatcatcttcttcgaccccgacgccaagggcctgagcgaccccgggaagatcaagcgcctgcgcgcccaggtccaggtgagcctcgaggactacatcaacgaccggcagtacgactcccgcggccggttcggggagctgctgctcctgctgcccacgctccagagcatcacctggcagatgatcgagcagatccagttcatcaagctgttcggcatggcgaagatcgacaacctgctccaggagatgctgctgtgaggactagtccctgttcccagagcccacttttttttctttttttgaaataaaatagcctgtctttcagatctaaaaaaaaaaaaaaaaaaaaaaaaaaaaaaaaaaaaaaaaaaaaaaaaaaaaaaaaaaaaaaaaaaaaaaaaaaaaaaaaaaaaaaaaaaaaaaaaaaaa

SEQ ID NO: 4728 - RNA, 1376 nt, synthetic construct; identical to SEQ ID NO: 4679
  misc_feature 1..1376: note = mRNA a-1 (A100) (opt1) from Homo sapiens__NP_000448.3__HNF4A(1-375)
  source 1..1376: mol_type = other RNA

SEQ ID NO: 4729 - RNA, 1376 nt, synthetic construct
  misc_feature 1..1376: note = mRNA a-1 (A100) (opt1) from Homo sapiens__NP_000448.3__HNF4A(1-375)(S313A)
  source 1..1376: mol_type = other RNA
aggagagtcccgcagtcggcgtccagcggctctgcttgttcgtgtgtgtgtcgttgcaggccttattcaagcttaccatgcgcctgagcaagaccctcgtggacatggacatggccgactactccgccgcgctggaccccgcctacaccacgctggagttcgagaacgtccaggtgctcaccatgggcaacgacaccagcccgtccgaggggaccaacctgaacgcccccaacagcctgggcgtgtccgccctctgcgccatctgcggggaccgggcgacgggcaagcactacggggccagctcctgcgacggctgcaagggcttcttccgccggagcgtccgcaagaaccacatgtactcctgccggttcagccgccagtgcgtggtggacaaggacaagcggaaccagtgccgctactgccggctgaagaagtgcttccgcgccgggatgaagaaggaggccgtccagaacgagcgggaccgcatctccacccggcgcagctcctacgaggacagctccctgcccagcatcaacgcgctcctgcaggccgaggtgctgtcccggcagatcaccagccccgtgtccggcatcaacggggacatccgcgccaagaagatcgccagcatcgccgacgtctgcgagagcatgaaggagcagctcctggtgctggtggagtgggcgaagtacatcccggccttctgcgagctccccctggacgaccaggtcgccctgctccgggcccacgccggcgagcacctcctgctgggggcgaccaagcgctccatggtgttcaaggacgtgctgctgctcggcaacgactacatcgtcccccggcactgccccgagctggccgagatgagccgcgtgtccatccggatcctggacgagctcgtgctgccgttccaggagctgcagatcgacgacaacgagtacgcctacctcaaggccatcatcttcttcgaccccgacgccaagggcctgagcgaccccgggaagatcaagcgcctgcgcgcgcaggtccaggtgtccctcgaggactacatcaacgaccggcagtacgacagccgcggccggttcggggagctgctgctcctgctgcccacgctccagtccatcacctggcagatgatcgagcagatccagttcatcaagctgttcggcatggccaagatcgacaacctgctccaggagatgctgctgtgaggactagtccctgttcccagagcccacttttttttctttttttgaaataaaatagcctgtctttcagatctaaaaaaaaaaaaaaaaaaaaaaaaaaaaaaaaaaaaaaaaaaaaaaaaaaaaaaaaaaaaaaaaaaaaaaaaaaaaaaaaaaaaaaaaaaaaaaaaaaaa

SEQ ID NO: 4730 - RNA, 1376 nt, synthetic construct
  misc_feature 1..1376: note = mRNA a-1 (A100) (opt1) from Homo sapiens__NP_000448.3__HNF4A(1-375)(S313E)
  source 1..1376: mol_type = other RNA
aggagagtcccgcagtcggcgtccagcggctctgcttgttcgtgtgtgtgtcgttgcaggccttattcaagcttaccatgcgcctgagcaagaccctcgtggacatggacatggccgactactccgccgcgctggaccccgcctacaccacgctggagttcgagaacgtccaggtgctcaccatgggcaacgacaccagcccgtccgaggggaccaacctgaacgcccccaacagcctgggcgtgtccgccctctgcgccatctgcggggaccgggcgacgggcaagcactacggggccagctcctgcgacggctgcaagggcttcttccgccggagcgtccgcaagaaccacatgtactcctgccggttcagccgccagtgcgtggtggacaaggacaagcggaaccagtgccgctactgccggctgaagaagtgcttccgcgccgggatgaagaaggaggccgtccagaacgagcgggaccgcatctccacccggcgcagctcctacgaggacagctccctgcccagcatcaacgcgctcctgcaggccgaggtgctgtcccggcagatcaccagccccgtgtccggcatcaacggggacatccgcgccaagaagatcgccagcatcgccgacgtctgcgagagcatgaaggagcagctcctggtgctggtggagtgggcgaagtacatcccggccttctgcgagctccccctggacgaccaggtcgccctgctccgggcccacgccggcgagcacctcctgctgggggcgaccaagcgctccatggtgttcaaggacgtgctgctgctcggcaacgactacatcgtcccccggcactgccccgagctggccgagatgagccgcgtgtccatccggatcctggacgagctcgtgctgccgttccaggagctgcagatcgacgacaacgagtacgcctacctcaaggccatcatcttcttcgaccccgacgccaagggcctgagcgaccccgggaagatcaagcgcctgcgcgagcaggtccaggtgtccctcgaggactacatcaacgaccggcagtacgacagccgcggccggttcggggagctgctgctcctgctgcccacgctccagtccatcacctggcagatgatcgagcagatccagttcatcaagctgttcggcatggcgaagatcgacaacctgctccaggagatgctgctgtgaggactagtccctgttcccagagcccacttttttttctttttttgaaataaaatagcctgtctttcagatctaaaaaaaaaaaaaaaaaaaaaaaaaaaaaaaaaaaaaaaaaaaaaaaaaaaaaaaaaaaaaaaaaaaaaaaaaaaaaaaaaaaaaaaaaaaaaaaaaaaa

SEQ ID NO: 4731 - RNA, 1376 nt, synthetic construct
  misc_feature 1..1376: note = mRNA a-1 (A100) (opt1) from Homo sapiens__NP_000448.3__HNF4A(1-375)(S142A_S143A)
  source 1..1376: mol_type = other RNA
aggagagtcccgcagtcggcgtccagcggctctgcttgttcgtgtgtgtgtcgttgcaggccttattcaagcttaccatgcgcctgagcaagaccctcgtggacatggacatggccgactactccgccgcgctggaccccgcctacaccacgctggagttcgagaacgtccaggtgctcaccatgggcaacgacaccagcccgtccgaggggaccaacctgaacgcccccaacagcctgggcgtgtccgccctctgcgccatctgcggggaccgggcgacgggcaagcactacggggccagctcctgcgacggctgcaagggcttcttccgccggagcgtccgcaagaaccacatgtactcctgccggttcagccgccagtgcgtggtggacaaggacaagcggaaccagtgccgctactgccggctgaagaagtgcttccgcgccgggatgaagaaggaggccgtccagaacgagcgggaccgcatctccacccggcgcgcggcctacgaggacagctccctgcccagcatcaacgccctcctgcaggccgaggtgctgtcccggcagatcaccagccccgtgtccggcatcaacggggacatccgcgccaagaagatcgcgagcatcgccgacgtctgcgagtccatgaaggagcagctcctggtgctggtggagtgggccaagtacatcccggccttctgcgagctccccctggacgaccaggtcgccctgctccgggcgcacgccggcgagcacctcctgctgggggccaccaagcgcagcatggtgttcaaggacgtgctgctgctcggcaacgactacatcgtcccccggcactgccccgagctggccgagatgagccgcgtgtccatccggatcctggacgagctcgtgctgccgttccaggagctgcagatcgacgacaacgagtacgcctacctcaaggcgatcatcttcttcgaccccgacgccaagggcctgagcgaccccgggaagatcaagcgcctgcgctcccaggtccaggtgagcctcgaggactacatcaacgaccggcagtacgactcccgcggccggttcggggagctgctgctcctgctgcccacgctccagagcatcacctggcagatgatcgagcagatccagttcatcaagctgttcggcatggccaagatcgacaacctgctccaggagatgctgctgtgaggactagtccctgttcccagagcccacttttttttctttttttgaaataaaatagcctgtctttcagatctaaaaaaaaaaaaaaaaaaaaaaaaaaaaaaaaaaaaaaaaaaaaaaaaaaaaaaaaaaaaaaaaaaaaaaaaaaaaaaaaaaaaaaaaaaaaaaaaaaaa

SEQ ID NO: 4732 - RNA, 1376 nt, synthetic construct
  misc_feature 1..1376: note = mRNA a-1 (A100) (opt1) from Homo sapiens__NP_000448.3__HNF4A(1-375)(S142E_S143E)
  source 1..1376: mol_type = other RNA
aggagagtcccgcagtcggcgtccagcggctctgcttgttcgtgtgtgtgtcgttgcaggccttattcaagcttaccatgcgcctgagcaagaccctcgtggacatggacatggccgactactccgccgcgctggaccccgcctacaccacgctggagttcgagaacgtccaggtgctcaccatgggcaacgacaccagcccgtccgaggggaccaacctgaacgcccccaacagcctgggcgtgtccgccctctgcgccatctgcggggaccgggcgacgggcaagcactacggggccagctcctgcgacggctgcaagggcttcttccgccggagcgtccgcaagaaccacatgtactcctgccggttcagccgccagtgcgtggtggacaaggacaagcggaaccagtgccgctactgccggctgaagaagtgcttccgcgccgggatgaagaaggaggccgtccagaacgagcgggaccgcatctccacccggcgcgaggagtacgaggacagctccctgcccagcatcaacgcgctcctgcaggccgaggtgctgtcccggcagatcaccagccccgtgtccggcatcaacggggacatccgcgccaagaagatcgccagcatcgccgacgtctgcgagtccatgaaggagcagctcctggtgctggtggagtgggcgaagtacatcccggccttctgcgagctccccctggacgaccaggtcgccctgctccgggcccacgccggcgagcacctcctgctgggggcgaccaagcgcagcatggtgttcaaggacgtgctgctgctcggcaacgactacatcgtcccccggcactgccccgagctggccgagatgagccgcgtgtccatccggatcctggacgagctcgtgctgccgttccaggagctgcagatcgacgacaacgagtacgcctacctcaaggccatcatcttcttcgaccccgacgccaagggcctgagcgaccccgggaagatcaagcgcctgcgctcccaggtccaggtgagcctcgaggactacatcaacgaccggcagtacgactcccgcggccggttcggggagctgctgctcctgctgcccacgctccagagcatcacctggcagatgatcgagcagatccagttcatcaagctgttcggcatggcgaagatcgacaacctgctccaggagatgctgctgtgaggactagtccctgttcccagagcccacttttttttctttttttgaaataaaatagcctgtctttcagatctaaaaaaaaaaaaaaaaaaaaaaaaaaaaaaaaaaaaaaaaaaaaaaaaaaaaaaaaaaaaaaaaaaaaaaaaaaaaaaaaaaaaaaaaaaaaaaaaaaaa

SEQ ID NO: 4733 - RNA, 1376 nt, synthetic construct
  misc_feature 1..1376: note = mRNA a-1 (A100) (opt1) from Homo sapiens__NP_000448.3__HNF4A(1-375)(S143A)
  source 1..1376: mol_type = other RNA
aggagagtcccgcagtcggcgtccagcggctctgcttgttcgtgtgtgtgtcgttgcaggccttattcaagcttaccatgcgcctgagcaagaccctcgtggacatggacatggccgactactccgccgcgctggaccccgcctacaccacgctggagttcgagaacgtccaggtgctcaccatgggcaacgacaccagcccgtccgaggggaccaacctgaacgcccccaacagcctgggcgtgtccgccctctgcgccatctgcggggaccgggcgacgggcaagcactacggggccagctcctgcgacggctgcaagggcttcttccgccggagcgtccgcaagaaccacatgtactcctgccggttcagccgccagtgcgtggtggacaaggacaagcggaaccagtgccgctactgccggctgaagaagtgcttccgcgccgggatgaagaaggaggccgtccagaacgagcgggaccgcatctccacccggcgcagcgcgtacgaggactccagcctgccctccatcaacgccctcctgcaggccgaggtgctgagccggcagatcacctcccccgtgagcggcatcaacggggacatccgcgccaagaagatcgcctccatcgcggacgtctgcgagagcatgaaggagcagctcctggtgctggtggagtgggccaagtacatcccggccttctgcgagctccccctggacgaccaggtcgccctgctccgggcccacgcgggcgagcacctcctgctgggggccaccaagcgcagcatggtgttcaaggacgtgctgctgctcggcaacgactacatcgtcccccggcactgccccgagctggccgagatgtcccgcgtgagcatccggatcctggacgagctcgtgctgccgttccaggagctgcagatcgacgacaacgagtacgcctacctcaaggccatcatcttcttcgaccccgacgcgaagggcctgtccgaccccgggaagatcaagcgcctgcgcagccaggtccaggtgtccctcgaggactacatcaacgaccggcagtacgacagccgcggccggttcggggagctgctgctcctgctgcccacgctccagtccatcacctggcagatgatcgagcagatccagttcatcaagctgttcggcatggccaagatcgacaacctgctccaggagatgctgctgtgaggactagtccctgttcccagagcccacttttttttctttttttgaaataaaatagcctgtctttcagatctaaaaaaaaaaaaaaaaaaaaaaaaaaaaaaaaaaaaaaaaaaaaaaaaaaaaaaaaaaaaaaaaaaaaaaaaaaaaaaaaaaaaaaaaaaaaaaaaaaaa

SEQ ID NO: 4734 - RNA, 1376 nt, synthetic construct
  misc_feature 1..1376: note = mRNA a-1 (A100) (opt1) from Homo sapiens__NP_000448.3__HNF4A(1-375)(T166A)
  source 1..1376: mol_type = other RNA
aggagagtcccgcagtcggcgtccagcggctctgcttgttcgtgtgtgtgtcgttgcaggccttattcaagcttaccatgcgcctgagcaagaccctcgtggacatggacatggccgactactccgccgcgctggaccccgcctacaccacgctggagttcgagaacgtccaggtgctcaccatgggcaacgacaccagcccgtccgaggggaccaacctgaacgcccccaacagcctgggcgtgtccgccctctgcgccatctgcggggaccgggcgacgggcaagcactacggggccagctcctgcgacggctgcaagggcttcttccgccggagcgtccgcaagaaccacatgtactcctgccggttcagccgccagtgcgtggtggacaaggacaagcggaaccagtgccgctactgccggctgaagaagtgcttccgcgccgggatgaagaaggaggccgtccagaacgagcgggaccgcatctccacccggcgcagctcctacgaggacagctccctgcccagcatcaacgcgctcctgcaggccgaggtgctgtcccggcagatcgccagccccgtgtccggcatcaacggggacatccgcgccaagaagatcgccagcatcgcggacgtctgcgagagcatgaaggagcagctcctggtgctggtggagtgggccaagtacatcccggccttctgcgagctccccctggacgaccaggtcgccctgctccgggcccacgcgggcgagcacctcctgctgggggccaccaagcgctccatggtgttcaaggacgtgctgctgctcggcaacgactacatcgtcccccggcactgccccgagctggccgagatgagccgcgtgtccatccggatcctggacgagctcgtgctgccgttccaggagctgcagatcgacgacaacgagtacgcctacctcaaggccatcatcttcttcgaccccgacgcgaagggcctgagcgaccccgggaagatcaagcgcctgcgctcccaggtccaggtgagcctcgaggactacatcaacgaccggcagtacgactcccgcggccggttcggggagctgctgctcctgctgcccaccctccagagcatcacgtggcagatgatcgagcagatccagttcatcaagctgttcggcatggccaagatcgacaacctgctccaggagatgctgctgtgaggactagtccctgttcccagagcccacttttttttctttttttgaaataaaatagcctgtctttcagatctaaaaaaaaaaaaaaaaaaaaaaaaaaaaaaaaaaaaaaaaaaaaaaaaaaaaaaaaaaaaaaaaaaaaaaaaaaaaaaaaaaaaaaaaaaaaaaaaaaaa

SEQ ID NO: 4735 - RNA, 1376 nt, synthetic construct
  misc_feature 1..1376: note = mRNA a-1 (A100) (opt1) from Homo sapiens__NP_000448.3__HNF4A(1-375)(S167E)
  source 1..1376: mol_type = other RNA
aggagagtcccgcagtcggcgtccagcggctctgcttgttcgtgtgtgtgtcgttgcaggccttattcaagcttaccatgcgcctgagcaagaccctcgtggacatggacatggccgactactccgccgcgctggaccccgcctacaccacgctggagttcgagaacgtccaggtgctcaccatgggcaacgacaccagcccgtccgaggggaccaacctgaacgcccccaacagcctgggcgtgtccgccctctgcgccatctgcggggaccgggcgacgggcaagcactacggggccagctcctgcgacggctgcaagggcttcttccgccggagcgtccgcaagaaccacatgtactcctgccggttcagccgccagtgcgtggtggacaaggacaagcggaaccagtgccgctactgccggctgaagaagtgcttccgcgccgggatgaagaaggaggccgtccagaacgagcgggaccgcatctccacccggcgcagctcctacgaggacagctccctgcccagcatcaacgcgctcctgcaggccgaggtgctgtcccggcagatcaccgagcccgtgagcggcatcaacggggacatccgcgccaagaagatcgcctccatcgccgacgtctgcgagagcatgaaggagcagctcctggtgctggtggagtgggcgaagtacatcccggccttctgcgagctccccctggacgaccaggtcgccctgctccgggcccacgccggcgagcacctcctgctgggggcgaccaagcgcagcatggtgttcaaggacgtgctgctgctcggcaacgactacatcgtcccccggcactgccccgagctggccgagatgtcccgcgtgagcatccggatcctggacgagctcgtgctgccgttccaggagctgcagatcgacgacaacgagtacgcctacctcaaggccatcatcttcttcgaccccgacgccaagggcctgtccgaccccgggaagatcaagcgcctgcgcagccaggtccaggtgtccctcgaggactacatcaacgaccggcagtacgacagccgcggccggttcggggagctgctgctcctgctgcccacgctccagtccatcacctggcagatgatcgagcagatccagttcatcaagctgttcggcatggcgaagatcgacaacctgctccaggagatgctgctgtgaggactagtccctgttcccagagcccacttttttttctttttttgaaataaaatagcctgtctttcagatctaaaaaaaaaaaaaaaaaaaaaaaaaaaaaaaaaaaaaaaaaaaaaaaaaaaaaaaaaaaaaaaaaaaaaaaaaaaaaaaaaaaaaaaaaaaaaaaaaaaa

SEQ ID NO: 4736 - RNA, 1376 nt, synthetic construct
  misc_feature 1..1376: note = mRNA a-1 (A100) (opt1) from Homo sapiens__NP_000448.3__HNF4A(1-375)(S167A)
  source 1..1376: mol_type = other RNA
aggagagtcccgcagtcggcgtccagcggctctgcttgttcgtgtgtgtgtcgttgcaggccttattcaagcttaccatgcgcctgagcaagaccctcgtggacatggacatggccgactactccgccgcgctggaccccgcctacaccacgctggagttcgagaacgtccaggtgctcaccatgggcaacgacaccagcccgtccgaggggaccaacctgaacgcccccaacagcctgggcgtgtccgccctctgcgccatctgcggggaccgggcgacgggcaagcactacggggccagctcctgcgacggctgcaagggcttcttccgccggagcgtccgcaagaaccacatgtactcctgccggttcagccgccagtgcgtggtggacaaggacaagcggaaccagtgccgctactgccggctgaagaagtgcttccgcgccgggatgaagaaggaggccgtccagaacgagcgggaccgcatctccacccggcgcagctcctacgaggacagctccctgcccagcatcaacgcgctcctgcaggccgaggtgctgtcccggcagatcaccgcccccgtgagcggcatcaacggggacatccgcgccaagaagatcgcctccatcgcggacgtctgcgagagcatgaaggagcagctcctggtgctggtggagtgggccaagtacatcccggccttctgcgagctccccctggacgaccaggtcgccctgctccgggcccacgcgggcgagcacctcctgctgggggccaccaagcgcagcatggtgttcaaggacgtgctgctgctcggcaacgactacatcgtcccccggcactgccccgagctggccgagatgtcccgcgtgagcatccggatcctggacgagctcgtgctgccgttccaggagctgcagatcgacgacaacgagtacgcctacctcaaggccatcatcttcttcgaccccgacgcgaagggcctgtccgaccccgggaagatcaagcgcctgcgcagccaggtccaggtgtccctcgaggactacatcaacgaccggcagtacgacagccgcggccggttcggggagctgctgctcctgctgcccacgctccagtccatcacctggcagatgatcgagcagatccagttcatcaagctgttcggcatggccaagatcgacaacctgctccaggagatgctgctgtgaggactagtccctgttcccagagcccacttttttttctttttttgaaataaaatagcctgtctttcagatctaaaaaaaaaaaaaaaaaaaaaaaaaaaaaaaaaaaaaaaaaaaaaaaaaaaaaaaaaaaaaaaaaaaaaaaaaaaaaaaaaaaaaaaaaaaaaaaaaaaa

SEQ ID NO: 4737 - RNA, 1376 nt, synthetic construct; identical to SEQ ID NO: 4736
  misc_feature 1..1376: note = mRNA a-1 (A100) (opt1) from Homo sapiens__NP_000448.3__HNF4A(1-375)(S167A_S378A_T429A_T432A_ S436A)
  source 1..1376: mol_type = other RNA

SEQ ID NO: 4738 - RNA, 1376 nt, synthetic construct; identical to SEQ ID NO: 4735
  misc_feature 1..1376: note = mRNA a-1 (A100) (opt1) from Homo sapiens__NP_000448.3__HNF4A(1-375)(S167E_S378E_T429E_T432E_ S436E)
  source 1..1376: mol_type = other RNA

SEQ ID NO: 4739 - RNA, 1376 nt, synthetic construct
  misc_feature 1..1376: note = mRNA a-1 (A100) (opt1) from Homo sapiens__NP_000448.3__HNF4A(1-375)(S87A)
  source 1..1376: mol_type = other RNA
aggagagtcccgcagtcggcgtccagcggctctgcttgttcgtgtgtgtgtcgttgcaggccttattcaagcttaccatgcgcctgagcaagaccctcgtggacatggacatggccgactactccgccgcgctggaccccgcctacaccacgctggagttcgagaacgtccaggtgctcaccatgggcaacgacaccagcccgtccgaggggaccaacctgaacgcccccaacagcctgggcgtgtccgccctctgcgccatctgcggggaccgggcgacgggcaagcactacggggccagctcctgcgacggctgcaagggcttcttccgccgggccgtccgcaagaaccacatgtacagctgccggttctcccgccagtgcgtggtggacaaggacaagcggaaccagtgccgctactgccggctgaagaagtgcttccgcgccgggatgaagaaggaggcggtccagaacgagcgggaccgcatcagcacccggcgctccagctacgaggactccagcctgccctccatcaacgccctcctgcaggccgaggtgctgagccggcagatcacctcccccgtgagcggcatcaacggggacatccgcgccaagaagatcgcctccatcgcggacgtctgcgagagcatgaaggagcagctcctggtgctggtggagtgggccaagtacatcccggccttctgcgagctccccctggacgaccaggtcgccctgctccgggcccacgcgggcgagcacctcctgctgggggccaccaagcgcagcatggtgttcaaggacgtgctgctgctcggcaacgactacatcgtcccccggcactgccccgagctggccgagatgtcccgcgtgagcatccggatcctggacgagctcgtgctgccgttccaggagctgcagatcgacgacaacgagtacgcctacctcaaggccatcatcttcttcgaccccgacgcgaagggcctgtccgaccccgggaagatcaagcgcctgcgcagccaggtccaggtgtccctcgaggactacatcaacgaccggcagtacgacagccgcggccggttcggggagctgctgctcctgctgcccacgctccagtccatcacctggcagatgatcgagcagatccagttcatcaagctgttcggcatggccaagatcgacaacctgctccaggagatgctgctgtgaggactagtccctgttcccagagcccacttttttttctttttttgaaataaaatagcctgtctttcagatctaaaaaaaaaaaaaaaaaaaaaaaaaaaaaaaaaaaaaaaaaaaaaaaaaaaaaaaaaaaaaaaaaaaaaaaaaaaaaaaaaaaaaaaaaaaaaaaaaaaa

SEQ ID NO: 4740 - RNA, 1376 nt, synthetic construct
  misc_feature 1..1376: note = mRNA a-1 (A100) (opt1) from Homo sapiens__NP_000448.3__HNF4A(1-375)(S87E)
  source 1..1376: mol_type = other RNA
aggagagtcccgcagtcggcgtccagcggctctgcttgttcgtgtgtgtgtcgttgcaggccttattcaagcttaccatgcgcctgagcaagaccctcgtggacatggacatggccgactactccgccgcgctggaccccgcctacaccacgctggagttcgagaacgtccaggtgctcaccatgggcaacgacaccagcccgtccgaggggaccaacctgaacgcccccaacagcctgggcgtgtccgccctctgcgccatctgcggggaccgggcgacgggcaagcactacggggccagctcctgcgacggctgcaagggcttcttccgccgggaggtccgcaagaaccacatgtacagctgccggttctcccgccagtgcgtggtggacaaggacaagcggaaccagtgccgctactgccggctgaagaagtgcttccgcgccgggatgaagaaggaggccgtccagaacgagcgggaccgcatcagcacccggcgctccagctacgaggactccagcctgccctccatcaacgcgctcctgcaggccgaggtgctgagccggcagatcacctcccccgtgagcggcatcaacggggacatccgcgccaagaagatcgcctccatcgccgacgtctgcgagagcatgaaggagcagctcctggtgctggtggagtgggcgaagtacatcccggccttctgcgagctccccctggacgaccaggtcgccctgctccgggcccacgccggcgagcacctcctgctgggggcgaccaagcgcagcatggtgttcaaggacgtgctgctgctcggcaacgactacatcgtcccccggcactgccccgagctggccgagatgtcccgcgtgagcatccggatcctggacgagctcgtgctgccgttccaggagctgcagatcgacgacaacgagtacgcctacctcaaggccatcatcttcttcgaccccgacgccaagggcctgtccgaccccgggaagatcaagcgcctgcgcagccaggtccaggtgtccctcgaggactacatcaacgaccggcagtacgacagccgcggccggttcggggagctgctgctcctgctgcccacgctccagtccatcacctggcagatgatcgagcagatccagttcatcaagctgttcggcatggcgaagatcgacaacctgctccaggagatgctgctgtgaggactagtccctgttcccagagcccacttttttttctttttttgaaataaaatagcctgtctttcagatctaaaaaaaaaaaaaaaaaaaaaaaaaaaaaaaaaaaaaaaaaaaaaaaaaaaaaaaaaaaaaaaaaaaaaaaaaaaaaaaaaaaaaaaaaaaaaaaaaaaa

SEQ ID NO: 4741 - RNA, 1376 nt, synthetic construct
  misc_feature 1..1376: note = mRNA a-1 (A100) (opt1) from Homo sapiens__NP_000448.3__HNF4A(1-375)(R2V)
  source 1..1376: mol_type = other RNA
aggagagtcccgcagtcggcgtccagcggctctgcttgttcgtgtgtgtgtcgttgcaggccttattcaagcttaccatggtgctgagcaagaccctcgtcgacatggacatggccgactactccgccgcgctggaccccgcctacaccacgctggagttcgagaacgtccaggtgctcaccatgggcaacgacaccagcccgtccgaggggaccaacctgaacgcccccaacagcctgggcgtgtccgccctctgcgccatctgcggggaccgcgcgacgggcaagcactacggggccagctcctgcgacggctgcaagggcttcttccggcgcagcgtgcggaagaaccacatgtactcctgccgcttcagccggcagtgcgtggtcgacaaggacaagcgcaaccagtgccggtactgccgcctgaagaagtgcttccgggccgggatgaagaaggaggccgtgcagaacgagcgcgaccggatctccacccgccggagctcctacgaggacagctccctgcccagcatcaacgcgctcctgcaggccgaggtgctgtcccgccagatcaccagccccgtctccggcatcaacggggacatccgggccaagaagatcgccagcatcgccgacgtgtgcgagagcatgaaggagcagctcctggtgctggtcgagtgggcgaagtacatcccggccttctgcgagctccccctggacgaccaggtggccctgctccgcgcccacgccggcgagcacctcctgctgggggcgaccaagcggtccatggtgttcaaggacgtcctgctgctcggcaacgactacatcgtgccccgccactgccccgagctggccgagatgagccgggtgtccatccgcatcctggacgagctcgtcctgccgttccaggagctgcagatcgacgacaacgagtacgcctacctcaaggccatcatcttcttcgaccccgacgccaagggcctgagcgaccccgggaagatcaagcggctgcgctcccaggtccaggtgagcctcgaggactacatcaacgaccgccagtacgactcccggggccgcttcggggagctgctgctcctgctgcccacgctccagagcatcacctggcagatgatcgagcagatccagttcatcaagctgttcggcatggcgaagatcgacaacctgctccaggagatgctgctgtgaggactagtccctgttcccagagcccacttttttttctttttttgaaataaaatagcctgtctttcagatctaaaaaaaaaaaaaaaaaaaaaaaaaaaaaaaaaaaaaaaaaaaaaaaaaaaaaaaaaaaaaaaaaaaaaaaaaaaaaaaaaaaaaaaaaaaaaaaaaaaa

SEQ ID NO: 4742 - RNA, 1376 nt, synthetic construct
  misc_feature 1..1376: note = mRNA a-1 (A100) (opt1) from Homo sapiens__NP_000448.3__HNF4A(1-375)(R2V_K5V)
  source 1..1376: mol_type = other RNA
aggagagtcccgcagtcggcgtccagcggctctgcttgttcgtgtgtgtgtcgttgcaggccttattcaagcttaccatggtgctgagcgtcaccctcgtggacatggacatggccgactactccgccgcgctggaccccgcctacaccacgctggagttcgagaacgtgcaggtcctcaccatgggcaacgacaccagcccgtccgaggggaccaacctgaacgcccccaacagcctgggcgtgtccgccctctgcgccatctgcggggaccgcgcgacgggcaagcactacggggccagctcctgcgacggctgcaagggcttcttccggcgcagcgtgcggaagaaccacatgtactcctgccgcttcagccggcagtgcgtcgtggacaaggacaagcgcaaccagtgccggtactgccgcctgaagaagtgcttccgggccgggatgaagaaggaggccgtgcagaacgagcgcgaccggatctccacccgccggagctcctacgaggacagctccctgcccagcatcaacgcgctcctgcaggccgaggtcctgtcccgccagatcaccagccccgtgtccggcatcaacggggacatccgggccaagaagatcgccagcatcgccgacgtgtgcgagagcatgaaggagcagctcctggtcctggtggagtgggcgaagtacatcccggccttctgcgagctccccctggacgaccaggtggccctgctccgcgcccacgccggcgagcacctcctgctgggggcgaccaagcggtccatggtcttcaaggacgtgctgctgctcggcaacgactacatcgtgccccgccactgccccgagctggccgagatgagccgggtctccatccgcatcctggacgagctcgtgctgccgttccaggagctgcagatcgacgacaacgagtacgcctacctcaaggccatcatcttcttcgaccccgacgccaagggcctgagcgaccccgggaagatcaagcggctgcgctcccaggtgcaggtcagcctcgaggactacatcaacgaccgccagtacgactcccggggccgcttcggggagctgctgctcctgctgcccacgctccagagcatcacctggcagatgatcgagcagatccagttcatcaagctgttcggcatggcgaagatcgacaacctgctccaggagatgctgctgtgaggactagtccctgttcccagagcccacttttttttctttttttgaaataaaatagcctgtctttcagatctaaaaaaaaaaaaaaaaaaaaaaaaaaaaaaaaaaaaaaaaaaaaaaaaaaaaaaaaaaaaaaaaaaaaaaaaaaaaaaaaaaaaaaaaaaaaaaaaaaaa

SEQ ID NO: 4743 - RNA, 1376 nt, synthetic construct
  misc_feature 1..1376: note = mRNA a-1 (A100) (opt1) from Homo sapiens__NP_000448.3__HNF4A(1-375)(K179R_K180R)
  source 1..1376: mol_type = other RNA
aggagagtcccgcagtcggcgtccagcggctctgcttgttcgtgtgtgtgtcgttgcaggccttattcaagcttaccatgcgcctgagcaagaccctcgtggacatggacatggccgactactccgccgcgctggaccccgcctacaccacgctggagttcgagaacgtccaggtgctcaccatgggcaacgacaccagcccgtccgaggggaccaacctgaacgcccccaacagcctgggcgtgtccgccctctgcgccatctgcggggaccgggcgacgggcaagcactacggggccagctcctgcgacggctgcaagggcttcttccgccggagcgtccgcaagaaccacatgtactcctgccggttcagccgccagtgcgtggtggacaaggacaagcggaaccagtgccgctactgccggctgaagaagtgcttccgcgccgggatgaagaaggaggccgtccagaacgagcgggaccgcatctccacccggcgcagctcctacgaggacagctccctgcccagcatcaacgcgctcctgcaggccgaggtgctgtcccggcagatcaccagccccgtgtccggcatcaacggggacatccgcgcccggcgcatcgccagcatcgccgacgtctgcgagagcatgaaggagcagctcctggtgctggtggagtgggcgaagtacatcccggccttctgcgagctccccctggacgaccaggtcgccctgctccgggcccacgccggcgagcacctcctgctgggggcgaccaagcgctccatggtgttcaaggacgtgctgctgctcggcaacgactacatcgtcccccggcactgccccgagctggccgagatgagccgcgtgtccatccgcatcctggacgagctcgtgctgccgttccaggagctgcagatcgacgacaacgagtacgcctacctcaaggccatcatcttcttcgaccccgacgccaagggcctgagcgaccccgggaagatcaagcggctgcgctcccaggtccaggtgagcctcgaggactacatcaacgaccggcagtacgactcccgcggccggttcggggagctgctgctcctgctgcccacgctccagagcatcacctggcagatgatcgagcagatccagttcatcaagctgttcggcatggcgaagatcgacaacctgctccaggagatgctgctgtgaggactagtccctgttcccagagcccacttttttttctttttttgaaataaaatagcctgtctttcagatctaaaaaaaaaaaaaaaaaaaaaaaaaaaaaaaaaaaaaaaaaaaaaaaaaaaaaaaaaaaaaaaaaaaaaaaaaaaaaaaaaaaaaaaaaaaaaaaaaaaa

SEQ ID NO: 4744 - RNA, 1376 nt, synthetic construct
  misc_feature 1..1376: note = mRNA a-1 (A100) (opt1) from Homo sapiens__NP_000448.3__HNF4A(1-375)(K234R)
  source 1..1376: mol_type = other RNA
aggagagtcccgcagtcggcgtccagcggctctgcttgttcgtgtgtgtgtcgttgcaggccttattcaagcttaccatgcgcctgagcaagaccctcgtggacatggacatggccgactactccgccgcgctggaccccgcctacaccacgctggagttcgagaacgtccaggtgctcaccatgggcaacgacaccagcccgtccgaggggaccaacctgaacgcccccaacagcctgggcgtgtccgccctctgcgccatctgcggggaccgggcgacgggcaagcactacggggccagctcctgcgacggctgcaagggcttcttccgccggagcgtccgcaagaaccacatgtactcctgccggttcagccgccagtgcgtggtggacaaggacaagcggaaccagtgccgctactgccggctgaagaagtgcttccgcgccgggatgaagaaggaggccgtccagaacgagcgggaccgcatctccacccggcgcagctcctacgaggacagctccctgcccagcatcaacgcgctcctgcaggccgaggtgctgtcccggcagatcaccagccccgtgtccggcatcaacggggacatccgcgccaagaagatcgccagcatcgccgacgtctgcgagagcatgaaggagcagctcctggtgctggtggagtgggcgaagtacatcccggccttctgcgagctccccctggacgaccaggtcgccctgctccgggcccacgccggcgagcacctcctgctgggggcgacccgccggtccatggtgttcaaggacgtgctgctgctcggcaacgactacatcgtcccccgccactgccccgagctggccgagatgagccgggtgtccatccgcatcctggacgagctcgtgctgccgttccaggagctgcagatcgacgacaacgagtacgcctacctcaaggccatcatcttcttcgaccccgacgccaagggcctgagcgaccccgggaagatcaagcgcctgcggtcccaggtccaggtgagcctcgaggactacatcaacgaccgccagtacgactcccggggccgcttcggggagctgctgctcctgctgcccacgctccagagcatcacctggcagatgatcgagcagatccagttcatcaagctgttcggcatggcgaagatcgacaacctgctccaggagatgctgctgtgaggactagtccctgttcccagagcccacttttttttctttttttgaaataaaatagcctgtctttcagatctaaaaaaaaaaaaaaaaaaaaaaaaaaaaaaaaaaaaaaaaaaaaaaaaaaaaaaaaaaaaaaaaaaaaaaaaaaaaaaaaaaaaaaaaaaaaaaaaaaaa

SEQ ID NO: 4745 - RNA, 1376 nt, synthetic construct
  misc_feature 1..1376: note = mRNA a-1 (A100) (opt1) from Homo sapiens__NP_000448.3__HNF4A(1-375)(K300R)
  source 1..1376: mol_type = other RNA
aggagagtcccgcagtcggcgtccagcggctctgcttgttcgtgtgtgtgtcgttgcaggccttattcaagcttaccatgcgcctgagcaagaccctcgtggacatggacatggccgactactccgccgcgctggaccccgcctacaccacgctggagttcgagaacgtccaggtgctcaccatgggcaacgacaccagcccgtccgaggggaccaacctgaacgcccccaacagcctgggcgtgtccgccctctgcgccatctgcggggaccgggcgacgggcaagcactacggggccagctcctgcgacggctgcaagggcttcttccgccggagcgtccgcaagaaccacatgtactcctgccggttcagccgccagtgcgtggtggacaaggacaagcggaaccagtgccgctactgccggctgaagaagtgcttccgcgccgggatgaagaaggaggccgtccagaacgagcgggaccgcatctccacccggcgcagctcctacgaggacagctccctgcccagcatcaacgcgctcctgcaggccgaggtgctgtcccggcagatcaccagccccgtgtccggcatcaacggggacatccgcgccaagaagatcgccagcatcgccgacgtctgcgagagcatgaaggagcagctcctggtgctggtggagtgggcgaagtacatcccggccttctgcgagctccccctggacgaccaggtcgccctgctccgggcccacgccggcgagcacctcctgctgggggcgaccaagcgctccatggtgttcaaggacgtgctgctgctcggcaacgactacatcgtcccccggcactgccccgagctggccgagatgagccgcgtgtccatccggatcctggacgagctcgtgctgccgttccaggagctgcagatcgacgacaacgagtacgcctacctcaaggccatcatcttcttcgaccccgacgcccgcggcctgagcgaccccgggaagatcaagcgcctgcggtcccaggtccaggtgagcctcgaggactacatcaacgaccgccagtacgactcccggggccgcttcggggagctgctgctcctgctgcccacgctccagagcatcacctggcagatgatcgagcagatccagttcatcaagctgttcggcatggcgaagatcgacaacctgctccaggagatgctgctgtgaggactagtccctgttcccagagcccacttttttttctttttttgaaataaaatagcctgtctttcagatctaaaaaaaaaaaaaaaaaaaaaaaaaaaaaaaaaaaaaaaaaaaaaaaaaaaaaaaaaaaaaaaaaaaaaaaaaaaaaaaaaaaaaaaaaaaaaaaaaaaa

SEQ ID NO: 4746 - RNA, 1376 nt, synthetic construct
  misc_feature 1..1376: note = mRNA a-1 (A100) (opt1) from Homo sapiens__NP_000448.3__HNF4A(1-375)(K300R_K307R_K309R)
  source 1..1376: mol_type = other RNA
aggagagtcccgcagtcggcgtccagcggctctgcttgttcgtgtgtgtgtcgttgcaggccttattcaagcttaccatgcgcctgagcaagaccctcgtggacatggacatggccgactactccgccgcgctggaccccgcctacaccacgctggagttcgagaacgtccaggtgctcaccatgggcaacgacaccagcccgtccgaggggaccaacctgaacgcccccaacagcctgggcgtgtccgccctctgcgccatctgcggggaccgggcgacgggcaagcactacggggccagctcctgcgacggctgcaagggcttcttccgccggagcgtccgcaagaaccacatgtactcctgccggttcagccgccagtgcgtggtggacaaggacaagcggaaccagtgccgctactgccggctgaagaagtgcttccgcgccgggatgaagaaggaggccgtccagaacgagcgggaccgcatctccacccggcgcagctcctacgaggacagctccctgcccagcatcaacgcgctcctgcaggccgaggtgctgtcccggcagatcaccagccccgtgtccggcatcaacggggacatccgcgccaagaagatcgccagcatcgccgacgtctgcgagagcatgaaggagcagctcctggtgctggtggagtgggcgaagtacatcccggccttctgcgagctccccctggacgaccaggtcgccctgctccgggcccacgccggcgagcacctcctgctgggggcgaccaagcgctccatggtgttcaaggacgtgctgctgctcggcaacgactacatcgtcccccggcactgccccgagctggccgagatgagccgcgtgtccatccggatcctggacgagctcgtgctgccgttccaggagctgcagatcgacgacaacgagtacgcctacctcaaggccatcatcttcttcgaccccgacgcccgcggcctgagcgaccccgggcgcatccggcgcctgcggtcccaggtccaggtgagcctcgaggactacatcaacgaccgccagtacgactcccggggccgcttcggggagctgctgctcctgctgcccacgctccagagcatcacctggcagatgatcgagcagatccagttcatcaagctgttcggcatggcgaagatcgacaacctgctccaggagatgctgctgtgaggactagtccctgttcccagagcccacttttttttctttttttgaaataaaatagcctgtctttcagatctaaaaaaaaaaaaaaaaaaaaaaaaaaaaaaaaaaaaaaaaaaaaaaaaaaaaaaaaaaaaaaaaaaaaaaaaaaaaaaaaaaaaaaaaaaaaaaaaaaaa

SEQ ID NO: 4747 - RNA, 1376 nt, synthetic construct; identical to SEQ ID NO: 4679
  misc_feature 1..1376: note = mRNA a-1 (A100) (opt1) from Homo sapiens__NP_000448.3__HNF4A(1-375)(K447R_K470R)
  source 1..1376: mol_type = other RNA

SEQ ID NO: 4748 - RNA, 1376 nt, synthetic construct; identical to SEQ ID NO: 4679
  misc_feature 1..1376: note = mRNA a-1 (A100) (opt1) from Homo sapiens__NP_000448.3__HNF4A(1-375)(K458R)
  source 1..1376: mol_type = other RNA

SEQ ID NO: 4749 - RNA, 1376 nt, synthetic construct
  misc_feature 1..1376: note = mRNA a-1 (A100) (opt1) from Homo sapiens__NP_000448.3__HNF4A(1-375)(K106R_K108R_K126R_K127R)
  source 1..1376: mol_type = other RNA
aggagagtcccgcagtcggcgtccagcggctctgcttgttcgtgtgtgtgtcgttgcaggccttattcaagcttaccatgcgcctgagcaagaccctcgtggacatggacatggccgactactccgccgcgctggaccccgcctacaccacgctggagttcgagaacgtccaggtgctcaccatgggcaacgacaccagcccgtccgaggggaccaacctgaacgcccccaacagcctgggcgtgtccgccctctgcgccatctgcggggaccgggcgacgggcaagcactacggggccagctcctgcgacggctgcaagggcttcttccgccggagcgtccgcaagaaccacatgtactcctgccggttcagccgccagtgcgtggtggaccgggaccgccggaaccagtgccgctactgccggctgaagaagtgcttccgcgccgggatgcggcgcgaggccgtccagaacgagcgggaccgcatctccacccggcgcagctcctacgaggacagctccctgcccagcatcaacgcgctcctgcaggccgaggtgctgtcccggcagatcaccagccccgtgtccggcatcaacggggacatccgcgccaagaagatcgccagcatcgccgacgtctgcgagagcatgaaggagcagctcctggtgctggtggagtgggcgaagtacatcccggccttctgcgagctccccctggacgaccaggtcgccctgctccgggcccacgccggcgagcacctcctgctgggggcgaccaagcgctccatggtgttcaaggacgtgctgctgctcggcaacgactacatcgtcccccgccactgccccgagctggccgagatgagccgggtgtccatccgcatcctggacgagctcgtgctgccgttccaggagctgcagatcgacgacaacgagtacgcctacctcaaggccatcatcttcttcgaccccgacgccaagggcctgagcgaccccgggaagatcaagcggctgcgctcccaggtccaggtgagcctcgaggactacatcaacgaccggcagtacgactcccgcggccggttcggggagctgctgctcctgctgcccacgctccagagcatcacctggcagatgatcgagcagatccagttcatcaagctgttcggcatggcgaagatcgacaacctgctccaggagatgctgctgtgaggactagtccctgttcccagagcccacttttttttctttttttgaaataaaatagcctgtctttcagatctaaaaaaaaaaaaaaaaaaaaaaaaaaaaaaaaaaaaaaaaaaaaaaaaaaaaaaaaaaaaaaaaaaaaaaaaaaaaaaaaaaaaaaaaaaaaaaaaaaaa

SEQ ID NO: 4750 - RNA, 1376 nt, synthetic construct; identical to SEQ ID NO: 4701
  misc_feature 1..1376: note = mRNA a-1 (A100) (opt1) from Homo sapiens__NP_000448.3__HNF4A(1-375)(E285Q)
  source 1..1376: mol_type = other RNA

SEQ ID NO: 4751 - RNA, 1376 nt, synthetic construct
  misc_feature 1..1376: note = mRNA a-1 (A100) (opt1) from Homo sapiens__NP_000448.3__HNF4A(1-375)(T166E)
  source 1..1376: mol_type = other RNA
aggagagtcccgcagtcggcgtccagcggctctgcttgttcgtgtgtgtgtcgttgcaggccttattcaagcttaccatgcgcctgagcaagaccctcgtggacatggacatggccgactactccgccgcgctggaccccgcctacaccacgctggagttcgagaacgtccaggtgctcaccatgggcaacgacaccagcccgtccgaggggaccaacctgaacgcccccaacagcctgggcgtgtccgccctctgcgccatctgcggggaccgggcgacgggcaagcactacggggccagctcctgcgacggctgcaagggcttcttccgccggagcgtccgcaagaaccacatgtactcctgccggttcagccgccagtgcgtggtggacaaggacaagcggaaccagtgccgctactgccggctgaagaagtgcttccgcgccgggatgaagaaggaggccgtccagaacgagcgggaccgcatctccacccggcgcagctcctacgaggacagctccctgcccagcatcaacgcgctcctgcaggccgaggtgctgtcccggcagatcgagagccccgtgtccggcatcaacggggacatccgcgccaagaagatcgccagcatcgccgacgtctgcgagagcatgaaggagcagctcctggtgctggtggagtgggcgaagtacatcccggccttctgcgagctccccctggacgaccaggtcgccctgctccgggcccacgccggcgagcacctcctgctgggggcgaccaagcgctccatggtgttcaaggacgtgctgctgctcggcaacgactacatcgtcccccggcactgccccgagctggccgagatgagccgcgtgtccatccggatcctggacgagctcgtgctgccgttccaggagctgcagatcgacgacaacgagtacgcctacctcaaggccatcatcttcttcgaccccgacgccaagggcctgagcgaccccgggaagatcaagcgcctgcgctcccaggtccaggtgagcctcgaggactacatcaacgaccggcagtacgactcccgcggccggttcggggagctgctgctcctgctgcccaccctccagagcatcacgtggcagatgatcgagcagatccagttcatcaagctgttcggcatggcgaagatcgacaacctgctccaggagatgctgctgtgaggactagtccctgttcccagagcccacttttttttctttttttgaaataaaatagcctgtctttcagatctaaaaaaaaaaaaaaaaaaaaaaaaaaaaaaaaaaaaaaaaaaaaaaaaaaaaaaaaaaaaaaaaaaaaaaaaaaaaaaaaaaaaaaaaaaaaaaaaaaaa

SEQ ID NO: 4752 - RNA, 1376 nt, synthetic construct
  misc_feature 1..1376: note = mRNA a-1 (A100) (opt1) from Homo sapiens__NP_000448.3__HNF4A(1-375)(S148A)
  source 1..1376: mol_type = other RNA
aggagagtcccgcagtcggcgtccagcggctctgcttgttcgtgtgtgtgtcgttgcaggccttattcaagcttaccatgcgcctgagcaagaccctcgtggacatggacatggccgactactccgccgcgctggaccccgcctacaccacgctggagttcgagaacgtccaggtgctcaccatgggcaacgacaccagcccgtccgaggggaccaacctgaacgcccccaacagcctgggcgtgtccgccctctgcgccatctgcggggaccgggcgacgggcaagcactacggggccagctcctgcgacggctgcaagggcttcttccgccggagcgtccgcaagaaccacatgtactcctgccggttcagccgccagtgcgtggtggacaaggacaagcggaaccagtgccgctactgccggctgaagaagtgcttccgcgccgggatgaagaaggaggccgtccagaacgagcgggaccgcatctccacccggcgcagctcctacgaggacagcgcgctgccctccatcaacgccctcctgcaggccgaggtgctgagccggcagatcacctcccccgtgagcggcatcaacggggacatccgcgccaagaagatcgcctccatcgcggacgtctgcgagagcatgaaggagcagctcctggtgctggtggagtgggccaagtacatcccggccttctgcgagctccccctggacgaccaggtcgccctgctccgggcccacgcgggcgagcacctcctgctgggggccaccaagcgcagcatggtgttcaaggacgtgctgctgctcggcaacgactacatcgtcccccggcactgccccgagctggccgagatgtcccgcgtgagcatccggatcctggacgagctcgtgctgccgttccaggagctgcagatcgacgacaacgagtacgcctacctcaaggccatcatcttcttcgaccccgacgcgaagggcctgtccgaccccgggaagatcaagcgcctgcgcagccaggtccaggtgtccctcgaggactacatcaacgaccggcagtacgacagccgcggccggttcggggagctgctgctcctgctgcccacgctccagtccatcacctggcagatgatcgagcagatccagttcatcaagctgttcggcatggccaagatcgacaacctgctccaggagatgctgctgtgaggactagtccctgttcccagagcccacttttttttctttttttgaaataaaatagcctgtctttcagatctaaaaaaaaaaaaaaaaaaaaaaaaaaaaaaaaaaaaaaaaaaaaaaaaaaaaaaaaaaaaaaaaaaaaaaaaaaaaaaaaaaaaaaaaaaaaaaaaaaaa

SEQ ID NO: 4753 - RNA, 1376 nt, synthetic construct
  misc_feature 1..1376: note = mRNA a-1 (A100) (opt1) from Homo sapiens__NP_000448.3__HNF4A(1-375)(S148E)
  source 1..1376: mol_type = other RNA
aggagagtcccgcagtcggcgtccagcggctctgcttgttcgtgtgtgtgtcgttgcaggccttattcaagcttaccatgcgcctgagcaagaccctcgtggacatggacatggccgactactccgccgcgctggaccccgcctacaccacgctggagttcgagaacgtccaggtgctcaccatgggcaacgacaccagcccgtccgaggggaccaacctgaacgcccccaacagcctgggcgtgtccgccctctgcgccatctgcggggaccgggcgacgggcaagcactacggggccagctcctgcgacggctgcaagggcttcttccgccggagcgtccgcaagaaccacatgtactcctgccggttcagccgccagtgcgtggtggacaaggacaagcggaaccagtgccgctactgccggctgaagaagtgcttccgcgccgggatgaagaaggaggccgtccagaacgagcgggaccgcatctccacccggcgcagctcctacgaggacagcgagctgccctccatcaacgcgctcctgcaggccgaggtgctgagccggcagatcacctcccccgtgagcggcatcaacggggacatccgcgccaagaagatcgcctccatcgccgacgtctgcgagagcatgaaggagcagctcctggtgctggtggagtgggcgaagtacatcccggccttctgcgagctccccctggacgaccaggtcgccctgctccgggcccacgccggcgagcacctcctgctgggggcgaccaagcgcagcatggtgttcaaggacgtgctgctgctcggcaacgactacatcgtcccccggcactgccccgagctggccgagatgtcccgcgtgagcatccggatcctggacgagctcgtgctgccgttccaggagctgcagatcgacgacaacgagtacgcctacctcaaggccatcatcttcttcgaccccgacgccaagggcctgtccgaccccgggaagatcaagcgcctgcgcagccaggtccaggtgtccctcgaggactacatcaacgaccggcagtacgacagccgcggccggttcggggagctgctgctcctgctgcccacgctccagtccatcacctggcagatgatcgagcagatccagttcatcaagctgttcggcatggcgaagatcgacaacctgctccaggagatgctgctgtgaggactagtccctgttcccagagcccacttttttttctttttttgaaataaaatagcctgtctttcagatctaaaaaaaaaaaaaaaaaaaaaaaaaaaaaaaaaaaaaaaaaaaaaaaaaaaaaaaaaaaaaaaaaaaaaaaaaaaaaaaaaaaaaaaaaaaaaaaaaaaa

SEQ ID NO: 4754 - RNA, 1376 nt, synthetic construct
  misc_feature 1..1376: note = mRNA a-1 (A100) (opt1) from Homo sapiens__NP_000448.3__HNF4A(1-375)(S183A)
  source 1..1376: mol_type = other RNA
aggagagtcccgcagtcggcgtccagcggctctgcttgttcgtgtgtgtgtcgttgcaggccttattcaagcttaccatgcgcctgagcaagaccctcgtggacatggacatggccgactactccgccgcgctggaccccgcctacaccacgctggagttcgagaacgtccaggtgctcaccatgggcaacgacaccagcccgtccgaggggaccaacctgaacgcccccaacagcctgggcgtgtccgccctctgcgccatctgcggggaccgggcgacgggcaagcactacggggccagctcctgcgacggctgcaagggcttcttccgccggagcgtccgcaagaaccacatgtactcctgccggttcagccgccagtgcgtggtggacaaggacaagcggaaccagtgccgctactgccggctgaagaagtgcttccgcgccgggatgaagaaggaggccgtccagaacgagcgggaccgcatctccacccggcgcagctcctacgaggacagctccctgcccagcatcaacgcgctcctgcaggccgaggtgctgtcccggcagatcaccagccccgtgtccggcatcaacggggacatccgcgccaagaagatcgccgccatcgcggacgtctgcgagagcatgaaggagcagctcctggtgctggtggagtgggccaagtacatcccggccttctgcgagctccccctggacgaccaggtcgccctgctccgggcccacgcgggcgagcacctcctgctgggggccaccaagcgcagcatggtgttcaaggacgtgctgctgctcggcaacgactacatcgtcccccggcactgccccgagctggccgagatgtcccgcgtgagcatccggatcctggacgagctcgtgctgccgttccaggagctgcagatcgacgacaacgagtacgcctacctcaaggccatcatcttcttcgaccccgacgcgaagggcctgtccgaccccgggaagatcaagcgcctgcgcagccaggtccaggtgtccctcgaggactacatcaacgaccggcagtacgacagccgcggccggttcggggagctgctgctcctgctgcccacgctccagtccatcacctggcagatgatcgagcagatccagttcatcaagctgttcggcatggccaagatcgacaacctgctccaggagatgctgctgtgaggactagtccctgttcccagagcccacttttttttctttttttgaaataaaatagcctgtctttcagatctaaaaaaaaaaaaaaaaaaaaaaaaaaaaaaaaaaaaaaaaaaaaaaaaaaaaaaaaaaaaaaaaaaaaaaaaaaaaaaaaaaaaaaaaaaaaaaaaaaaa

SEQ ID NO: 4755 - RNA, 1376 nt, synthetic construct
  misc_feature 1..1376: note = mRNA a-1 (A100) (opt1) from Homo sapiens__NP_000448.3__HNF4A(1-375)(S183E)
  source 1..1376: mol_type = other RNA
aggagagtcccgcagtcggcgtccagcggctctgcttgttcgtgtgtgtgtcgttgcaggccttattcaagcttaccatgcgcctgagcaagaccctcgtggacatggacatggccgactactccgccgcgctggaccccgcctacaccacgctggagttcgagaacgtccaggtgctcaccatgggcaacgacaccagcccgtccgaggggaccaacctgaacgcccccaacagcctgggcgtgtccgccctctgcgccatctgcggggaccgggcgacgggcaagcactacggggccagctcctgcgacggctgcaagggcttcttccgccggagcgtccgcaagaaccacatgtactcctgccggttcagccgccagtgcgtggtggacaaggacaagcggaaccagtgccgctactgccggctgaagaagtgcttccgcgccgggatgaagaaggaggccgtccagaacgagcgggaccgcatctccacccggcgcagctcctacgaggacagctccctgcccagcatcaacgcgctcctgcaggccgaggtgctgtcccggcagatcaccagccccgtgtccggcatcaacggggacatccgcgccaagaagatcgccgagatcgccgacgtctgcgagagcatgaaggagcagctcctggtgctggtggagtgggcgaagtacatcccggccttctgcgagctccccctggacgaccaggtcgccctgctccgggcccacgccggcgagcacctcctgctgggggcgaccaagcgcagcatggtgttcaaggacgtgctgctgctcggcaacgactacatcgtcccccggcactgccccgagctggccgagatgtcccgcgtgagcatccggatcctggacgagctcgtgctgccgttccaggagctgcagatcgacgacaacgagtacgcctacctcaaggccatcatcttcttcgaccccgacgccaagggcctgtccgaccccgggaagatcaagcgcctgcgcagccaggtccaggtgtccctcgaggactacatcaacgaccggcagtacgacagccgcggccggttcggggagctgctgctcctgctgcccacgctccagtccatcacctggcagatgatcgagcagatccagttcatcaagctgttcggcatggcgaagatcgacaacctgctccaggagatgctgctgtgaggactagtccctgttcccagagcccacttttttttctttttttgaaataaaatagcctgtctttcagatctaaaaaaaaaaaaaaaaaaaaaaaaaaaaaaaaaaaaaaaaaaaaaaaaaaaaaaaaaaaaaaaaaaaaaaaaaaaaaaaaaaaaaaaaaaaaaaaaaaaa

SEQ ID NO: 4756 - RNA, 1376 nt, synthetic construct; identical to SEQ ID NO: 4679
  misc_feature 1..1376: note = mRNA a-1 (A100) (opt1) from Homo sapiens__NP_000448.3__HNF4A(1-375)(S461A)
  source 1..1376: mol_type = other RNA

SEQ ID NO: 4757 - RNA, 1376 nt, synthetic construct; identical to SEQ ID NO: 4679
  misc_feature 1..1376: note = mRNA a-1 (A100) (opt1) from Homo sapiens__NP_000448.3__HNF4A(1-375)(S461E)
  source 1..1376: mol_type = other RNA

SEQ ID NO: 4758 - RNA, 1376 nt, synthetic construct
  misc_feature 1..1376: note = mRNA a-1 (A100) (opt1) from Homo sapiens__NP_000448.3__HNF4A(1-375)(S142A_S143A_S313A)
  source 1..1376: mol_type = other RNA
aggagagtcccgcagtcggcgtccagcggctctgcttgttcgtgtgtgtgtcgttgcaggccttattcaagcttaccatgcgcctgagcaagaccctcgtggacatggacatggccgactactccgccgcgctggaccccgcctacaccacgctggagttcgagaacgtccaggtgctcaccatgggcaacgacaccagcccgtccgaggggaccaacctgaacgcccccaacagcctgggcgtgtccgccctctgcgccatctgcggggaccgggcgacgggcaagcactacggggccagctcctgcgacggctgcaagggcttcttccgccggagcgtccgcaagaaccacatgtactcctgccggttcagccgccagtgcgtggtggacaaggacaagcggaaccagtgccgctactgccggctgaagaagtgcttccgcgccgggatgaagaaggaggccgtccagaacgagcgggaccgcatctccacccggcgcgcggcctacgaggacagctccctgcccagcatcaacgccctcctgcaggccgaggtgctgtcccggcagatcaccagccccgtgtccggcatcaacggggacatccgcgccaagaagatcgcgagcatcgccgacgtctgcgagtccatgaaggagcagctcctggtgctggtggagtgggccaagtacatcccggccttctgcgagctccccctggacgaccaggtcgccctgctccgggcgcacgccggcgagcacctcctgctgggggccaccaagcgcagcatggtgttcaaggacgtgctgctgctcggcaacgactacatcgtcccccggcactgccccgagctggccgagatgagccgcgtgtccatccggatcctggacgagctcgtgctgccgttccaggagctgcagatcgacgacaacgagtacgcctacctcaaggcgatcatcttcttcgaccccgacgccaagggcctgagcgaccccgggaagatcaagcgcctgcgcgcccaggtccaggtgtccctcgaggactacatcaacgaccggcagtacgacagccgcggccggttcggggagctgctgctcctgctgcccacgctccagtccatcacctggcagatgatcgagcagatccagttcatcaagctgttcggcatggccaagatcgacaacctgctccaggagatgctgctgtgaggactagtccctgttcccagagcccacttttttttctttttttgaaataaaatagcctgtctttcagatctaaaaaaaaaaaaaaaaaaaaaaaaaaaaaaaaaaaaaaaaaaaaaaaaaaaaaaaaaaaaaaaaaaaaaaaaaaaaaaaaaaaaaaaaaaaaaaaaaaaa

SEQ ID NO: 4759 - RNA, 1376 nt, synthetic construct; identical to SEQ ID NO: 4758
  misc_feature 1..1376: note = mRNA a-1 (A100) (opt1) from Homo sapiens__NP_000448.3__HNF4A(1-375)(S142A_S143A_S313A_K458R)
  source 1..1376: mol_type = other RNA

SEQ ID NO: 4760 - RNA, 1376 nt, synthetic construct
  misc_feature 1..1376: note = mRNA a-1 (A100) (opt1) from Homo sapiens__NP_000448.3__HNF4A(1-375)(S142A_S143A_S167A_S313A_ S378A_T429A_T432A_S436A_K458R)
  source 1..1376: mol_type = other RNA
aggagagtcccgcagtcggcgtccagcggctctgcttgttcgtgtgtgtgtcgttgcaggccttattcaagcttaccatgcgcctgagcaagaccctcgtggacatggacatggccgactactccgccgcgctggaccccgcctacaccacgctggagttcgagaacgtccaggtgctcaccatgggcaacgacaccagcccgtccgaggggaccaacctgaacgcccccaacagcctgggcgtgtccgccctctgcgccatctgcggggaccgggcgacgggcaagcactacggggccagctcctgcgacggctgcaagggcttcttccgccggagcgtccgcaagaaccacatgtactcctgccggttcagccgccagtgcgtggtggacaaggacaagcggaaccagtgccgctactgccggctgaagaagtgcttccgcgccgggatgaagaaggaggccgtccagaacgagcgggaccgcatctccacccggcgcgcggcctacgaggacagctccctgcccagcatcaacgccctcctgcaggccgaggtgctgtcccggcagatcaccgcccccgtgagcggcatcaacggggacatccgcgcgaagaagatcgcctccatcgccgacgtctgcgagagcatgaaggagcagctcctggtgctggtggagtgggccaagtacatcccggccttctgcgagctccccctggacgaccaggtcgcgctgctccgggcccacgccggcgagcacctcctgctgggggccaccaagcgctccatggtgttcaaggacgtgctgctgctcggcaacgactacatcgtcccccggcactgccccgagctggccgagatgagccgcgtgagcatccggatcctggacgagctcgtgctgccgttccaggagctgcagatcgacgacaacgagtacgcgtacctcaaggccatcatcttcttcgaccccgacgccaagggcctgtccgaccccgggaagatcaagcgcctgcgcgcccaggtccaggtgagcctcgaggactacatcaacgaccggcagtacgactcccgcggccggttcggggagctgctgctcctgctgcccacgctccagagcatcacctggcagatgatcgagcagatccagttcatcaagctgttcggcatggccaagatcgacaacctgctccaggagatgctgctgtgaggactagtccctgttcccagagcccacttttttttctttttttgaaataaaatagcctgtctttcagatctaaaaaaaaaaaaaaaaaaaaaaaaaaaaaaaaaaaaaaaaaaaaaaaaaaaaaaaaaaaaaaaaaaaaaaaaaaaaaaaaaaaaaaaaaaaaaaaaaaaa

SEQ ID NO: 4761 - RNA, 1376 nt, synthetic construct
  misc_feature 1..1376: note = mRNA a-1 (A100) (opt1) from Homo sapiens__NP_000448.3__HNF4A(1-375)(S142A_S143A_S148A_S167A_ S313A_S378A_T429A_T432A_S436A_K458R)
  source 1..1376: mol_type = other RNA
aggagagtcccgcagtcggcgtccagcggctctgcttgttcgtgtgtgtgtcgttgcaggccttattcaagcttaccatgcgcctgagcaagaccctcgtggacatggacatggccgactactccgccgcgctggaccccgcctacaccacgctggagttcgagaacgtccaggtgctcaccatgggcaacgacaccagcccgtccgaggggaccaacctgaacgcccccaacagcctgggcgtgtccgccctctgcgccatctgcggggaccgggcgacgggcaagcactacggggccagctcctgcgacggctgcaagggcttcttccgccggagcgtccgcaagaaccacatgtactcctgccggttcagccgccagtgcgtggtggacaaggacaagcggaaccagtgccgctactgccggctgaagaagtgcttccgcgccgggatgaagaaggaggccgtccagaacgagcgggaccgcatctccacccggcgcgcggcctacgaggacagcgccctgccctccatcaacgccctcctgcaggccgaggtgctgagccggcagatcaccgcgcccgtgtccggcatcaacggggacatccgcgccaagaagatcgccagcatcgccgacgtctgcgagtccatgaaggagcagctcctggtgctggtggagtgggccaagtacatcccggcgttctgcgagctccccctggacgaccaggtcgccctgctccgggcccacgccggcgagcacctcctgctgggggccaccaagcgcagcatggtgttcaaggacgtgctgctgctcggcaacgactacatcgtcccccggcactgccccgagctggcggagatgtcccgcgtgagcatccggatcctggacgagctcgtgctgccgttccaggagctgcagatcgacgacaacgagtacgcctacctcaaggccatcatcttcttcgaccccgacgccaagggcctgagcgaccccgggaagatcaagcgcctgcgcgcccaggtccaggtgtccctcgaggactacatcaacgaccggcagtacgacagccgcggccggttcggggagctgctgctcctgctgcccacgctccagtccatcacctggcagatgatcgagcagatccagttcatcaagctgttcggcatggcgaagatcgacaacctgctccaggagatgctgctgtgaggactagtccctgttcccagagcccacttttttttctttttttgaaataaaatagcctgtctttcagatctaaaaaaaaaaaaaaaaaaaaaaaaaaaaaaaaaaaaaaaaaaaaaaaaaaaaaaaaaaaaaaaaaaaaaaaaaaaaaaaaaaaaaaaaaaaaaaaaaaaa

SEQ ID NO: 4762 - RNA, 1376 nt, synthetic construct
  misc_feature 1..1376: note = mRNA a-1 (A100) (opt1) from Homo sapiens__NP_000448.3__HNF4A(1-375)(K106R_K108R_K126R_K127R_ S142A_S143A_S148A_S167A_S313A_S378A_T429A_T432A_S436A_K458R )
  source 1..1376: mol_type = other RNA
aggagagtcccgcagtcggcgtccagcggctctgcttgttcgtgtgtgtgtcgttgcaggccttattcaagcttaccatgcgcctgagcaagaccctcgtggacatggacatggccgactactccgccgcgctggaccccgcctacaccacgctggagttcgagaacgtccaggtgctcaccatgggcaacgacaccagcccgtccgaggggaccaacctgaacgcccccaacagcctgggcgtgtccgccctctgcgccatctgcggggaccgggcgacgggcaagcactacggggccagctcctgcgacggctgcaagggcttcttccgccggagcgtccgcaagaaccacatgtactcctgccggttcagccgccagtgcgtggtggaccgggaccgccggaaccagtgccgctactgccggctgaagaagtgcttccgcgccgggatgcggcgcgaggccgtccagaacgagcgggaccgcatctccacccggcgcgcggcctacgaggacagcgccctgccctccatcaacgccctcctgcaggccgaggtgctgagccggcagatcaccgcgcccgtgtccggcatcaacggggacatccgcgccaagaagatcgccagcatcgccgacgtctgcgagtccatgaaggagcagctcctggtgctggtggagtgggccaagtacatcccggcgttctgcgagctccccctggacgaccaggtcgccctgctccgggcccacgccggcgagcacctcctgctgggggccaccaagcgcagcatggtgttcaaggacgtgctgctgctcggcaacgactacatcgtcccccgccactgccccgagctggcggagatgtcccgggtgagcatccgcatcctggacgagctcgtgctgccgttccaggagctgcagatcgacgacaacgagtacgcctacctcaaggccatcatcttcttcgaccccgacgccaagggcctgagcgaccccgggaagatcaagcggctgcgcgcccaggtccaggtgtccctcgaggactacatcaacgaccggcagtacgacagccgcggccggttcggggagctgctgctcctgctgcccacgctccagtccatcacctggcagatgatcgagcagatccagttcatcaagctgttcggcatggcgaagatcgacaacctgctccaggagatgctgctgtgaggactagtccctgttcccagagcccacttttttttctttttttgaaataaaatagcctgtctttcagatctaaaaaaaaaaaaaaaaaaaaaaaaaaaaaaaaaaaaaaaaaaaaaaaaaaaaaaaaaaaaaaaaaaaaaaaaaaaaaaaaaaaaaaaaaaaaaaaaaaaa

SEQ ID NO: 4763 - RNA, 1376 nt, synthetic construct
  misc_feature 1..1376: note = mRNA a-1 (A100) (opt1) from Homo sapiens__NP_000448.3__HNF4A(1-375)(S142A_S143A_S148A_T166A_ S167A_S313A_S378A_T429A_T432A_S436A_K458R)
  source 1..1376: mol_type = other RNA
aggagagtcccgcagtcggcgtccagcggctctgcttgttcgtgtgtgtgtcgttgcaggccttattcaagcttaccatgcgcctgagcaagaccctcgtggacatggacatggccgactactccgccgcgctggaccccgcctacaccacgctggagttcgagaacgtccaggtgctcaccatgggcaacgacaccagcccgtccgaggggaccaacctgaacgcccccaacagcctgggcgtgtccgccctctgcgccatctgcggggaccgggcgacgggcaagcactacggggccagctcctgcgacggctgcaagggcttcttccgccggagcgtccgcaagaaccacatgtactcctgccggttcagccgccagtgcgtggtggacaaggacaagcggaaccagtgccgctactgccggctgaagaagtgcttccgcgccgggatgaagaaggaggccgtccagaacgagcgggaccgcatctccacccggcgcgcggcctacgaggacagcgccctgccctccatcaacgccctcctgcaggccgaggtgctgagccggcagatcgcggcccccgtgtccggcatcaacggggacatccgcgccaagaagatcgccagcatcgccgacgtctgcgagtccatgaaggagcagctcctggtgctggtggagtgggcgaagtacatcccggccttctgcgagctccccctggacgaccaggtcgccctgctccgggcccacgccggcgagcacctcctgctgggggcgaccaagcgcagcatggtgttcaaggacgtgctgctgctcggcaacgactacatcgtcccccggcactgccccgagctggccgagatgtcccgcgtgagcatccggatcctggacgagctcgtgctgccgttccaggagctgcagatcgacgacaacgagtacgcctacctcaaggccatcatcttcttcgaccccgacgccaagggcctgagcgaccccgggaagatcaagcgcctgcgcgcgcaggtccaggtgtccctcgaggactacatcaacgaccggcagtacgacagccgcggccggttcggggagctgctgctcctgctgcccaccctccagtccatcacgtggcagatgatcgagcagatccagttcatcaagctgttcggcatggccaagatcgacaacctgctccaggagatgctgctgtgaggactagtccctgttcccagagcccacttttttttctttttttgaaataaaatagcctgtctttcagatctaaaaaaaaaaaaaaaaaaaaaaaaaaaaaaaaaaaaaaaaaaaaaaaaaaaaaaaaaaaaaaaaaaaaaaaaaaaaaaaaaaaaaaaaaaaaaaaaaaaa

SEQ ID NO: 4764 - RNA, 1376 nt, synthetic construct
  misc_feature 1..1376: note = mRNA a-1 (A100) (opt1) from Homo sapiens__NP_000448.3__HNF4A(1-375)(S87A_S142A_S143A_S148A_T 166A_S167A_S313A_S378A_T429A_T432A_S436A_K458R)
  source 1..1376: mol_type = other RNA
aggagagtcccgcagtcggcgtccagcggctctgcttgttcgtgtgtgtgtcgttgcaggccttattcaagcttaccatgcgcctgagcaagaccctcgtggacatggacatggccgactactccgccgcgctggaccccgcctacaccacgctggagttcgagaacgtccaggtgctcaccatgggcaacgacaccagcccgtccgaggggaccaacctgaacgcccccaacagcctgggcgtgtccgccctctgcgccatctgcggggaccgggcgacgggcaagcactacggggccagctcctgcgacggctgcaagggcttcttccgccgggccgtccgcaagaaccacatgtacagctgccggttctcccgccagtgcgtggtggacaaggacaagcggaaccagtgccgctactgccggctgaagaagtgcttccgcgccgggatgaagaaggaggcggtccagaacgagcgggaccgcatcagcacccggcgcgccgcctacgaggactccgccctgcccagcatcaacgccctcctgcaggcggaggtgctgtcccggcagatcgccgcccccgtgagcggcatcaacggggacatccgcgccaagaagatcgcctccatcgcggacgtctgcgagagcatgaaggagcagctcctggtgctggtggagtgggccaagtacatcccggccttctgcgagctccccctggacgaccaggtcgccctgctccgggcccacgcgggcgagcacctcctgctgggggccaccaagcgctccatggtgttcaaggacgtgctgctgctcggcaacgactacatcgtcccccggcactgccccgagctggccgagatgagccgcgtgtccatccggatcctggacgagctcgtgctgccgttccaggagctgcagatcgacgacaacgagtacgcctacctcaaggccatcatcttcttcgaccccgacgcgaagggcctgagcgaccccgggaagatcaagcgcctgcgcgcccaggtccaggtgagcctcgaggactacatcaacgaccggcagtacgactcccgcggccggttcggggagctgctgctcctgctgcccaccctccagagcatcacgtggcagatgatcgagcagatccagttcatcaagctgttcggcatggccaagatcgacaacctgctccaggagatgctgctgtgaggactagtccctgttcccagagcccacttttttttctttttttgaaataaaatagcctgtctttcagatctaaaaaaaaaaaaaaaaaaaaaaaaaaaaaaaaaaaaaaaaaaaaaaaaaaaaaaaaaaaaaaaaaaaaaaaaaaaaaaaaaaaaaaaaaaaaaaaaaaaa

SEQ ID NO: 4765 - RNA, 1376 nt, synthetic construct
  misc_feature 1..1376: note = mRNA a-1 (A100) (opt1) from Homo sapiens__NP_000448.3__HNF4A(1-375)(S87A_K106R_K108R_K126R_K 127R_S142A_S143A_S148A_T166A_S167A_S313A_S378A_T429A_T432A_ S436A_K458R)
  source 1..1376: mol_type = other RNA
aggagagtcccgcagtcggcgtccagcggctctgcttgttcgtgtgtgtgtcgttgcaggccttattcaagcttaccatgcgcctgagcaagaccctcgtggacatggacatggccgactactccgccgcgctggaccccgcctacaccacgctggagttcgagaacgtccaggtgctcaccatgggcaacgacaccagcccgtccgaggggaccaacctgaacgcccccaacagcctgggcgtgtccgccctctgcgccatctgcggggaccgggcgacgggcaagcactacggggccagctcctgcgacggctgcaagggcttcttccgccgggccgtccgcaagaaccacatgtacagctgccggttctcccgccagtgcgtggtggaccgggaccgccggaaccagtgccgctactgccggctgaagaagtgcttccgcgccgggatgcggcgcgaggcggtccagaacgagcgggaccgcatcagcacccggcgcgccgcctacgaggactccgccctgcccagcatcaacgccctcctgcaggcggaggtgctgtcccggcagatcgccgcccccgtgagcggcatcaacggggacatccgcgccaagaagatcgcctccatcgcggacgtctgcgagagcatgaaggagcagctcctggtgctggtggagtgggccaagtacatcccggccttctgcgagctccccctggacgaccaggtcgccctgctccgggcccacgcgggcgagcacctcctgctgggggccaccaagcgctccatggtgttcaaggacgtgctgctgctcggcaacgactacatcgtcccccgccactgccccgagctggccgagatgagccgggtgtccatccgcatcctggacgagctcgtgctgccgttccaggagctgcagatcgacgacaacgagtacgcctacctcaaggccatcatcttcttcgaccccgacgcgaagggcctgagcgaccccgggaagatcaagcggctgcgcgcccaggtccaggtgagcctcgaggactacatcaacgaccggcagtacgactcccgcggccggttcggggagctgctgctcctgctgcccaccctccagagcatcacgtggcagatgatcgagcagatccagttcatcaagctgttcggcatggccaagatcgacaacctgctccaggagatgctgctgtgaggactagtccctgttcccagagcccacttttttttctttttttgaaataaaatagcctgtctttcagatctaaaaaaaaaaaaaaaaaaaaaaaaaaaaaaaaaaaaaaaaaaaaaaaaaaaaaaaaaaaaaaaaaaaaaaaaaaaaaaaaaaaaaaaaaaaaaaaaaaaa

SEQ ID NO: 4766 - RNA, 1376 nt, synthetic construct
  misc_feature 1..1376: note = mRNA a-1 (A100) (opt1) from Homo sapiens__NP_000448.3__HNF4A(1-375)(S87A_K106R_K108R_K126R_K 127R)
  source 1..1376: mol_type = other RNA
aggagagtcccgcagtcggcgtccagcggctctgcttgttcgtgtgtgtgtcgttgcaggccttattcaagcttaccatgcgcctgagcaagaccctcgtggacatggacatggccgactactccgccgcgctggaccccgcctacaccacgctggagttcgagaacgtccaggtgctcaccatgggcaacgacaccagcccgtccgaggggaccaacctgaacgcccccaacagcctgggcgtgtccgccctctgcgccatctgcggggaccgggcgacgggcaagcactacggggccagctcctgcgacggctgcaagggcttcttccgccgggccgtccgcaagaaccacatgtacagctgccggttctcccgccagtgcgtggtggaccgggaccgccggaaccagtgccgctactgccggctgaagaagtgcttccgcgccgggatgcggcgcgaggcggtccagaacgagcgggaccgcatcagcacccggcgctccagctacgaggactccagcctgccctccatcaacgccctcctgcaggccgaggtgctgagccggcagatcacctcccccgtgagcggcatcaacggggacatccgcgccaagaagatcgcctccatcgcggacgtctgcgagagcatgaaggagcagctcctggtgctggtggagtgggccaagtacatcccggccttctgcgagctccccctggacgaccaggtcgccctgctccgggcccacgcgggcgagcacctcctgctgggggccaccaagcgcagcatggtgttcaaggacgtgctgctgctcggcaacgactacatcgtcccccgccactgccccgagctggccgagatgtcccgggtgagcatccgcatcctggacgagctcgtgctgccgttccaggagctgcagatcgacgacaacgagtacgcctacctcaaggccatcatcttcttcgaccccgacgcgaagggcctgtccgaccccgggaagatcaagcggctgcgcagccaggtccaggtgtccctcgaggactacatcaacgaccggcagtacgacagccgcggccggttcggggagctgctgctcctgctgcccacgctccagtccatcacctggcagatgatcgagcagatccagttcatcaagctgttcggcatggccaagatcgacaacctgctccaggagatgctgctgtgaggactagtccctgttcccagagcccacttttttttctttttttgaaataaaatagcctgtctttcagatctaaaaaaaaaaaaaaaaaaaaaaaaaaaaaaaaaaaaaaaaaaaaaaaaaaaaaaaaaaaaaaaaaaaaaaaaaaaaaaaaaaaaaaaaaaaaaaaaaaaa

SEQ ID NO: 4767 - RNA, 1376 nt, synthetic construct; identical to SEQ ID NO: 4765
  misc_feature 1..1376: note = mRNA a-1 (A100) (opt1) from Homo sapiens__NP_000448.3__HNF4A(1-375)(S87A_K106R_K108R_K126R_K 127R_S142A_S143A_S148A_T166A_S167A_S313A_S378A_T429A_T432A_ S436A_K458R_S461A)
  source 1..1376: mol_type = other RNA

SEQ ID NO: 4768 - RNA, 1376 nt, synthetic construct; identical to SEQ ID NO: 4765
  misc_feature 1..1376: note = mRNA a-1 (A100) (opt1) from Homo sapiens__NP_000448.3__HNF4A(1-375)(S87A_K106R_K108R_K126R_K 127R_S142A_S143A_S148A_T166A_S167A_S313A_S378A_T429A_T432A_ S436A_K458R_S461E)
  source 1..1376: mol_type = other RNA

SEQ ID NO: 4769 - RNA, 1376 nt, synthetic construct
  misc_feature 1..1376: note = mRNA a-1 (A100) (opt1) from Homo sapiens__NP_000448.3__HNF4A(1-375)(S87A_K106R_K108R_K126R_K 127R_S142A_S143A_S148E_T166A_S167E_S313A_S378E_T429E_T432E_ S436E_K458R_S461E)
  source 1..1376: mol_type = other RNA
aggagagtcccgcagtcggcgtccagcggctctgcttgttcgtgtgtgtgtcgttgcaggccttattcaagcttaccatgcgcctgagcaagaccctcgtggacatggacatggccgactactccgccgcgctggaccccgcctacaccacgctggagttcgagaacgtccaggtgctcaccatgggcaacgacaccagcccgtccgaggggaccaacctgaacgcccccaacagcctgggcgtgtccgccctctgcgccatctgcggggaccgggcgacgggcaagcactacggggccagctcctgcgacggctgcaagggcttcttccgccgggccgtccgcaagaaccacatgtacagctgccggttctcccgccagtgcgtggtggaccgggaccgccggaaccagtgccgctactgccggctgaagaagtgcttccgcgccgggatgcggcgcgaggcggtccagaacgagcgggaccgcatcagcacccggcgcgccgcctacgaggactccgagctgcccagcatcaacgccctcctgcaggccgaggtgctgtcccggcagatcgcggagcccgtgagcggcatcaacggggacatccgcgccaagaagatcgcctccatcgccgacgtctgcgagagcatgaaggagcagctcctggtgctggtggagtgggccaagtacatcccggcgttctgcgagctccccctggacgaccaggtcgccctgctccgggcccacgccggcgagcacctcctgctgggggccaccaagcgctccatggtgttcaaggacgtgctgctgctcggcaacgactacatcgtcccccgccactgccccgagctggcggagatgagccgggtgtccatccgcatcctggacgagctcgtgctgccgttccaggagctgcagatcgacgacaacgagtacgcctacctcaaggccatcatcttcttcgaccccgacgccaagggcctgagcgaccccgggaagatcaagcggctgcgcgcccaggtccaggtgagcctcgaggactacatcaacgaccggcagtacgactcccgcggccggttcggggagctgctgctcctgctgcccaccctccagagcatcacgtggcagatgatcgagcagatccagttcatcaagctgttcggcatggcgaagatcgacaacctgctccaggagatgctgctgtgaggactagtccctgttcccagagcccacttttttttctttttttgaaataaaatagcctgtctttcagatctaaaaaaaaaaaaaaaaaaaaaaaaaaaaaaaaaaaaaaaaaaaaaaaaaaaaaaaaaaaaaaaaaaaaaaaaaaaaaaaaaaaaaaaaaaaaaaaaaaaa

SEQ ID NO: 4770 - RNA, 1376 nt, synthetic construct
  misc_feature 1..1376: note = mRNA a-1 (A100) (opt1) from Homo sapiens__NP_000448.3__HNF4A(1-375)(S87A_K106R_K108R_K126R_K 127R_S142A_S143A_S148A_T166A_S167A_K179R_K180R_S313A_S378A_ T429A_T432A_S436A_K458R_S461E)
  source 1..1376: mol_type = other RNA
aggagagtcccgcagtcggcgtccagcggctctgcttgttcgtgtgtgtgtcgttgcaggccttattcaagcttaccatgcgcctgagcaagaccctcgtggacatggacatggccgactactccgccgcgctggaccccgcctacaccacgctggagttcgagaacgtccaggtgctcaccatgggcaacgacaccagcccgtccgaggggaccaacctgaacgcccccaacagcctgggcgtgtccgccctctgcgccatctgcggggaccgggcgacgggcaagcactacggggccagctcctgcgacggctgcaagggcttcttccgccgggccgtccgcaagaaccacatgtacagctgccggttctcccgccagtgcgtggtggaccgggaccgccggaaccagtgccgctactgccggctgaagaagtgcttccgcgccgggatgcggcgcgaggcggtccagaacgagcgggaccgcatcagcacccggcgcgccgcctacgaggactccgccctgcccagcatcaacgccctcctgcaggcggaggtgctgtcccggcagatcgccgcccccgtgagcggcatcaacggggacatccgcgcccggcgcatcgcctccatcgcggacgtctgcgagagcatgaaggagcagctcctggtgctggtggagtgggccaagtacatcccggccttctgcgagctccccctggacgaccaggtcgccctgctccgcgcccacgcgggcgagcacctcctgctgggggccaccaagcggtccatggtgttcaaggacgtgctgctgctcggcaacgactacatcgtcccccgccactgccccgagctggccgagatgagccgggtgtccatccgcatcctggacgagctcgtgctgccgttccaggagctgcagatcgacgacaacgagtacgcctacctcaaggccatcatcttcttcgaccccgacgcgaagggcctgagcgaccccgggaagatcaagcggctgcgcgcccaggtccaggtgagcctcgaggactacatcaacgaccggcagtacgactcccgcggccggttcggggagctgctgctcctgctgcccaccctccagagcatcacgtggcagatgatcgagcagatccagttcatcaagctgttcggcatggccaagatcgacaacctgctccaggagatgctgctgtgaggactagtccctgttcccagagcccacttttttttctttttttgaaataaaatagcctgtctttcagatctaaaaaaaaaaaaaaaaaaaaaaaaaaaaaaaaaaaaaaaaaaaaaaaaaaaaaaaaaaaaaaaaaaaaaaaaaaaaaaaaaaaaaaaaaaaaaaaaaaaa

SEQ ID NO: 4771 - RNA, 1376 nt, synthetic construct
  misc_feature 1..1376: note = mRNA a-1 (A100) (opt1) from Homo sapiens__NP_000448.3__HNF4A(1-375)(S87A_K106R_K108R_K126R_K 127R_S142A_S143A_S148A_T166A_S167A_K300R_K307R_K309R_S313A_ S378A_T429A_T432A_S436A_K458R_S461E)
  source 1..1376: mol_type = other RNA
aggagagtcccgcagtcggcgtccagcggctctgcttgttcgtgtgtgtgtcgttgcaggccttattcaagcttaccatgcgcctgagcaagaccctcgtggacatggacatggccgactactccgccgcgctggaccccgcctacaccacgctggagttcgagaacgtccaggtgctcaccatgggcaacgacaccagcccgtccgaggggaccaacctgaacgcccccaacagcctgggcgtgtccgccctctgcgccatctgcggggaccgggcgacgggcaagcactacggggccagctcctgcgacggctgcaagggcttcttccgccgggccgtccgcaagaaccacatgtacagctgccggttctcccgccagtgcgtggtggaccgggaccgccggaaccagtgccgctactgccggctgaagaagtgcttccgcgccgggatgcggcgcgaggcggtccagaacgagcgggaccgcatcagcacccggcgcgccgcctacgaggactccgccctgcccagcatcaacgccctcctgcaggcggaggtgctgtcccggcagatcgccgcccccgtgagcggcatcaacggggacatccgcgccaagaagatcgcctccatcgcggacgtctgcgagagcatgaaggagcagctcctggtgctggtggagtgggccaagtacatcccggccttctgcgagctccccctggacgaccaggtcgccctgctccgggcccacgcgggcgagcacctcctgctgggggccaccaagcgctccatggtgttcaaggacgtgctgctgctcggcaacgactacatcgtcccccgccactgccccgagctggccgagatgagccgggtgtccatccgcatcctggacgagctcgtgctgccgttccaggagctgcagatcgacgacaacgagtacgcctacctcaaggccatcatcttcttcgaccccgacgcgcggggcctgagcgaccccgggcgcatccggcgcctgcgggcccaggtccaggtgagcctcgaggactacatcaacgaccgccagtacgactcccggggccgcttcggggagctgctgctcctgctgcccaccctccagagcatcacgtggcagatgatcgagcagatccagttcatcaagctgttcggcatggccaagatcgacaacctgctccaggagatgctgctgtgaggactagtccctgttcccagagcccacttttttttctttttttgaaataaaatagcctgtctttcagatctaaaaaaaaaaaaaaaaaaaaaaaaaaaaaaaaaaaaaaaaaaaaaaaaaaaaaaaaaaaaaaaaaaaaaaaaaaaaaaaaaaaaaaaaaaaaaaaaaaaa

SEQ ID NO: 4772 - RNA, 1376 nt, synthetic construct; identical to SEQ ID NO: 4765
  misc_feature 1..1376: note = mRNA a-1 (A100) (opt1) from Homo sapiens__NP_000448.3__HNF4A(1-375)(S87A_K106R_K108R_K126R_K 127R_S142A_S143A_S148A_T166A_S167A_S313A_S378A_T429A_T432A_ S436A_K447R_K458R_S461E_K470R)
  source 1..1376: mol_type = other RNA

SEQ ID NO: 4773 - RNA, 1376 nt, synthetic construct
  misc_feature 1..1376: note = mRNA a-1 (A100) (opt1) from Homo sapiens__NP_000448.3__HNF4A(1-375)(S87A_K106R_K108R_K126R_K 127R_S142A_S143A_S148A_T166A_S167A_K179R_K180R_K234R_K300R_ K307R_K309R_S313A_S378A_T429A_T432A_S436A_K447R_K458R_S461E _K470R)
  source 1..1376: mol_type = other RNA
aggagagtcccgcagtcggcgtccagcggctctgcttgttcgtgtgtgtgtcgttgcaggccttattcaagcttaccatgcgcctgagcaagaccctcgtggacatggacatggccgactactccgccgcgctggaccccgcctacaccacgctggagttcgagaacgtccaggtgctcaccatgggcaacgacaccagcccgtccgaggggaccaacctgaacgcccccaacagcctgggcgtgtccgccctctgcgccatctgcggggaccgggcgacgggcaagcactacggggccagctcctgcgacggctgcaagggcttcttccgccgggccgtccgcaagaaccacatgtacagctgccggttctcccgccagtgcgtggtggaccgggaccgccggaaccagtgccgctactgccggctgaagaagtgcttccgcgccgggatgcggcgcgaggcggtccagaacgagcgggaccgcatcagcacccggcgcgccgcctacgaggactccgccctgcccagcatcaacgccctcctgcaggcggaggtgctgtcccggcagatcgccgcccccgtgagcggcatcaacggggacatccgcgcccggcgcatcgcctccatcgcggacgtctgcgagagcatgaaggagcagctcctggtgctggtggagtgggccaagtacatcccggccttctgcgagctccccctggacgaccaggtcgccctgctccgcgcccacgcgggcgagcacctcctgctgggggccacccggcgctccatggtgttcaaggacgtgctgctgctcggcaacgactacatcgtcccccggcactgccccgagctggccgagatgagccgcgtgtccatccggatcctggacgagctcgtgctgccgttccaggagctgcagatcgacgacaacgagtacgcctacctcaaggccatcatcttcttcgaccccgacgcgcgcggcctgagcgaccccgggcggatccgccggctgcgcgcccaggtccaggtgagcctcgaggactacatcaacgaccggcagtacgactcccgcggccggttcggggagctgctgctcctgctgcccaccctccagagcatcacgtggcagatgatcgagcagatccagttcatcaagctgttcggcatggccaagatcgacaacctgctccaggagatgctgctgtgaggactagtccctgttcccagagcccacttttttttctttttttgaaataaaatagcctgtctttcagatctaaaaaaaaaaaaaaaaaaaaaaaaaaaaaaaaaaaaaaaaaaaaaaaaaaaaaaaaaaaaaaaaaaaaaaaaaaaaaaaaaaaaaaaaaaaaaaaaaaaa

SEQ ID NO: 4774 - RNA, 1376 nt, synthetic construct
  misc_feature 1..1376: note = mRNA a-1 (A100) (opt1) from Homo sapiens__NP_000448.3__HNF4A(1-375)(S87A_S95A_S99A_K106R_K10 8R_K126R_K127R_S142A_S143A_S148A_T166A_S167A_S313A_S378A_T4 29A_T432A_S436A_K458R_S461E)
  source 1..1376: mol_type = other RNA
aggagagtcccgcagtcggcgtccagcggctctgcttgttcgtgtgtgtgtcgttgcaggccttattcaagcttaccatgcgcctgagcaagaccctcgtggacatggacatggccgactactccgccgcgctggaccccgcctacaccacgctggagttcgagaacgtccaggtgctcaccatgggcaacgacaccagcccgtccgaggggaccaacctgaacgcccccaacagcctgggcgtgtccgccctctgcgccatctgcggggaccgggcgacgggcaagcactacggggccagctcctgcgacggctgcaagggcttcttccgccgggccgtccgcaagaaccacatgtacgcctgccggttcgcgcgccagtgcgtggtggaccgggaccgccggaaccagtgccgctactgccggctgaagaagtgcttccgcgccgggatgcggcgcgaggccgtccagaacgagcgggaccgcatcagcacccggcgcgccgcctacgaggactccgcgctgcccagcatcaacgccctcctgcaggccgaggtgctgtcccggcagatcgccgcccccgtgagcggcatcaacggggacatccgcgcgaagaagatcgcctccatcgccgacgtctgcgagagcatgaaggagcagctcctggtgctggtggagtgggccaagtacatcccggccttctgcgagctccccctggacgaccaggtcgcgctgctccgggcccacgccggcgagcacctcctgctgggggccaccaagcgctccatggtgttcaaggacgtgctgctgctcggcaacgactacatcgtcccccgccactgccccgagctggccgagatgagccgggtgtccatccgcatcctggacgagctcgtgctgccgttccaggagctgcagatcgacgacaacgagtacgcgtacctcaaggccatcatcttcttcgaccccgacgccaagggcctgagcgaccccgggaagatcaagcggctgcgcgcccaggtccaggtgtccctcgaggactacatcaacgaccggcagtacgacagccgcggccggttcggggagctgctgctcctgctgcccaccctccagagcatcacgtggcagatgatcgagcagatccagttcatcaagctgttcggcatggcgaagatcgacaacctgctccaggagatgctgctgtgaggactagtccctgttcccagagcccacttttttttctttttttgaaataaaatagcctgtctttcagatctaaaaaaaaaaaaaaaaaaaaaaaaaaaaaaaaaaaaaaaaaaaaaaaaaaaaaaaaaaaaaaaaaaaaaaaaaaaaaaaaaaaaaaaaaaaaaaaaaaaa

SEQ ID NO: 4775 - RNA, 1376 nt, synthetic construct
  misc_feature 1..1376: note = mRNA a-1 (A100) (opt1) from Homo sapiens__NP_000448.3__HNF4A(1-375)(S87A_K106R_K108R_K126R_K 127R_S138A_T139A_S142A_S143A_S148A_T166A_S167A_S313A_S378A_ T429A_T432A_S436A_K458R_S461E)
  source 1..1376: mol_type = other RNA
aggagagtcccgcagtcggcgtccagcggctctgcttgttcgtgtgtgtgtcgttgcaggccttattcaagcttaccatgcgcctgagcaagaccctcgtggacatggacatggccgactactccgccgcgctggaccccgcctacaccacgctggagttcgagaacgtccaggtgctcaccatgggcaacgacaccagcccgtccgaggggaccaacctgaacgcccccaacagcctgggcgtgtccgccctctgcgccatctgcggggaccgggcgacgggcaagcactacggggccagctcctgcgacggctgcaagggcttcttccgccgggccgtccgcaagaaccacatgtacagctgccggttctcccgccagtgcgtggtggaccgggaccgccggaaccagtgccgctactgccggctgaagaagtgcttccgcgccgggatgcggcgcgaggcggtccagaacgagcgggaccgcatcgccgcccggcgcgccgcctacgaggacagcgcgctgccctccatcaacgccctcctgcaggccgaggtgctgagccggcagatcgccgcccccgtgtccggcatcaacggggacatccgcgcgaagaagatcgccagcatcgccgacgtctgcgagtccatgaaggagcagctcctggtgctggtggagtgggccaagtacatcccggccttctgcgagctccccctggacgaccaggtcgcgctgctccgggcccacgccggcgagcacctcctgctgggggccaccaagcgcagcatggtgttcaaggacgtgctgctgctcggcaacgactacatcgtcccccgccactgccccgagctggccgagatgtcccgggtgagcatccgcatcctggacgagctcgtgctgccgttccaggagctgcagatcgacgacaacgagtacgcgtacctcaaggccatcatcttcttcgaccccgacgccaagggcctgtccgaccccgggaagatcaagcggctgcgcgcccaggtccaggtgagcctcgaggactacatcaacgaccggcagtacgacagccgcggccggttcggggagctgctgctcctgctgcccaccctccagtccatcacctggcagatgatcgagcagatccagttcatcaagctgttcggcatggcgaagatcgacaacctgctccaggagatgctgctgtgaggactagtccctgttcccagagcccacttttttttctttttttgaaataaaatagcctgtctttcagatctaaaaaaaaaaaaaaaaaaaaaaaaaaaaaaaaaaaaaaaaaaaaaaaaaaaaaaaaaaaaaaaaaaaaaaaaaaaaaaaaaaaaaaaaaaaaaaaaaaaa

SEQ ID NO: 4776 - RNA, 1376 nt, synthetic construct
  misc_feature 1..1376: note = mRNA a-1 (A100) (opt1) from Homo sapiens__NP_000448.3__HNF4A(1-375)(S87A_S95A_S99A_K106R_K10 8R_K126R_K127R_S138A_T139A_S142A_S143A_S148A_T166A_S167A_S3 13A_S378A_T429A_T432A_S436A_K458R_S461E)
  source 1..1376: mol_type = other RNA
aggagagtcccgcagtcggcgtccagcggctctgcttgttcgtgtgtgtgtcgttgcaggccttattcaagcttaccatgcgcctgagcaagaccctcgtggacatggacatggccgactactccgccgcgctggaccccgcctacaccacgctggagttcgagaacgtccaggtgctcaccatgggcaacgacaccagcccgtccgaggggaccaacctgaacgcccccaacagcctgggcgtgtccgccctctgcgccatctgcggggaccgggcgacgggcaagcactacggggccagctcctgcgacggctgcaagggcttcttccgccgggccgtccgcaagaaccacatgtacgcctgccggttcgcgcgccagtgcgtggtggaccgggaccgccggaaccagtgccgctactgccggctgaagaagtgcttccgcgccgggatgcggcgcgaggccgtccagaacgagcgggaccgcatcgccgcccggcgcgcggcctacgaggacagcgccctgccctccatcaacgccctcctgcaggccgaggtgctgagccggcagatcgcggcccccgtgtccggcatcaacggggacatccgcgccaagaagatcgccagcatcgccgacgtctgcgagtccatgaaggagcagctcctggtgctggtggagtgggcgaagtacatcccggccttctgcgagctccccctggacgaccaggtcgccctgctccgggcccacgccggcgagcacctcctgctgggggcgaccaagcgcagcatggtgttcaaggacgtgctgctgctcggcaacgactacatcgtcccccgccactgccccgagctggccgagatgtcccgggtgagcatccgcatcctggacgagctcgtgctgccgttccaggagctgcagatcgacgacaacgagtacgcctacctcaaggccatcatcttcttcgaccccgacgcgaagggcctgtccgaccccgggaagatcaagcggctgcgcgcccaggtccaggtgagcctcgaggactacatcaacgaccggcagtacgactcccgcggccggttcggggagctgctgctcctgctgcccaccctccagagcatcacctggcagatgatcgagcagatccagttcatcaagctgttcggcatggccaagatcgacaacctgctccaggagatgctgctgtgaggactagtccctgttcccagagcccacttttttttctttttttgaaataaaatagcctgtctttcagatctaaaaaaaaaaaaaaaaaaaaaaaaaaaaaaaaaaaaaaaaaaaaaaaaaaaaaaaaaaaaaaaaaaaaaaaaaaaaaaaaaaaaaaaaaaaaaaaaaaaa

SEQ ID NO: 4777 - RNA, 1376 nt, synthetic construct
  misc_feature 1..1376: note = mRNA a-1 (A100) (opt2) from Homo sapiens__NP_000448.3__HNF4A(1-375)
  source 1..1376: mol_type = other RNA
aggagagtcccgcagtcggcgtccagcggctctgcttgttcgtgtgtgtgtcgttgcaggccttattcaagcttaccatgcgcctctccaagaccctcgtcgacatggacatggccgactactccgccgccctcgaccccgcctacaccaccctcgagttcgagaacgtccaggtcctcaccatgggcaacgacacctccccctccgagggcaccaacctcaacgcccccaactccctcggcgtctccgccctctgcgccatctgcggcgaccgcgccaccggcaagcactacggcgcctcctcctgcgacggctgcaagggcttcttccgccgctccgtccgcaagaaccacatgtactcctgccgcttctcccgccagtgcgtcgtcgacaaggacaagcgcaaccagtgccgctactgccgcctcaagaagtgcttccgcgccggcatgaagaaggaggccgtccagaacgagcgcgaccgcatctccacccgccgctcctcctacgaggactcctccctcccctccatcaacgccctcctccaggccgaggtcctctcccgccagatcacctcccccgtctccggcatcaacggcgacatccgcgccaagaagatcgcctccatcgccgacgtctgcgagtccatgaaggagcagctcctcgtcctcgtcgagtgggccaagtacatccccgccttctgcgagctccccctcgacgaccaggtcgccctcctccgcgcccacgccggcgagcacctcctcctcggcgccaccaagcgctccatggtcttcaaggacgtcctcctcctcggcaacgactacatcgtcccccgccactgccccgagctcgccgagatgtcccgcgtctccatccgcatcctcgacgagctcgtcctccccttccaggagctccagatcgacgacaacgagtacgcctacctcaaggccatcatcttcttcgaccccgacgccaagggcctctccgaccccggcaagatcaagcgcctccgctcccaggtccaggtctccctcgaggactacatcaacgaccgccagtacgactcgcgcgggcgcttcggcgagctcctcctcctcctccccaccctccagtccatcacctggcagatgatcgagcagatccagttcatcaagctgttcggcatggccaagatcgacaacctcctccaggagatgctcctctgaggactagtccctgttcccagagcccacttttttttctttttttgaaataaaatagcctgtctttcagatctaaaaaaaaaaaaaaaaaaaaaaaaaaaaaaaaaaaaaaaaaaaaaaaaaaaaaaaaaaaaaaaaaaaaaaaaaaaaaaaaaaaaaaaaaaaaaaaaaaaa

SEQ ID NO: 4778 - RNA, 1376 nt, synthetic construct
  misc_feature 1..1376: note = mRNA a-1 (A100) (opt2) from Homo sapiens__NP_000448.3__HNF4A(1-375)(S313A)
  source 1..1376: mol_type = other RNA
aggagagtcccgcagtcggcgtccagcggctctgcttgttcgtgtgtgtgtcgttgcaggccttattcaagcttaccatgcgcctctccaagaccctcgtcgacatggacatggccgactactccgccgccctcgaccccgcctacaccaccctcgagttcgagaacgtccaggtcctcaccatgggcaacgacacctccccctccgagggcaccaacctcaacgcccccaactccctcggcgtctccgccctctgcgccatctgcggcgaccgcgccaccggcaagcactacggcgcctcctcctgcgacggctgcaagggcttcttccgccgctccgtccgcaagaaccacatgtactcctgccgcttctcccgccagtgcgtcgtcgacaaggacaagcgcaaccagtgccgctactgccgcctcaagaagtgcttccgcgccggcatgaagaaggaggccgtccagaacgagcgcgaccgcatctccacccgccgctcctcctacgaggactcctccctcccctccatcaacgccctcctccaggccgaggtcctctcccgccagatcacctcccccgtctccggcatcaacggcgacatccgcgccaagaagatcgcctccatcgccgacgtctgcgagtccatgaaggagcagctcctcgtcctcgtcgagtgggccaagtacatccccgccttctgcgagctccccctcgacgaccaggtcgccctcctccgcgcccacgccggcgagcacctcctcctcggcgccaccaagcgctccatggtcttcaaggacgtcctcctcctcggcaacgactacatcgtcccccgccactgccccgagctcgccgagatgtcccgcgtctccatccgcatcctcgacgagctcgtcctccccttccaggagctccagatcgacgacaacgagtacgcctacctcaaggccatcatcttcttcgaccccgacgccaagggcctctccgaccccggcaagatcaagcgcctccgcgcccaggtccaggtctccctcgaggactacatcaacgaccgccagtacgactcccgcggccgcttcggcgagctcctcctcctcctccccaccctccagtccatcacctggcagatgatcgagcagatccagttcatcaagctcttcggcatggccaagatcgacaacctcctccaggagatgctcctctgaggactagtccctgttcccagagcccacttttttttctttttttgaaataaaatagcctgtctttcagatctaaaaaaaaaaaaaaaaaaaaaaaaaaaaaaaaaaaaaaaaaaaaaaaaaaaaaaaaaaaaaaaaaaaaaaaaaaaaaaaaaaaaaaaaaaaaaaaaaaaa

SEQ ID NO: 4779 - RNA, 1376 nt, synthetic construct
  misc_feature 1..1376: note = mRNA a-1 (A100) (opt2) from Homo sapiens__NP_000448.3__HNF4A(1-375)(S313E)
  source 1..1376: mol_type = other RNA
aggagagtcccgcagtcggcgtccagcggctctgcttgttcgtgtgtgtgtcgttgcaggccttattcaagcttaccatgcgcctctccaagaccctcgtcgacatggacatggccgactactccgccgccctcgaccccgcctacaccaccctcgagttcgagaacgtccaggtcctcaccatgggcaacgacacctccccctccgagggcaccaacctcaacgcccccaactccctcggcgtctccgccctctgcgccatctgcggcgaccgcgccaccggcaagcactacggcgcctcctcctgcgacggctgcaagggcttcttccgccgctccgtccgcaagaaccacatgtactcctgccgcttctcccgccagtgcgtcgtcgacaaggacaagcgcaaccagtgccgctactgccgcctcaagaagtgcttccgcgccggcatgaagaaggaggccgtccagaacgagcgcgaccgcatctccacccgccgctcctcctacgaggactcctccctcccctccatcaacgccctcctccaggccgaggtcctctcccgccagatcacctcccccgtctccggcatcaacggcgacatccgcgccaagaagatcgcctccatcgccgacgtctgcgagtccatgaaggagcagctcctcgtcctcgtcgagtgggccaagtacatccccgccttctgcgagctccccctcgacgaccaggtcgccctcctccgcgcccacgccggcgagcacctcctcctcggcgccaccaagcgctccatggtcttcaaggacgtcctcctcctcggcaacgactacatcgtcccccgccactgccccgagctcgccgagatgtcccgcgtctccatccgcatcctcgacgagctcgtcctccccttccaggagctccagatcgacgacaacgagtacgcctacctcaaggccatcatcttcttcgaccccgacgccaagggcctctccgaccccggcaagatcaagcgcctccgcgagcaggtccaggtctccctcgaggactacatcaacgaccgccagtacgactcccgcggccgcttcggcgagctcctcctcctcctccccaccctccagtccatcacctggcagatgatcgagcagatccagttcatcaagctcttcggcatggccaagatcgacaacctcctccaggagatgctcctctgaggactagtccctgttcccagagcccacttttttttctttttttgaaataaaatagcctgtctttcagatctaaaaaaaaaaaaaaaaaaaaaaaaaaaaaaaaaaaaaaaaaaaaaaaaaaaaaaaaaaaaaaaaaaaaaaaaaaaaaaaaaaaaaaaaaaaaaaaaaaaa

SEQ ID NO: 4780 - RNA, 1376 nt, synthetic construct
  misc_feature 1..1376: note = mRNA a-1 (A100) (opt2) from Homo sapiens__NP_000448.3__HNF4A(1-375)(S142A_S143A)
  source 1..1376: mol_type = other RNA
aggagagtcccgcagtcggcgtccagcggctctgcttgttcgtgtgtgtgtcgttgcaggccttattcaagcttaccatgcgcctctccaagaccctcgtcgacatggacatggccgactactccgccgccctcgaccccgcctacaccaccctcgagttcgagaacgtccaggtcctcaccatgggcaacgacacctccccctccgagggcaccaacctcaacgcccccaactccctcggcgtctccgccctctgcgccatctgcggcgaccgcgccaccggcaagcactacggcgcctcctcctgcgacggctgcaagggcttcttccgccgctccgtccgcaagaaccacatgtactcctgccgcttctcccgccagtgcgtcgtcgacaaggacaagcgcaaccagtgccgctactgccgcctcaagaagtgcttccgcgccggcatgaagaaggaggccgtccagaacgagcgcgaccgcatctccacccgccgcgccgcctacgaggactcctccctcccctccatcaacgccctcctccaggccgaggtcctctcccgccagatcacctcccccgtctccggcatcaacggcgacatccgcgccaagaagatcgcctccatcgccgacgtctgcgagtccatgaaggagcagctcctcgtcctcgtcgagtgggccaagtacatccccgccttctgcgagctccccctcgacgaccaggtcgccctcctccgcgcccacgccggcgagcacctcctcctcggcgccaccaagcgctccatggtcttcaaggacgtcctcctcctcggcaacgactacatcgtcccccgccactgccccgagctcgccgagatgtcccgcgtctccatccgcatcctcgacgagctcgtcctccccttccaggagctccagatcgacgacaacgagtacgcctacctcaaggccatcatcttcttcgaccccgacgccaagggcctctccgaccccggcaagatcaagcgcctccgctcccaggtccaggtctccctcgaggactacatcaacgaccgccagtacgactcccgcggccgcttcggcgagctcctcctcctcctccccaccctccagtccatcacctggcagatgatcgagcagatccagttcatcaagctcttcggcatggccaagatcgacaacctcctccaggagatgctcctctgaggactagtccctgttcccagagcccacttttttttctttttttgaaataaaatagcctgtctttcagatctaaaaaaaaaaaaaaaaaaaaaaaaaaaaaaaaaaaaaaaaaaaaaaaaaaaaaaaaaaaaaaaaaaaaaaaaaaaaaaaaaaaaaaaaaaaaaaaaaaaa

SEQ ID NO: 4781 - RNA, 1376 nt, synthetic construct
  misc_feature 1..1376: note = mRNA a-1 (A100) (opt2) from Homo sapiens__NP_000448.3__HNF4A(1-375)(S142E_S143E)
  source 1..1376: mol_type = other RNA
aggagagtcccgcagtcggcgtccagcggctctgcttgttcgtgtgtgtgtcgttgcaggccttattcaagcttaccatgcgcctctccaagaccctcgtcgacatggacatggccgactactccgccgccctcgaccccgcctacaccaccctcgagttcgagaacgtccaggtcctcaccatgggcaacgacacctccccctccgagggcaccaacctcaacgcccccaactccctcggcgtctccgccctctgcgccatctgcggcgaccgcgccaccggcaagcactacggcgcctcctcctgcgacggctgcaagggcttcttccgccgctccgtccgcaagaaccacatgtactcctgccgcttctcccgccagtgcgtcgtcgacaaggacaagcgcaaccagtgccgctactgccgcctcaagaagtgcttccgcgccggcatgaagaaggaggccgtccagaacgagcgcgaccgcatctccacccgccgcgaggagtacgaggactcctccctcccctccatcaacgccctcctccaggccgaggtcctctcccgccagatcacctcccccgtctccggcatcaacggcgacatccgcgccaagaagatcgcctccatcgccgacgtctgcgagtccatgaaggagcagctcctcgtcctcgtcgagtgggccaagtacatccccgccttctgcgagctccccctcgacgaccaggtcgccctcctccgcgcccacgccggcgagcacctcctcctcggcgccaccaagcgctccatggtcttcaaggacgtcctcctcctcggcaacgactacatcgtcccccgccactgccccgagctcgccgagatgtcccgcgtctccatccgcatcctcgacgagctcgtcctccccttccaggagctccagatcgacgacaacgagtacgcctacctcaaggccatcatcttcttcgaccccgacgccaagggcctctccgaccccggcaagatcaagcgcctccgctcccaggtccaggtctccctcgaggactacatcaacgaccgccagtacgactcccgcggccgcttcggcgagctcctcctcctcctccccaccctccagtccatcacctggcagatgatcgagcagatccagttcatcaagctcttcggcatggccaagatcgacaacctcctccaggagatgctcctctgaggactagtccctgttcccagagcccacttttttttctttttttgaaataaaatagcctgtctttcagatctaaaaaaaaaaaaaaaaaaaaaaaaaaaaaaaaaaaaaaaaaaaaaaaaaaaaaaaaaaaaaaaaaaaaaaaaaaaaaaaaaaaaaaaaaaaaaaaaaaaa

SEQ ID NO: 4782 - RNA, 1376 nt, synthetic construct
  misc_feature 1..1376: note = mRNA a-1 (A100) (opt2) from Homo sapiens__NP_000448.3__HNF4A(1-375)(S143A)
  source 1..1376: mol_type = other RNA
aggagagtcccgcagtcggcgtccagcggctctgcttgttcgtgtgtgtgtcgttgcaggccttattcaagcttaccatgcgcctctccaagaccctcgtcgacatggacatggccgactactccgccgccctcgaccccgcctacaccaccctcgagttcgagaacgtccaggtcctcaccatgggcaacgacacctccccctccgagggcaccaacctcaacgcccccaactccctcggcgtctccgccctctgcgccatctgcggcgaccgcgccaccggcaagcactacggcgcctcctcctgcgacggctgcaagggcttcttccgccgctccgtccgcaagaaccacatgtactcctgccgcttctcccgccagtgcgtcgtcgacaaggacaagcgcaaccagtgccgctactgccgcctcaagaagtgcttccgcgccggcatgaagaaggaggccgtccagaacgagcgcgaccgcatctccacccgccgctccgcctacgaggactcctccctcccctccatcaacgccctcctccaggccgaggtcctctcccgccagatcacctcccccgtctccggcatcaacggcgacatccgcgccaagaagatcgcctccatcgccgacgtctgcgagtccatgaaggagcagctcctcgtcctcgtcgagtgggccaagtacatccccgccttctgcgagctccccctcgacgaccaggtcgccctcctccgcgcccacgccggcgagcacctcctcctcggcgccaccaagcgctccatggtcttcaaggacgtcctcctcctcggcaacgactacatcgtcccccgccactgccccgagctcgccgagatgtcccgcgtctccatccgcatcctcgacgagctcgtcctccccttccaggagctccagatcgacgacaacgagtacgcctacctcaaggccatcatcttcttcgaccccgacgccaagggcctctccgaccccggcaagatcaagcgcctccgctcccaggtccaggtctccctcgaggactacatcaacgaccgccagtacgactcccgcggccgcttcggcgagctcctcctcctcctccccaccctccagtccatcacctggcagatgatcgagcagatccagttcatcaagctcttcggcatggccaagatcgacaacctcctccaggagatgctcctctgaggactagtccctgttcccagagcccacttttttttctttttttgaaataaaatagcctgtctttcagatctaaaaaaaaaaaaaaaaaaaaaaaaaaaaaaaaaaaaaaaaaaaaaaaaaaaaaaaaaaaaaaaaaaaaaaaaaaaaaaaaaaaaaaaaaaaaaaaaaaaa

SEQ ID NO: 4783 - RNA, 1376 nt, synthetic construct
  misc_feature 1..1376: note = mRNA a-1 (A100) (opt2) from Homo sapiens__NP_000448.3__HNF4A(1-375)(T166A)
  source 1..1376: mol_type = other RNA
aggagagtcccgcagtcggcgtccagcggctctgcttgttcgtgtgtgtgtcgttgcaggccttattcaagcttaccatgcgcctctccaagaccctcgtcgacatggacatggccgactactccgccgccctcgaccccgcctacaccaccctcgagttcgagaacgtccaggtcctcaccatgggcaacgacacctccccctccgagggcaccaacctcaacgcccccaactccctcggcgtctccgccctctgcgccatctgcggcgaccgcgccaccggcaagcactacggcgcctcctcctgcgacggctgcaagggcttcttccgccgctccgtccgcaagaaccacatgtactcctgccgcttctcccgccagtgcgtcgtcgacaaggacaagcgcaaccagtgccgctactgccgcctcaagaagtgcttccgcgccggcatgaagaaggaggccgtccagaacgagcgcgaccgcatctccacccgccgctcctcctacgaggactcctccctcccctccatcaacgccctcctccaggccgaggtcctctcccgccagatcgcctcccccgtctccggcatcaacggcgacatccgcgccaagaagatcgcctccatcgccgacgtctgcgagtccatgaaggagcagctcctcgtcctcgtcgagtgggccaagtacatccccgccttctgcgagctccccctcgacgaccaggtcgccctcctccgcgcccacgccggcgagcacctcctcctcggcgccaccaagcgctccatggtcttcaaggacgtcctcctcctcggcaacgactacatcgtcccccgccactgccccgagctcgccgagatgtcccgcgtctccatccgcatcctcgacgagctcgtcctccccttccaggagctccagatcgacgacaacgagtacgcctacctcaaggccatcatcttcttcgaccccgacgccaagggcctctccgaccccggcaagatcaagcgcctccgctcccaggtccaggtctccctcgaggactacatcaacgaccgccagtacgactcccgcggccgcttcggcgagctcctcctcctcctccccaccctccagtccatcacctggcagatgatcgagcagatccagttcatcaagctcttcggcatggccaagatcgacaacctcctccaggagatgctcctctgaggactagtccctgttcccagagcccacttttttttctttttttgaaataaaatagcctgtctttcagatctaaaaaaaaaaaaaaaaaaaaaaaaaaaaaaaaaaaaaaaaaaaaaaaaaaaaaaaaaaaaaaaaaaaaaaaaaaaaaaaaaaaaaaaaaaaaaaaaaaaa

SEQ ID NO: 4784 - RNA, 1376 nt, synthetic construct
  misc_feature 1..1376: note = mRNA a-1 (A100) (opt2) from Homo sapiens__NP_000448.3__HNF4A(1-375)(S167E)
  source 1..1376: mol_type = other RNA
aggagagtcccgcagtcggcgtccagcggctctgcttgttcgtgtgtgtgtcgttgcaggccttattcaagcttaccatgcgcctctccaagaccctcgtcgacatggacatggccgactactccgccgccctcgaccccgcctacaccaccctcgagttcgagaacgtccaggtcctcaccatgggcaacgacacctccccctccgagggcaccaacctcaacgcccccaactccctcggcgtctccgccctctgcgccatctgcggcgaccgcgccaccggcaagcactacggcgcctcctcctgcgacggctgcaagggcttcttccgccgctccgtccgcaagaaccacatgtactcctgccgcttctcccgccagtgcgtcgtcgacaaggacaagcgcaaccagtgccgctactgccgcctcaagaagtgcttccgcgccggcatgaagaaggaggccgtccagaacgagcgcgaccgcatctccacccgccgctcctcctacgaggactcctccctcccctccatcaacgccctcctccaggccgaggtcctctcccgccagatcaccgagcccgtctccggcatcaacggcgacatccgcgccaagaagatcgcctccatcgccgacgtctgcgagtccatgaaggagcagctcctcgtcctcgtcgagtgggccaagtacatccccgccttctgcgagctccccctcgacgaccaggtcgccctcctccgcgcccacgccggcgagcacctcctcctcggcgccaccaagcgctccatggtcttcaaggacgtcctcctcctcggcaacgactacatcgtcccccgccactgccccgagctcgccgagatgtcccgcgtctccatccgcatcctcgacgagctcgtcctccccttccaggagctccagatcgacgacaacgagtacgcctacctcaaggccatcatcttcttcgaccccgacgccaagggcctctccgaccccggcaagatcaagcgcctccgctcccaggtccaggtctccctcgaggactacatcaacgaccgccagtacgactcccgcggccgcttcggcgagctcctcctcctcctccccaccctccagtccatcacctggcagatgatcgagcagatccagttcatcaagctcttcggcatggccaagatcgacaacctcctccaggagatgctcctctgaggactagtccctgttcccagagcccacttttttttctttttttgaaataaaatagcctgtctttcagatctaaaaaaaaaaaaaaaaaaaaaaaaaaaaaaaaaaaaaaaaaaaaaaaaaaaaaaaaaaaaaaaaaaaaaaaaaaaaaaaaaaaaaaaaaaaaaaaaaaaa

SEQ ID NO: 4785 - RNA, 1376 nt, synthetic construct
  misc_feature 1..1376: note = mRNA a-1 (A100) (opt2) from Homo sapiens__NP_000448.3__HNF4A(1-375)(S167A)
  source 1..1376: mol_type = other RNA
aggagagtcccgcagtcggcgtccagcggctctgcttgttcgtgtgtgtgtcgttgcaggccttattcaagcttaccatgcgcctctccaagaccctcgtcgacatggacatggccgactactccgccgccctcgaccccgcctacaccaccctcgagttcgagaacgtccaggtcctcaccatgggcaacgacacctccccctccgagggcaccaacctcaacgcccccaactccctcggcgtctccgccctctgcgccatctgcggcgaccgcgccaccggcaagcactacggcgcctcctcctgcgacggctgcaagggcttcttccgccgctccgtccgcaagaaccacatgtactcctgccgcttctcccgccagtgcgtcgtcgacaaggacaagcgcaaccagtgccgctactgccgcctcaagaagtgcttccgcgccggcatgaagaaggaggccgtccagaacgagcgcgaccgcatctccacccgccgctcctcctacgaggactcctccctcccctccatcaacgccctcctccaggccgaggtcctctcccgccagatcaccgcccccgtctccggcatcaacggcgacatccgcgccaagaagatcgcctccatcgccgacgtctgcgagtccatgaaggagcagctcctcgtcctcgtcgagtgggccaagtacatccccgccttctgcgagctccccctcgacgaccaggtcgccctcctccgcgcccacgccggcgagcacctcctcctcggcgccaccaagcgctccatggtcttcaaggacgtcctcctcctcggcaacgactacatcgtcccccgccactgccccgagctcgccgagatgtcccgcgtctccatccgcatcctcgacgagctcgtcctccccttccaggagctccagatcgacgacaacgagtacgcctacctcaaggccatcatcttcttcgaccccgacgccaagggcctctccgaccccggcaagatcaagcgcctccgctcccaggtccaggtctccctcgaggactacatcaacgaccgccagtacgactcccgcggccgcttcggcgagctcctcctcctcctccccaccctccagtccatcacctggcagatgatcgagcagatccagttcatcaagctcttcggcatggccaagatcgacaacctcctccaggagatgctcctctgaggactagtccctgttcccagagcccacttttttttctttttttgaaataaaatagcctgtctttcagatctaaaaaaaaaaaaaaaaaaaaaaaaaaaaaaaaaaaaaaaaaaaaaaaaaaaaaaaaaaaaaaaaaaaaaaaaaaaaaaaaaaaaaaaaaaaaaaaaaaaa

SEQ ID NO: 4786 - RNA, 1376 nt, synthetic construct; identical to SEQ ID NO: 4785
  misc_feature 1..1376: note = mRNA a-1 (A100) (opt2) from Homo sapiens__NP_000448.3__HNF4A(1-375)(S167A_S378A_T429A_T432A_ S436A)
  source 1..1376: mol_type = other RNA

SEQ ID NO: 4787 - RNA, 1376 nt, synthetic construct; identical to SEQ ID NO: 4784
  misc_feature 1..1376: note = mRNA a-1 (A100) (opt2) from Homo sapiens__NP_000448.3__HNF4A(1-375)(S167E_S378E_T429E_T432E_ S436E)
  source 1..1376: mol_type = other RNA

SEQ ID NO: 4788 - RNA, 1376 nt, synthetic construct
  misc_feature 1..1376: note = mRNA a-1 (A100) (opt2) from Homo sapiens__NP_000448.3__HNF4A(1-375)(S87A)
  source 1..1376: mol_type = other RNA
aggagagtcccgcagtcggcgtccagcggctctgcttgttcgtgtgtgtgtcgttgcaggccttattcaagcttaccatgcgcctctccaagaccctcgtcgacatggacatggccgactactccgccgccctcgaccccgcctacaccaccctcgagttcgagaacgtccaggtcctcaccatgggcaacgacacctccccctccgagggcaccaacctcaacgcccccaactccctcggcgtctccgccctctgcgccatctgcggcgaccgcgccaccggcaagcactacggcgcctcctcctgcgacggctgcaagggcttcttccgccgcgccgtccgcaagaaccacatgtactcctgccgcttctcccgccagtgcgtcgtcgacaaggacaagcgcaaccagtgccgctactgccgcctcaagaagtgcttccgcgccggcatgaagaaggaggccgtccagaacgagcgcgaccgcatctccacccgccgctcctcctacgaggactcctccctcccctccatcaacgccctcctccaggccgaggtcctctcccgccagatcacctcccccgtctccggcatcaacggcgacatccgcgccaagaagatcgcctccatcgccgacgtctgcgagtccatgaaggagcagctcctcgtcctcgtcgagtgggccaagtacatccccgccttctgcgagctccccctcgacgaccaggtcgccctcctccgcgcccacgccggcgagcacctcctcctcggcgccaccaagcgctccatggtcttcaaggacgtcctcctcctcggcaacgactacatcgtcccccgccactgccccgagctcgccgagatgtcccgcgtctccatccgcatcctcgacgagctcgtcctccccttccaggagctccagatcgacgacaacgagtacgcctacctcaaggccatcatcttcttcgaccccgacgccaagggcctctccgaccccggcaagatcaagcgcctccgctcccaggtccaggtctccctcgaggactacatcaacgaccgccagtacgactcccgcggccgcttcggcgagctcctcctcctcctccccaccctccagtccatcacctggcagatgatcgagcagatccagttcatcaagctcttcggcatggccaagatcgacaacctcctccaggagatgctcctctgaggactagtccctgttcccagagcccacttttttttctttttttgaaataaaatagcctgtctttcagatctaaaaaaaaaaaaaaaaaaaaaaaaaaaaaaaaaaaaaaaaaaaaaaaaaaaaaaaaaaaaaaaaaaaaaaaaaaaaaaaaaaaaaaaaaaaaaaaaaaaa

SEQ ID NO: 4789 - RNA, 1376 nt, synthetic construct
  misc_feature 1..1376: note = mRNA a-1 (A100) (opt2) from Homo sapiens__NP_000448.3__HNF4A(1-375)(S87E)
  source 1..1376: mol_type = other RNA
aggagagtcccgcagtcggcgtccagcggctctgcttgttcgtgtgtgtgtcgttgcaggccttattcaagcttaccatgcgcctctccaagaccctcgtcgacatggacatggccgactactccgccgccctcgaccccgcctacaccaccctcgagttcgagaacgtccaggtcctcaccatgggcaacgacacctccccctccgagggcaccaacctcaacgcccccaactccctcggcgtctccgccctctgcgccatctgcggcgaccgcgccaccggcaagcactacggcgcctcctcctgcgacggctgcaagggcttcttccgccgcgaggtccgcaagaaccacatgtactcctgccgcttctcccgccagtgcgtcgtcgacaaggacaagcgcaaccagtgccgctactgccgcctcaagaagtgcttccgcgccggcatgaagaaggaggccgtccagaacgagcgcgaccgcatctccacccgccgctcctcctacgaggactcctccctcccctccatcaacgccctcctccaggccgaggtcctctcccgccagatcacctcccccgtctccggcatcaacggcgacatccgcgccaagaagatcgcctccatcgccgacgtctgcgagtccatgaaggagcagctcctcgtcctcgtcgagtgggccaagtacatccccgccttctgcgagctccccctcgacgaccaggtcgccctcctccgcgcccacgccggcgagcacctcctcctcggcgccaccaagcgctccatggtcttcaaggacgtcctcctcctcggcaacgactacatcgtcccccgccactgccccgagctcgccgagatgtcccgcgtctccatccgcatcctcgacgagctcgtcctccccttccaggagctccagatcgacgacaacgagtacgcctacctcaaggccatcatcttcttcgaccccgacgccaagggcctctccgaccccggcaagatcaagcgcctccgctcccaggtccaggtctccctcgaggactacatcaacgaccgccagtacgactcccgcggccgcttcggcgagctcctcctcctcctccccaccctccagtccatcacctggcagatgatcgagcagatccagttcatcaagctcttcggcatggccaagatcgacaacctcctccaggagatgctcctctgaggactagtccctgttcccagagcccacttttttttctttttttgaaataaaatagcctgtctttcagatctaaaaaaaaaaaaaaaaaaaaaaaaaaaaaaaaaaaaaaaaaaaaaaaaaaaaaaaaaaaaaaaaaaaaaaaaaaaaaaaaaaaaaaaaaaaaaaaaaaaa

SEQ ID NO: 4790 - RNA, 1376 nt, synthetic construct
  misc_feature 1..1376: note = mRNA a-1 (A100) (opt2) from Homo sapiens__NP_000448.3__HNF4A(1-375)(R2V)
  source 1..1376: mol_type = other RNA
aggagagtcccgcagtcggcgtccagcggctctgcttgttcgtgtgtgtgtcgttgcaggccttattcaagcttaccatggtcctctccaagaccctcgtcgacatggacatggccgactactccgccgccctcgaccccgcctacaccaccctcgagttcgagaacgtccaggtcctcaccatgggcaacgacacctccccctccgagggcaccaacctcaacgcccccaactccctcggcgtctccgccctctgcgccatctgcggcgaccgcgccaccggcaagcactacggcgcctcctcctgcgacggctgcaagggcttcttccgccgctccgtccgcaagaaccacatgtactcctgccgcttctcccgccagtgcgtcgtcgacaaggacaagcgcaaccagtgccgctactgccgcctcaagaagtgcttccgcgccggcatgaagaaggaggccgtccagaacgagcgcgaccgcatctccacccgccgctcctcctacgaggactcctccctcccctccatcaacgccctcctccaggccgaggtcctctcccgccagatcacctcccccgtctccggcatcaacggcgacatccgcgccaagaagatcgcctccatcgccgacgtctgcgagtccatgaaggagcagctcctcgtcctcgtcgagtgggccaagtacatccccgccttctgcgagctccccctcgacgaccaggtcgccctcctccgcgcccacgccggcgagcacctcctcctcggcgccaccaagcgctccatggtcttcaaggacgtcctcctcctcggcaacgactacatcgtcccccgccactgccccgagctcgccgagatgtcccgcgtctccatccgcatcctcgacgagctcgtcctccccttccaggagctccagatcgacgacaacgagtacgcctacctcaaggccatcatcttcttcgaccccgacgccaagggcctctccgaccccggcaagatcaagcgcctccgctcccaggtccaggtctccctcgaggactacatcaacgaccgccagtacgactcccgcggccgcttcggcgagctcctcctcctcctccccaccctccagtccatcacctggcagatgatcgagcagatccagttcatcaagctcttcggcatggccaagatcgacaacctcctccaggagatgctcctctgaggactagtccctgttcccagagcccacttttttttctttttttgaaataaaatagcctgtctttcagatctaaaaaaaaaaaaaaaaaaaaaaaaaaaaaaaaaaaaaaaaaaaaaaaaaaaaaaaaaaaaaaaaaaaaaaaaaaaaaaaaaaaaaaaaaaaaaaaaaaaa

SEQ ID NO: 4791 - RNA, 1376 nt, synthetic construct
  misc_feature 1..1376: note = mRNA a-1 (A100) (opt2) from Homo sapiens__NP_000448.3__HNF4A(1-375)(R2V_K5V)
  source 1..1376: mol_type = other RNA
aggagagtcccgcagtcggcgtccagcggctctgcttgttcgtgtgtgtgtcgttgcaggccttattcaagcttaccatggtcctctccgtcaccctcgtcgacatggacatggccgactactccgccgccctcgaccccgcctacaccaccctcgagttcgagaacgtccaggtcctcaccatgggcaacgacacctccccctccgagggcaccaacctcaacgcccccaactccctcggcgtctccgccctctgcgccatctgcggcgaccgcgccaccggcaagcactacggcgcctcctcctgcgacggctgcaagggcttcttccgccgctccgtccgcaagaaccacatgtactcctgccgcttctcccgccagtgcgtcgtcgacaaggacaagcgcaaccagtgccgctactgccgcctcaagaagtgcttccgcgccggcatgaagaaggaggccgtccagaacgagcgcgaccgcatctccacccgccgctcctcctacgaggactcctccctcccctccatcaacgccctcctccaggccgaggtcctctcccgccagatcacctcccccgtctccggcatcaacggcgacatccgcgccaagaagatcgcctccatcgccgacgtctgcgagtccatgaaggagcagctcctcgtcctcgtcgagtgggccaagtacatccccgccttctgcgagctccccctcgacgaccaggtcgccctcctccgcgcccacgccggcgagcacctcctcctcggcgccaccaagcgctccatggtcttcaaggacgtcctcctcctcggcaacgactacatcgtcccccgccactgccccgagctcgccgagatgtcccgcgtctccatccgcatcctcgacgagctcgtcctccccttccaggagctccagatcgacgacaacgagtacgcctacctcaaggccatcatcttcttcgaccccgacgccaagggcctctccgaccccggcaagatcaagcgcctccgctcccaggtccaggtctccctcgaggactacatcaacgaccgccagtacgactcccgcggccgcttcggcgagctcctcctcctcctccccaccctccagtccatcacctggcagatgatcgagcagatccagttcatcaagctcttcggcatggccaagatcgacaacctcctccaggagatgctcctctgaggactagtccctgttcccagagcccacttttttttctttttttgaaataaaatagcctgtctttcagatctaaaaaaaaaaaaaaaaaaaaaaaaaaaaaaaaaaaaaaaaaaaaaaaaaaaaaaaaaaaaaaaaaaaaaaaaaaaaaaaaaaaaaaaaaaaaaaaaaaaa

SEQ ID NO: 4792 - RNA, 1376 nt, synthetic construct
  misc_feature 1..1376: note = mRNA a-1 (A100) (opt2) from Homo sapiens__NP_000448.3__HNF4A(1-375)(K179R_K180R)
  source 1..1376: mol_type = other RNA
aggagagtcccgcagtcggcgtccagcggctctgcttgttcgtgtgtgtgtcgttgcaggccttattcaagcttaccatgcgcctctccaagaccctcgtcgacatggacatggccgactactccgccgccctcgaccccgcctacaccaccctcgagttcgagaacgtccaggtcctcaccatgggcaacgacacctccccctccgagggcaccaacctcaacgcccccaactccctcggcgtctccgccctctgcgccatctgcggcgaccgcgccaccggcaagcactacggcgcctcctcctgcgacggctgcaagggcttcttccgccgctccgtccgcaagaaccacatgtactcctgccgcttctcccgccagtgcgtcgtcgacaaggacaagcgcaaccagtgccgctactgccgcctcaagaagtgcttccgcgccggcatgaagaaggaggccgtccagaacgagcgcgaccgcatctccacccgccgctcctcctacgaggactcctccctcccctccatcaacgccctcctccaggccgaggtcctctcccgccagatcacctcccccgtctccggcatcaacggcgacatccgcgcccgccgcatcgcctccatcgccgacgtctgcgagtccatgaaggagcagctcctcgtcctcgtcgagtgggccaagtacatccccgccttctgcgagctccccctcgacgaccaggtcgccctcctccgcgcccacgccggcgagcacctcctcctcggcgccaccaagcgctccatggtcttcaaggacgtcctcctcctcggcaacgactacatcgtcccccgccactgccccgagctcgccgagatgtcccgcgtctccatccgcatcctcgacgagctcgtcctccccttccaggagctccagatcgacgacaacgagtacgcctacctcaaggccatcatcttcttcgaccccgacgccaagggcctctccgaccccggcaagatcaagcgcctccgctcccaggtccaggtctccctcgaggactacatcaacgaccgccagtacgactcccgcggccgcttcggcgagctcctcctcctcctccccaccctccagtccatcacctggcagatgatcgagcagatccagttcatcaagctcttcggcatggccaagatcgacaacctcctccaggagatgctcctctgaggactagtccctgttcccagagcccacttttttttctttttttgaaataaaatagcctgtctttcagatctaaaaaaaaaaaaaaaaaaaaaaaaaaaaaaaaaaaaaaaaaaaaaaaaaaaaaaaaaaaaaaaaaaaaaaaaaaaaaaaaaaaaaaaaaaaaaaaaaaaa

SEQ ID NO: 4793 - RNA, 1376 nt, synthetic construct
  misc_feature 1..1376: note = mRNA a-1 (A100) (opt2) from Homo sapiens__NP_000448.3__HNF4A(1-375)(K234R)
  source 1..1376: mol_type = other RNA
aggagagtcccgcagtcggcgtccagcggctctgcttgttcgtgtgtgtgtcgttgcaggccttattcaagcttaccatgcgcctctccaagaccctcgtcgacatggacatggccgactactccgccgccctcgaccccgcctacaccaccctcgagttcgagaacgtccaggtcctcaccatgggcaacgacacctccccctccgagggcaccaacctcaacgcccccaactccctcggcgtctccgccctctgcgccatctgcggcgaccgcgccaccggcaagcactacggcgcctcctcctgcgacggctgcaagggcttcttccgccgctccgtccgcaagaaccacatgtactcctgccgcttctcccgccagtgcgtcgtcgacaaggacaagcgcaaccagtgccgctactgccgcctcaagaagtgcttccgcgccggcatgaagaaggaggccgtccagaacgagcgcgaccgcatctccacccgccgctcctcctacgaggactcctccctcccctccatcaacgccctcctccaggccgaggtcctctcccgccagatcacctcccccgtctccggcatcaacggcgacatccgcgccaagaagatcgcctccatcgccgacgtctgcgagtccatgaaggagcagctcctcgtcctcgtcgagtgggccaagtacatccccgccttctgcgagctccccctcgacgaccaggtcgccctcctccgcgcccacgccggcgagcacctcctcctcggcgccacccgccgctccatggtcttcaaggacgtcctcctcctcggcaacgactacatcgtcccccgccactgccccgagctcgccgagatgtcccgcgtctccatccgcatcctcgacgagctcgtcctccccttccaggagctccagatcgacgacaacgagtacgcctacctcaaggccatcatcttcttcgaccccgacgccaagggcctctccgaccccggcaagatcaagcgcctccgctcccaggtccaggtctccctcgaggactacatcaacgaccgccagtacgactcccgcggccgcttcggcgagctcctcctcctcctccccaccctccagtccatcacctggcagatgatcgagcagatccagttcatcaagctcttcggcatggccaagatcgacaacctcctccaggagatgctcctctgaggactagtccctgttcccagagcccacttttttttctttttttgaaataaaatagcctgtctttcagatctaaaaaaaaaaaaaaaaaaaaaaaaaaaaaaaaaaaaaaaaaaaaaaaaaaaaaaaaaaaaaaaaaaaaaaaaaaaaaaaaaaaaaaaaaaaaaaaaaaaa

SEQ ID NO: 4794 - RNA, 1376 nt, synthetic construct
  misc_feature 1..1376: note = mRNA a-1 (A100) (opt2) from Homo sapiens__NP_000448.3__HNF4A(1-375)(K300R)
  source 1..1376: mol_type = other RNA
aggagagtcccgcagtcggcgtccagcggctctgcttgttcgtgtgtgtgtcgttgcaggccttattcaagcttaccatgcgcctctccaagaccctcgtcgacatggacatggccgactactccgccgccctcgaccccgcctacaccaccctcgagttcgagaacgtccaggtcctcaccatgggcaacgacacctccccctccgagggcaccaacctcaacgcccccaactccctcggcgtctccgccctctgcgccatctgcggcgaccgcgccaccggcaagcactacggcgcctcctcctgcgacggctgcaagggcttcttccgccgctccgtccgcaagaaccacatgtactcctgccgcttctcccgccagtgcgtcgtcgacaaggacaagcgcaaccagtgccgctactgccgcctcaagaagtgcttccgcgccggcatgaagaaggaggccgtccagaacgagcgcgaccgcatctccacccgccgctcctcctacgaggactcctccctcccctccatcaacgccctcctccaggccgaggtcctctcccgccagatcacctcccccgtctccggcatcaacggcgacatccgcgccaagaagatcgcctccatcgccgacgtctgcgagtccatgaaggagcagctcctcgtcctcgtcgagtgggccaagtacatccccgccttctgcgagctccccctcgacgaccaggtcgccctcctccgcgcccacgccggcgagcacctcctcctcggcgccaccaagcgctccatggtcttcaaggacgtcctcctcctcggcaacgactacatcgtcccccgccactgccccgagctcgccgagatgtcccgcgtctccatccgcatcctcgacgagctcgtcctccccttccaggagctccagatcgacgacaacgagtacgcctacctcaaggccatcatcttcttcgaccccgacgcccgcggcctctccgaccccggcaagatcaagcgcctccgctcccaggtccaggtctccctcgaggactacatcaacgaccgccagtacgactcccgcggccgcttcggcgagctcctcctcctcctccccaccctccagtccatcacctggcagatgatcgagcagatccagttcatcaagctcttcggcatggccaagatcgacaacctcctccaggagatgctcctctgaggactagtccctgttcccagagcccacttttttttctttttttgaaataaaatagcctgtctttcagatctaaaaaaaaaaaaaaaaaaaaaaaaaaaaaaaaaaaaaaaaaaaaaaaaaaaaaaaaaaaaaaaaaaaaaaaaaaaaaaaaaaaaaaaaaaaaaaaaaaaa

SEQ ID NO: 4795 - RNA, 1376 nt, synthetic construct
  misc_feature 1..1376: note = mRNA a-1 (A100) (opt2) from Homo sapiens__NP_000448.3__HNF4A(1-375)(K300R_K307R_K309R)
  source 1..1376: mol_type = other RNA
aggagagtcccgcagtcggcgtccagcggctctgcttgttcgtgtgtgtgtcgttgcaggccttattcaagcttaccatgcgcctctccaagaccctcgtcgacatggacatggccgactactccgccgccctcgaccccgcctacaccaccctcgagttcgagaacgtccaggtcctcaccatgggcaacgacacctccccctccgagggcaccaacctcaacgcccccaactccctcggcgtctccgccctctgcgccatctgcggcgaccgcgccaccggcaagcactacggcgcctcctcctgcgacggctgcaagggcttcttccgccgctccgtccgcaagaaccacatgtactcctgccgcttctcccgccagtgcgtcgtcgacaaggacaagcgcaaccagtgccgctactgccgcctcaagaagtgcttccgcgccggcatgaagaaggaggccgtccagaacgagcgcgaccgcatctccacccgccgctcctcctacgaggactcctccctcccctccatcaacgccctcctccaggccgaggtcctctcccgccagatcacctcccccgtctccggcatcaacggcgacatccgcgccaagaagatcgcctccatcgccgacgtctgcgagtccatgaaggagcagctcctcgtcctcgtcgagtgggccaagtacatccccgccttctgcgagctccccctcgacgaccaggtcgccctcctccgcgcccacgccggcgagcacctcctcctcggcgccaccaagcgctccatggtcttcaaggacgtcctcctcctcggcaacgactacatcgtcccccgccactgccccgagctcgccgagatgtcccgcgtctccatccgcatcctcgacgagctcgtcctccccttccaggagctccagatcgacgacaacgagtacgcctacctcaaggccatcatcttcttcgaccccgacgcccgcggcctctccgaccccggccgcatccgccgcctccgctcccaggtccaggtctccctcgaggactacatcaacgaccgccagtacgactcccgcggccgcttcggcgagctcctcctcctcctccccaccctccagtccatcacctggcagatgatcgagcagatccagttcatcaagctcttcggcatggccaagatcgacaacctcctccaggagatgctcctctgaggactagtccctgttcccagagcccacttttttttctttttttgaaataaaatagcctgtctttcagatctaaaaaaaaaaaaaaaaaaaaaaaaaaaaaaaaaaaaaaaaaaaaaaaaaaaaaaaaaaaaaaaaaaaaaaaaaaaaaaaaaaaaaaaaaaaaaaaaaaaa

SEQ ID NO: 4796 - RNA, 1376 nt, synthetic construct
  misc_feature 1..1376: note = mRNA a-1 (A100) (opt2) from Homo sapiens__NP_000448.3__HNF4A(1-375)(K447R_K470R)
  source 1..1376: mol_type = other RNA
aggagagtcccgcagtcggcgtccagcggctctgcttgttcgtgtgtgtgtcgttgcaggccttattcaagcttaccatgcgcctctccaagaccctcgtcgacatggacatggccgactactccgccgccctcgaccccgcctacaccaccctcgagttcgagaacgtccaggtcctcaccatgggcaacgacacctccccctccgagggcaccaacctcaacgcccccaactccctcggcgtctccgccctctgcgccatctgcggcgaccgcgccaccggcaagcactacggcgcctcctcctgcgacggctgcaagggcttcttccgccgctccgtccgcaagaaccacatgtactcctgccgcttctcccgccagtgcgtcgtcgacaaggacaagcgcaaccagtgccgctactgccgcctcaagaagtgcttccgcgccggcatgaagaaggaggccgtccagaacgagcgcgaccgcatctccacccgccgctcctcctacgaggactcctccctcccctccatcaacgccctcctccaggccgaggtcctctcccgccagatcacctcccccgtctccggcatcaacggcgacatccgcgccaagaagatcgcctccatcgccgacgtctgcgagtccatgaaggagcagctcctcgtcctcgtcgagtgggccaagtacatccccgccttctgcgagctccccctcgacgaccaggtcgccctcctccgcgcccacgccggcgagcacctcctcctcggcgccaccaagcgctccatggtcttcaaggacgtcctcctcctcggcaacgactacatcgtcccccgccactgccccgagctcgccgagatgtcccgcgtctccatccgcatcctcgacgagctcgtcctccccttccaggagctccagatcgacgacaacgagtacgcctacctcaaggccatcatcttcttcgaccccgacgccaagggcctctccgaccccggcaagatcaagcgcctccgctcccaggtccaggtctccctcgaggactacatcaacgaccgccagtacgactcccgcggccgcttcggcgagctcctcctcctcctccccaccctccagtccatcacctggcagatgatcgagcagatccagttcatcaagctcttcggcatggccaagatcgacaacctcctccaggagatgctcctctgaggactagtccctgttcccagagcccacttttttttctttttttgaaataaaatagcctgtctttcagatctaaaaaaaaaaaaaaaaaaaaaaaaaaaaaaaaaaaaaaaaaaaaaaaaaaaaaaaaaaaaaaaaaaaaaaaaaaaaaaaaaaaaaaaaaaaaaaaaaaaa

SEQ ID NO: 4797 - RNA, 1376 nt, synthetic construct; identical to SEQ ID NO: 4796
  misc_feature 1..1376: note = mRNA a-1 (A100) (opt2) from Homo sapiens__NP_000448.3__HNF4A(1-375)(K458R)
  source 1..1376: mol_type = other RNA

SEQ ID NO: 4798 - RNA, 1376 nt, synthetic construct
  misc_feature 1..1376: note = mRNA a-1 (A100) (opt2) from Homo sapiens__NP_000448.3__HNF4A(1-375)(K106R_K108R_K126R_K127R)
  source 1..1376: mol_type = other RNA
aggagagtcccgcagtcggcgtccagcggctctgcttgttcgtgtgtgtgtcgttgcaggccttattcaagcttaccatgcgcctctccaagaccctcgtcgacatggacatggccgactactccgccgccctcgaccccgcctacaccaccctcgagttcgagaacgtccaggtcctcaccatgggcaacgacacctccccctccgagggcaccaacctcaacgcccccaactccctcggcgtctccgccctctgcgccatctgcggcgaccgcgccaccggcaagcactacggcgcctcctcctgcgacggctgcaagggcttcttccgccgctccgtccgcaagaaccacatgtactcctgccgcttctcccgccagtgcgtcgtcgaccgcgaccgccgcaaccagtgccgctactgccgcctcaagaagtgcttccgcgccggcatgcgccgcgaggccgtccagaacgagcgcgaccgcatctccacccgccgctcctcctacgaggactcctccctcccctccatcaacgccctcctccaggccgaggtcctctcccgccagatcacctcccccgtctccggcatcaacggcgacatccgcgccaagaagatcgcctccatcgccgacgtctgcgagtccatgaaggagcagctcctcgtcctcgtcgagtgggccaagtacatccccgccttctgcgagctccccctcgacgaccaggtcgccctcctccgcgcccacgccggcgagcacctcctcctcggcgccaccaagcgctccatggtcttcaaggacgtcctcctcctcggcaacgactacatcgtcccccgccactgccccgagctcgccgagatgtcccgcgtctccatccgcatcctcgacgagctcgtcctccccttccaggagctccagatcgacgacaacgagtacgcctacctcaaggccatcatcttcttcgaccccgacgccaagggcctctccgaccccggcaagatcaagcgcctccgctcccaggtccaggtctccctcgaggactacatcaacgaccgccagtacgactcccgcggccgcttcggcgagctcctcctcctcctccccaccctccagtccatcacctggcagatgatcgagcagatccagttcatcaagctcttcggcatggccaagatcgacaacctcctccaggagatgctcctctgaggactagtccctgttcccagagcccacttttttttctttttttgaaataaaatagcctgtctttcagatctaaaaaaaaaaaaaaaaaaaaaaaaaaaaaaaaaaaaaaaaaaaaaaaaaaaaaaaaaaaaaaaaaaaaaaaaaaaaaaaaaaaaaaaaaaaaaaaaaaaa

SEQ ID NO: 4799 - RNA, 1376 nt, synthetic construct
  misc_feature 1..1376: note = mRNA a-1 (A100) (opt2) from Homo sapiens__NP_000448.3__HNF4A(1-375)(E285Q)
  source 1..1376: mol_type = other RNA
aggagagtcccgcagtcggcgtccagcggctctgcttgttcgtgtgtgtgtcgttgcaggccttattcaagcttaccatgcgcctctccaagaccctcgtcgacatggacatggccgactactccgccgccctcgaccccgcctacaccaccctcgagttcgagaacgtccaggtcctcaccatgggcaacgacacctccccctccgagggcaccaacctcaacgcccccaactccctcggcgtctccgccctctgcgccatctgcggcgaccgcgccaccggcaagcactacggcgcctcctcctgcgacggctgcaagggcttcttccgccgctccgtccgcaagaaccacatgtactcctgccgcttctcccgccagtgcgtcgtcgacaaggacaagcgcaaccagtgccgctactgccgcctcaagaagtgcttccgcgccggcatgaagaaggaggccgtccagaacgagcgcgaccgcatctccacccgccgctcctcctacgaggactcctccctcccctccatcaacgccctcctccaggccgaggtcctctcccgccagatcacctcccccgtctccggcatcaacggcgacatccgcgccaagaagatcgcctccatcgccgacgtctgcgagtccatgaaggagcagctcctcgtcctcgtcgagtgggccaagtacatccccgccttctgcgagctccccctcgacgaccaggtcgccctcctccgcgcccacgccggcgagcacctcctcctcggcgccaccaagcgctccatggtcttcaaggacgtcctcctcctcggcaacgactacatcgtcccccgccactgccccgagctcgccgagatgtcccgcgtctccatccgcatcctcgacgagctcgtcctccccttccaggagctccagatcgacgacaaccagtacgcctacctcaaggccatcatcttcttcgaccccgacgccaagggcctctccgaccccggcaagatcaagcgcctccgctcccaggtccaggtctccctcgaggactacatcaacgaccgccagtacgactcccgcggccgcttcggcgagctcctcctcctcctccccaccctccagtccatcacctggcagatgatcgagcagatccagttcatcaagctcttcggcatggccaagatcgacaacctcctccaggagatgctcctctgaggactagtccctgttcccagagcccacttttttttctttttttgaaataaaatagcctgtctttcagatctaaaaaaaaaaaaaaaaaaaaaaaaaaaaaaaaaaaaaaaaaaaaaaaaaaaaaaaaaaaaaaaaaaaaaaaaaaaaaaaaaaaaaaaaaaaaaaaaaaaa

SEQ ID NO: 4800 - RNA, 1376 nt, synthetic construct
  misc_feature 1..1376: note = mRNA a-1 (A100) (opt2) from Homo sapiens__NP_000448.3__HNF4A(1-375)(T166E)
  source 1..1376: mol_type = other RNA
aggagagtcccgcagtcggcgtccagcggctctgcttgttcgtgtgtgtgtcgttgcaggccttattcaagcttaccatgcgcctctccaagaccctcgtcgacatggacatggccgactactccgccgccctcgaccccgcctacaccaccctcgagttcgagaacgtccaggtcctcaccatgggcaacgacacctccccctccgagggcaccaacctcaacgcccccaactccctcggcgtctccgccctctgcgccatctgcggcgaccgcgccaccggcaagcactacggcgcctcctcctgcgacggctgcaagggcttcttccgccgctccgtccgcaagaaccacatgtactcctgccgcttctcccgccagtgcgtcgtcgacaaggacaagcgcaaccagtgccgctactgccgcctcaagaagtgcttccgcgccggcatgaagaaggaggccgtccagaacgagcgcgaccgcatctccacccgccgctcctcctacgaggactcctccctcccctccatcaacgccctcctccaggccgaggtcctctcccgccagatcgagtcccccgtctccggcatcaacggcgacatccgcgccaagaagatcgcctccatcgccgacgtctgcgagtccatgaaggagcagctcctcgtcctcgtcgagtgggccaagtacatccccgccttctgcgagctccccctcgacgaccaggtcgccctcctccgcgcccacgccggcgagcacctcctcctcggcgccaccaagcgctccatggtcttcaaggacgtcctcctcctcggcaacgactacatcgtcccccgccactgccccgagctcgccgagatgtcccgcgtctccatccgcatcctcgacgagctcgtcctccccttccaggagctccagatcgacgacaacgagtacgcctacctcaaggccatcatcttcttcgaccccgacgccaagggcctctccgaccccggcaagatcaagcgcctccgctcccaggtccaggtctccctcgaggactacatcaacgaccgccagtacgactcccgcggccgcttcggcgagctcctcctcctcctccccaccctccagtccatcacctggcagatgatcgagcagatccagttcatcaagctcttcggcatggccaagatcgacaacctcctccaggagatgctcctctgaggactagtccctgttcccagagcccacttttttttctttttttgaaataaaatagcctgtctttcagatctaaaaaaaaaaaaaaaaaaaaaaaaaaaaaaaaaaaaaaaaaaaaaaaaaaaaaaaaaaaaaaaaaaaaaaaaaaaaaaaaaaaaaaaaaaaaaaaaaaaa

SEQ ID NO: 4801 - RNA, 1376 nt, synthetic construct
  misc_feature 1..1376: note = mRNA a-1 (A100) (opt2) from Homo sapiens__NP_000448.3__HNF4A(1-375)(S148A)
  source 1..1376: mol_type = other RNA
aggagagtcccgcagtcggcgtccagcggctctgcttgttcgtgtgtgtgtcgttgcaggccttattcaagcttaccatgcgcctctccaagaccctcgtcgacatggacatggccgactactccgccgccctcgaccccgcctacaccaccctcgagttcgagaacgtccaggtcctcaccatgggcaacgacacctccccctccgagggcaccaacctcaacgcccccaactccctcggcgtctccgccctctgcgccatctgcggcgaccgcgccaccggcaagcactacggcgcctcctcctgcgacggctgcaagggcttcttccgccgctccgtccgcaagaaccacatgtactcctgccgcttctcccgccagtgcgtcgtcgacaaggacaagcgcaaccagtgccgctactgccgcctcaagaagtgcttccgcgccggcatgaagaaggaggccgtccagaacgagcgcgaccgcatctccacccgccgctcctcctacgaggactccgccctcccctccatcaacgccctcctccaggccgaggtcctctcccgccagatcacctcccccgtctccggcatcaacggcgacatccgcgccaagaagatcgcctccatcgccgacgtctgcgagtccatgaaggagcagctcctcgtcctcgtcgagtgggccaagtacatccccgccttctgcgagctccccctcgacgaccaggtcgccctcctccgcgcccacgccggcgagcacctcctcctcggcgccaccaagcgctccatggtcttcaaggacgtcctcctcctcggcaacgactacatcgtcccccgccactgccccgagctcgccgagatgtcccgcgtctccatccgcatcctcgacgagctcgtcctccccttccaggagctccagatcgacgacaacgagtacgcctacctcaaggccatcatcttcttcgaccccgacgccaagggcctctccgaccccggcaagatcaagcgcctccgctcccaggtccaggtctccctcgaggactacatcaacgaccgccagtacgactcccgcggccgcttcggcgagctcctcctcctcctccccaccctccagtccatcacctggcagatgatcgagcagatccagttcatcaagctcttcggcatggccaagatcgacaacctcctccaggagatgctcctctgaggactagtccctgttcccagagcccacttttttttctttttttgaaataaaatagcctgtctttcagatctaaaaaaaaaaaaaaaaaaaaaaaaaaaaaaaaaaaaaaaaaaaaaaaaaaaaaaaaaaaaaaaaaaaaaaaaaaaaaaaaaaaaaaaaaaaaaaaaaaaa

SEQ ID NO: 4802 - RNA, 1376 nt, synthetic construct
  misc_feature 1..1376: note = mRNA a-1 (A100) (opt2) from Homo sapiens__NP_000448.3__HNF4A(1-375)(S148E)
  source 1..1376: mol_type = other RNA
aggagagtcccgcagtcggcgtccagcggctctgcttgttcgtgtgtgtgtcgttgcaggccttattcaagcttaccatgcgcctctccaagaccctcgtcgacatggacatggccgactactccgccgccctcgaccccgcctacaccaccctcgagttcgagaacgtccaggtcctcaccatgggcaacgacacctccccctccgagggcaccaacctcaacgcccccaactccctcggcgtctccgccctctgcgccatctgcggcgaccgcgccaccggcaagcactacggcgcctcctcctgcgacggctgcaagggcttcttccgccgctccgtccgcaagaaccacatgtactcctgccgcttctcccgccagtgcgtcgtcgacaaggacaagcgcaaccagtgccgctactgccgcctcaagaagtgcttccgcgccggcatgaagaaggaggccgtccagaacgagcgcgaccgcatctccacccgccgctcctcctacgaggactccgagctcccctccatcaacgccctcctccaggccgaggtcctctcccgccagatcacctcccccgtctccggcatcaacggcgacatccgcgccaagaagatcgcctccatcgccgacgtctgcgagtccatgaaggagcagctcctcgtcctcgtcgagtgggccaagtacatccccgccttctgcgagctccccctcgacgaccaggtcgccctcctccgcgcccacgccggcgagcacctcctcctcggcgccaccaagcgctccatggtcttcaaggacgtcctcctcctcggcaacgactacatcgtcccccgccactgccccgagctcgccgagatgtcccgcgtctccatccgcatcctcgacgagctcgtcctccccttccaggagctccagatcgacgacaacgagtacgcctacctcaaggccatcatcttcttcgaccccgacgccaagggcctctccgaccccggcaagatcaagcgcctccgctcccaggtccaggtctccctcgaggactacatcaacgaccgccagtacgactcccgcggccgcttcggcgagctcctcctcctcctccccaccctccagtccatcacctggcagatgatcgagcagatccagttcatcaagctcttcggcatggccaagatcgacaacctcctccaggagatgctcctctgaggactagtccctgttcccagagcccacttttttttctttttttgaaataaaatagcctgtctttcagatctaaaaaaaaaaaaaaaaaaaaaaaaaaaaaaaaaaaaaaaaaaaaaaaaaaaaaaaaaaaaaaaaaaaaaaaaaaaaaaaaaaaaaaaaaaaaaaaaaaaa

SEQ ID NO: 4803 - RNA, 1376 nt, synthetic construct
  misc_feature 1..1376: note = mRNA a-1 (A100) (opt2) from Homo sapiens__NP_000448.3__HNF4A(1-375)(S183A)
  source 1..1376: mol_type = other RNA
aggagagtcccgcagtcggcgtccagcggctctgcttgttcgtgtgtgtgtcgttgcaggccttattcaagcttaccatgcgcctctccaagaccctcgtcgacatggacatggccgactactccgccgccctcgaccccgcctacaccaccctcgagttcgagaacgtccaggtcctcaccatgggcaacgacacctccccctccgagggcaccaacctcaacgcccccaactccctcggcgtctccgccctctgcgccatctgcggcgaccgcgccaccggcaagcactacggcgcctcctcctgcgacggctgcaagggcttcttccgccgctccgtccgcaagaaccacatgtactcctgccgcttctcccgccagtgcgtcgtcgacaaggacaagcgcaaccagtgccgctactgccgcctcaagaagtgcttccgcgccggcatgaagaaggaggccgtccagaacgagcgcgaccgcatctccacccgccgctcctcctacgaggactcctccctcccctccatcaacgccctcctccaggccgaggtcctctcccgccagatcacctcccccgtctccggcatcaacggcgacatccgcgccaagaagatcgccgccatcgccgacgtctgcgagtccatgaaggagcagctcctcgtcctcgtcgagtgggccaagtacatccccgccttctgcgagctccccctcgacgaccaggtcgccctcctccgcgcccacgccggcgagcacctcctcctcggcgccaccaagcgctccatggtcttcaaggacgtcctcctcctcggcaacgactacatcgtcccccgccactgccccgagctcgccgagatgtcccgcgtctccatccgcatcctcgacgagctcgtcctccccttccaggagctccagatcgacgacaacgagtacgcctacctcaaggccatcatcttcttcgaccccgacgccaagggcctctccgaccccggcaagatcaagcgcctccgctcccaggtccaggtctccctcgaggactacatcaacgaccgccagtacgactcccgcggccgcttcggcgagctcctcctcctcctccccaccctccagtccatcacctggcagatgatcgagcagatccagttcatcaagctcttcggcatggccaagatcgacaacctcctccaggagatgctcctctgaggactagtccctgttcccagagcccacttttttttctttttttgaaataaaatagcctgtctttcagatctaaaaaaaaaaaaaaaaaaaaaaaaaaaaaaaaaaaaaaaaaaaaaaaaaaaaaaaaaaaaaaaaaaaaaaaaaaaaaaaaaaaaaaaaaaaaaaaaaaaa

SEQ ID NO: 4804 - RNA, 1376 nt, synthetic construct
  misc_feature 1..1376: note = mRNA a-1 (A100) (opt2) from Homo sapiens__NP_000448.3__HNF4A(1-375)(S183E)
  source 1..1376: mol_type = other RNA
aggagagtcccgcagtcggcgtccagcggctctgcttgttcgtgtgtgtgtcgttgcaggccttattcaagcttaccatgcgcctctccaagaccctcgtcgacatggacatggccgactactccgccgccctcgaccccgcctacaccaccctcgagttcgagaacgtccaggtcctcaccatgggcaacgacacctccccctccgagggcaccaacctcaacgcccccaactccctcggcgtctccgccctctgcgccatctgcggcgaccgcgccaccggcaagcactacggcgcctcctcctgcgacggctgcaagggcttcttccgccgctccgtccgcaagaaccacatgtactcctgccgcttctcccgccagtgcgtcgtcgacaaggacaagcgcaaccagtgccgctactgccgcctcaagaagtgcttccgcgccggcatgaagaaggaggccgtccagaacgagcgcgaccgcatctccacccgccgctcctcctacgaggactcctccctcccctccatcaacgccctcctccaggccgaggtcctctcccgccagatcacctcccccgtctccggcatcaacggcgacatccgcgccaagaagatcgccgagatcgccgacgtctgcgagtccatgaaggagcagctcctcgtcctcgtcgagtgggccaagtacatccccgccttctgcgagctccccctcgacgaccaggtcgccctcctccgcgcccacgccggcgagcacctcctcctcggcgccaccaagcgctccatggtcttcaaggacgtcctcctcctcggcaacgactacatcgtcccccgccactgccccgagctcgccgagatgtcccgcgtctccatccgcatcctcgacgagctcgtcctccccttccaggagctccagatcgacgacaacgagtacgcctacctcaaggccatcatcttcttcgaccccgacgccaagggcctctccgaccccggcaagatcaagcgcctccgctcccaggtccaggtctccctcgaggactacatcaacgaccgccagtacgactcccgcggccgcttcggcgagctcctcctcctcctccccaccctccagtccatcacctggcagatgatcgagcagatccagttcatcaagctcttcggcatggccaagatcgacaacctcctccaggagatgctcctctgaggactagtccctgttcccagagcccacttttttttctttttttgaaataaaatagcctgtctttcagatctaaaaaaaaaaaaaaaaaaaaaaaaaaaaaaaaaaaaaaaaaaaaaaaaaaaaaaaaaaaaaaaaaaaaaaaaaaaaaaaaaaaaaaaaaaaaaaaaaaaa

SEQ ID NO: 4805 - RNA, 1376 nt, synthetic construct; identical to SEQ ID NO: 4796
  misc_feature 1..1376: note = mRNA a-1 (A100) (opt2) from Homo sapiens__NP_000448.3__HNF4A(1-375)(S461A)
  source 1..1376: mol_type = other RNA

SEQ ID NO: 4806 - RNA, 1376 nt, synthetic construct; identical to SEQ ID NO: 4796
  misc_feature 1..1376: note = mRNA a-1 (A100) (opt2) from Homo sapiens__NP_000448.3__HNF4A(1-375)(S461E)
  source 1..1376: mol_type = other RNA

SEQ ID NO: 4807 - RNA, 1376 nt, synthetic construct
  misc_feature 1..1376: note = mRNA a-1 (A100) (opt2) from Homo sapiens__NP_000448.3__HNF4A(1-375)(S142A_S143A_S313A)
  source 1..1376: mol_type = other RNA
aggagagtcccgcagtcggcgtccagcggctctgcttgttcgtgtgtgtgtcgttgcaggccttattcaagcttaccatgcgcctctccaagaccctcgtcgacatggacatggccgactactccgccgccctcgaccccgcctacaccaccctcgagttcgagaacgtccaggtcctcaccatgggcaacgacacctccccctccgagggcaccaacctcaacgcccccaactccctcggcgtctccgccctctgcgccatctgcggcgaccgcgccaccggcaagcactacggcgcctcctcctgcgacggctgcaagggcttcttccgccgctccgtccgcaagaaccacatgtactcctgccgcttctcccgccagtgcgtcgtcgacaaggacaagcgcaaccagtgccgctactgccgcctcaagaagtgcttccgcgccggcatgaagaaggaggccgtccagaacgagcgcgaccgcatctccacccgccgcgccgcctacgaggactcctccctcccctccatcaacgccctcctccaggccgaggtcctctcccgccagatcacctcccccgtctccggcatcaacggcgacatccgcgccaagaagatcgcctccatcgccgacgtctgcgagtccatgaaggagcagctcctcgtcctcgtcgagtgggccaagtacatccccgccttctgcgagctccccctcgacgaccaggtcgccctcctccgcgcccacgccggcgagcacctcctcctcggcgccaccaagcgctccatggtcttcaaggacgtcctcctcctcggcaacgactacatcgtcccccgccactgccccgagctcgccgagatgtcccgcgtctccatccgcatcctcgacgagctcgtcctccccttccaggagctccagatcgacgacaacgagtacgcctacctcaaggccatcatcttcttcgaccccgacgccaagggcctctccgaccccggcaagatcaagcgcctccgcgcccaggtccaggtctccctcgaggactacatcaacgaccgccagtacgactcccgcggccgcttcggcgagctcctcctcctcctccccaccctccagtccatcacctggcagatgatcgagcagatccagttcatcaagctcttcggcatggccaagatcgacaacctcctccaggagatgctcctctgaggactagtccctgttcccagagcccacttttttttctttttttgaaataaaatagcctgtctttcagatctaaaaaaaaaaaaaaaaaaaaaaaaaaaaaaaaaaaaaaaaaaaaaaaaaaaaaaaaaaaaaaaaaaaaaaaaaaaaaaaaaaaaaaaaaaaaaaaaaaaa

SEQ ID NO: 4808 - RNA, 1376 nt, synthetic construct; identical to SEQ ID NO: 4807
  misc_feature 1..1376: note = mRNA a-1 (A100) (opt2) from Homo sapiens__NP_000448.3__HNF4A(1-375)(S142A_S143A_S313A_K458R)
  source 1..1376: mol_type = other RNA

SEQ ID NO: 4809 - RNA, 1376 nt, synthetic construct
  misc_feature 1..1376: note = mRNA a-1 (A100) (opt2) from Homo sapiens__NP_000448.3__HNF4A(1-375)(S142A_S143A_S167A_S313A_ S378A_T429A_T432A_S436A_K458R)
  source 1..1376: mol_type = other RNA
aggagagtcccgcagtcggcgtccagcggctctgcttgttcgtgtgtgtgtcgttgcaggccttattcaagcttaccatgcgcctctccaagaccctcgtcgacatggacatggccgactactccgccgccctcgaccccgcctacaccaccctcgagttcgagaacgtccaggtcctcaccatgggcaacgacacctccccctccgagggcaccaacctcaacgcccccaactccctcggcgtctccgccctctgcgccatctgcggcgaccgcgccaccggcaagcactacggcgcctcctcctgcgacggctgcaagggcttcttccgccgctccgtccgcaagaaccacatgtactcctgccgcttctcccgccagtgcgtcgtcgacaaggacaagcgcaaccagtgccgctactgccgcctcaagaagtgcttccgcgccggcatgaagaaggaggccgtccagaacgagcgcgaccgcatctccacccgccgcgccgcctacgaggactcctccctcccctccatcaacgccctcctccaggccgaggtcctctcccgccagatcaccgcccccgtctccggcatcaacggcgacatccgcgccaagaagatcgcctccatcgccgacgtctgcgagtccatgaaggagcagctcctcgtcctcgtcgagtgggccaagtacatccccgccttctgcgagctccccctcgacgaccaggtcgccctcctccgcgcccacgccggcgagcacctcctcctcggcgccaccaagcgctccatggtcttcaaggacgtcctcctcctcggcaacgactacatcgtcccccgccactgccccgagctcgccgagatgtcccgcgtctccatccgcatcctcgacgagctcgtcctccccttccaggagctccagatcgacgacaacgagtacgcctacctcaaggccatcatcttcttcgaccccgacgccaagggcctctccgaccccggcaagatcaagcgcctccgcgcccaggtccaggtctccctcgaggactacatcaacgaccgccagtacgactcccgcggccgcttcggcgagctcctcctcctcctccccaccctccagtccatcacctggcagatgatcgagcagatccagttcatcaagctcttcggcatggccaagatcgacaacctcctccaggagatgctcctctgaggactagtccctgttcccagagcccacttttttttctttttttgaaataaaatagcctgtctttcagatctaaaaaaaaaaaaaaaaaaaaaaaaaaaaaaaaaaaaaaaaaaaaaaaaaaaaaaaaaaaaaaaaaaaaaaaaaaaaaaaaaaaaaaaaaaaaaaaaaaaa

SEQ ID NO: 4810 - RNA, 1376 nt, synthetic construct
  misc_feature 1..1376: note = mRNA a-1 (A100) (opt2) from Homo sapiens__NP_000448.3__HNF4A(1-375)(S142A_S143A_S148A_S167A_ S313A_S378A_T429A_T432A_S436A_K458R)
  source 1..1376: mol_type = other RNA
aggagagtcccgcagtcggcgtccagcggctctgcttgttcgtgtgtgtgtcgttgcaggccttattcaagcttaccatgcgcctctccaagaccctcgtcgacatggacatggccgactactccgccgccctcgaccccgcctacaccaccctcgagttcgagaacgtccaggtcctcaccatgggcaacgacacctccccctccgagggcaccaacctcaacgcccccaactccctcggcgtctccgccctctgcgccatctgcggcgaccgcgccaccggcaagcactacggcgcctcctcctgcgacggctgcaagggcttcttccgccgctccgtccgcaagaaccacatgtactcctgccgcttctcccgccagtgcgtcgtcgacaaggacaagcgcaaccagtgccgctactgccgcctcaagaagtgcttccgcgccggcatgaagaaggaggccgtccagaacgagcgcgaccgcatctccacccgccgcgccgcctacgaggactccgccctcccctccatcaacgccctcctccaggccgaggtcctctcccgccagatcaccgcccccgtctccggcatcaacggcgacatccgcgccaagaagatcgcctccatcgccgacgtctgcgagtccatgaaggagcagctcctcgtcctcgtcgagtgggccaagtacatccccgccttctgcgagctccccctcgacgaccaggtcgccctcctccgcgcccacgccggcgagcacctcctcctcggcgccaccaagcgctccatggtcttcaaggacgtcctcctcctcggcaacgactacatcgtcccccgccactgccccgagctcgccgagatgtcccgcgtctccatccgcatcctcgacgagctcgtcctccccttccaggagctccagatcgacgacaacgagtacgcctacctcaaggccatcatcttcttcgaccccgacgccaagggcctctccgaccccggcaagatcaagcgcctccgcgcccaggtccaggtctccctcgaggactacatcaacgaccgccagtacgactcccgcggccgcttcggcgagctcctcctcctcctccccaccctccagtccatcacctggcagatgatcgagcagatccagttcatcaagctcttcggcatggccaagatcgacaacctcctccaggagatgctcctctgaggactagtccctgttcccagagcccacttttttttctttttttgaaataaaatagcctgtctttcagatctaaaaaaaaaaaaaaaaaaaaaaaaaaaaaaaaaaaaaaaaaaaaaaaaaaaaaaaaaaaaaaaaaaaaaaaaaaaaaaaaaaaaaaaaaaaaaaaaaaaa

SEQ ID NO: 4811 - RNA, 1376 nt, synthetic construct
  misc_feature 1..1376: note = mRNA a-1 (A100) (opt2) from Homo sapiens__NP_000448.3__HNF4A(1-375)(K106R_K108R_K126R_K127R_ S142A_S143A_S148A_S167A_S313A_S378A_T429A_T432A_S436A_K458R )
  source 1..1376: mol_type = other RNA
aggagagtcccgcagtcggcgtccagcggctctgcttgttcgtgtgtgtgtcgttgcaggccttattcaagcttaccatgcgcctctccaagaccctcgtcgacatggacatggccgactactccgccgccctcgaccccgcctacaccaccctcgagttcgagaacgtccaggtcctcaccatgggcaacgacacctccccctccgagggcaccaacctcaacgcccccaactccctcggcgtctccgccctctgcgccatctgcggcgaccgcgccaccggcaagcactacggcgcctcctcctgcgacggctgcaagggcttcttccgccgctccgtccgcaagaaccacatgtactcctgccgcttctcccgccagtgcgtcgtcgaccgcgaccgccgcaaccagtgccgctactgccgcctcaagaagtgcttccgcgccggcatgcgccgcgaggccgtccagaacgagcgcgaccgcatctccacccgccgcgccgcctacgaggactccgccctcccctccatcaacgccctcctccaggccgaggtcctctcccgccagatcaccgcccccgtctccggcatcaacggcgacatccgcgccaagaagatcgcctccatcgccgacgtctgcgagtccatgaaggagcagctcctcgtcctcgtcgagtgggccaagtacatccccgccttctgcgagctccccctcgacgaccaggtcgccctcctccgcgcccacgccggcgagcacctcctcctcggcgccaccaagcgctccatggtcttcaaggacgtcctcctcctcggcaacgactacatcgtcccccgccactgccccgagctcgccgagatgtcccgcgtctccatccgcatcctcgacgagctcgtcctccccttccaggagctccagatcgacgacaacgagtacgcctacctcaaggccatcatcttcttcgaccccgacgccaagggcctctccgaccccggcaagatcaagcgcctccgcgcccaggtccaggtctccctcgaggactacatcaacgaccgccagtacgactcccgcggccgcttcggcgagctcctcctcctcctccccaccctccagtccatcacctggcagatgatcgagcagatccagttcatcaagctcttcggcatggccaagatcgacaacctcctccaggagatgctcctctgaggactagtccctgttcccagagcccacttttttttctttttttgaaataaaatagcctgtctttcagatctaaaaaaaaaaaaaaaaaaaaaaaaaaaaaaaaaaaaaaaaaaaaaaaaaaaaaaaaaaaaaaaaaaaaaaaaaaaaaaaaaaaaaaaaaaaaaaaaaaaa

SEQ ID NO: 4812 - RNA, 1376 nt, synthetic construct
  misc_feature 1..1376: note = mRNA a-1 (A100) (opt2) from Homo sapiens__NP_000448.3__HNF4A(1-375)(S142A_S143A_S148A_T166A_ S167A_S313A_S378A_T429A_T432A_S436A_K458R)
  source 1..1376: mol_type = other RNA
aggagagtcccgcagtcggcgtccagcggctctgcttgttcgtgtgtgtgtcgttgcaggccttattcaagcttaccatgcgcctctccaagaccctcgtcgacatggacatggccgactactccgccgccctcgaccccgcctacaccaccctcgagttcgagaacgtccaggtcctcaccatgggcaacgacacctccccctccgagggcaccaacctcaacgcccccaactccctcggcgtctccgccctctgcgccatctgcggcgaccgcgccaccggcaagcactacggcgcctcctcctgcgacggctgcaagggcttcttccgccgctccgtccgcaagaaccacatgtactcctgccgcttctcccgccagtgcgtcgtcgacaaggacaagcgcaaccagtgccgctactgccgcctcaagaagtgcttccgcgccggcatgaagaaggaggccgtccagaacgagcgcgaccgcatctccacccgccgcgccgcctacgaggactccgccctcccctccatcaacgccctcctccaggccgaggtcctctcccgccagatcgccgcccccgtctccggcatcaacggcgacatccgcgccaagaagatcgcctccatcgccgacgtctgcgagtccatgaaggagcagctcctcgtcctcgtcgagtgggccaagtacatccccgccttctgcgagctccccctcgacgaccaggtcgccctcctccgcgcccacgccggcgagcacctcctcctcggcgccaccaagcgctccatggtcttcaaggacgtcctcctcctcggcaacgactacatcgtcccccgccactgccccgagctcgccgagatgtcccgcgtctccatccgcatcctcgacgagctcgtcctccccttccaggagctccagatcgacgacaacgagtacgcctacctcaaggccatcatcttcttcgaccccgacgccaagggcctctccgaccccggcaagatcaagcgcctccgcgcccaggtccaggtctccctcgaggactacatcaacgaccgccagtacgactcccgcggccgcttcggcgagctcctcctcctcctccccaccctccagtccatcacctggcagatgatcgagcagatccagttcatcaagctcttcggcatggccaagatcgacaacctcctccaggagatgctcctctgaggactagtccctgttcccagagcccacttttttttctttttttgaaataaaatagcctgtctttcagatctaaaaaaaaaaaaaaaaaaaaaaaaaaaaaaaaaaaaaaaaaaaaaaaaaaaaaaaaaaaaaaaaaaaaaaaaaaaaaaaaaaaaaaaaaaaaaaaaaaaa

SEQ ID NO: 4813 - RNA, 1376 nt, synthetic construct
  misc_feature 1..1376: note = mRNA a-1 (A100) (opt2) from Homo sapiens__NP_000448.3__HNF4A(1-375)(S87A_S142A_S143A_S148A_T 166A_S167A_S313A_S378A_T429A_T432A_S436A_K458R)
  source 1..1376: mol_type = other RNA
aggagagtcccgcagtcggcgtccagcggctctgcttgttcgtgtgtgtgtcgttgcaggccttattcaagcttaccatgcgcctctccaagaccctcgtcgacatggacatggccgactactccgccgccctcgaccccgcctacaccaccctcgagttcgagaacgtccaggtcctcaccatgggcaacgacacctccccctccgagggcaccaacctcaacgcccccaactccctcggcgtctccgccctctgcgccatctgcggcgaccgcgccaccggcaagcactacggcgcctcctcctgcgacggctgcaagggcttcttccgccgcgccgtccgcaagaaccacatgtactcctgccgcttctcccgccagtgcgtcgtcgacaaggacaagcgcaaccagtgccgctactgccgcctcaagaagtgcttccgcgccggcatgaagaaggaggccgtccagaacgagcgcgaccgcatctccacccgccgcgccgcctacgaggactccgccctcccctccatcaacgccctcctccaggccgaggtcctctcccgccagatcgccgcccccgtctccggcatcaacggcgacatccgcgccaagaagatcgcctccatcgccgacgtctgcgagtccatgaaggagcagctcctcgtcctcgtcgagtgggccaagtacatccccgccttctgcgagctccccctcgacgaccaggtcgccctcctccgcgcccacgccggcgagcacctcctcctcggcgccaccaagcgctccatggtcttcaaggacgtcctcctcctcggcaacgactacatcgtcccccgccactgccccgagctcgccgagatgtcccgcgtctccatccgcatcctcgacgagctcgtcctccccttccaggagctccagatcgacgacaacgagtacgcctacctcaaggccatcatcttcttcgaccccgacgccaagggcctctccgaccccggcaagatcaagcgcctccgcgcccaggtccaggtctccctcgaggactacatcaacgaccgccagtacgactcccgcggccgcttcggcgagctcctcctcctcctccccaccctccagtccatcacctggcagatgatcgagcagatccagttcatcaagctcttcggcatggccaagatcgacaacctcctccaggagatgctcctctgaggactagtccctgttcccagagcccacttttttttctttttttgaaataaaatagcctgtctttcagatctaaaaaaaaaaaaaaaaaaaaaaaaaaaaaaaaaaaaaaaaaaaaaaaaaaaaaaaaaaaaaaaaaaaaaaaaaaaaaaaaaaaaaaaaaaaaaaaaaaaa

SEQ ID NO: 4814 - RNA, 1376 nt, synthetic construct
  misc_feature 1..1376: note = mRNA a-1 (A100) (opt2) from Homo sapiens__NP_000448.3__HNF4A(1-375)(S87A_K106R_K108R_K126R_K 127R_S142A_S143A_S148A_T166A_S167A_S313A_S378A_T429A_T432A_ S436A_K458R)
  source 1..1376: mol_type = other RNA
aggagagtcccgcagtcggcgtccagcggctctgcttgttcgtgtgtgtgtcgttgcaggccttattcaagcttaccatgcgcctctccaagaccctcgtcgacatggacatggccgactactccgccgccctcgaccccgcctacaccaccctcgagttcgagaacgtccaggtcctcaccatgggcaacgacacctccccctccgagggcaccaacctcaacgcccccaactccctcggcgtctccgccctctgcgccatctgcggcgaccgcgccaccggcaagcactacggcgcctcctcctgcgacggctgcaagggcttcttccgccgcgccgtccgcaagaaccacatgtactcctgccgcttctcccgccagtgcgtcgtcgaccgcgaccgccgcaaccagtgccgctactgccgcctcaagaagtgcttccgcgccggcatgcgccgcgaggccgtccagaacgagcgcgaccgcatctccacccgccgcgccgcctacgaggactccgccctcccctccatcaacgccctcctccaggccgaggtcctctcccgccagatcgccgcccccgtctccggcatcaacggcgacatccgcgccaagaagatcgcctccatcgccgacgtctgcgagtccatgaaggagcagctcctcgtcctcgtcgagtgggccaagtacatccccgccttctgcgagctccccctcgacgaccaggtcgccctcctccgcgcccacgccggcgagcacctcctcctcggcgccaccaagcgctccatggtcttcaaggacgtcctcctcctcggcaacgactacatcgtcccccgccactgccccgagctcgccgagatgtcccgcgtctccatccgcatcctcgacgagctcgtcctccccttccaggagctccagatcgacgacaacgagtacgcctacctcaaggccatcatcttcttcgaccccgacgccaagggcctctccgaccccggcaagatcaagcgcctccgcgcccaggtccaggtctccctcgaggactacatcaacgaccgccagtacgactcccgcggccgcttcggcgagctcctcctcctcctccccaccctccagtccatcacctggcagatgatcgagcagatccagttcatcaagctcttcggcatggccaagatcgacaacctcctccaggagatgctcctctgaggactagtccctgttcccagagcccacttttttttctttttttgaaataaaatagcctgtctttcagatctaaaaaaaaaaaaaaaaaaaaaaaaaaaaaaaaaaaaaaaaaaaaaaaaaaaaaaaaaaaaaaaaaaaaaaaaaaaaaaaaaaaaaaaaaaaaaaaaaaaa

SEQ ID NO: 4815 - RNA, 1376 nt, synthetic construct
  misc_feature 1..1376: note = mRNA a-1 (A100) (opt2) from Homo sapiens__NP_000448.3__HNF4A(1-375)(S87A_K106R_K108R_K126R_K 127R)
  source 1..1376: mol_type = other RNA
aggagagtcccgcagtcggcgtccagcggctctgcttgttcgtgtgtgtgtcgttgcaggccttattcaagcttaccatgcgcctctccaagaccctcgtcgacatggacatggccgactactccgccgccctcgaccccgcctacaccaccctcgagttcgagaacgtccaggtcctcaccatgggcaacgacacctccccctccgagggcaccaacctcaacgcccccaactccctcggcgtctccgccctctgcgccatctgcggcgaccgcgccaccggcaagcactacggcgcctcctcctgcgacggctgcaagggcttcttccgccgcgccgtccgcaagaaccacatgtactcctgccgcttctcccgccagtgcgtcgtcgaccgcgaccgccgcaaccagtgccgctactgccgcctcaagaagtgcttccgcgccggcatgcgccgcgaggccgtccagaacgagcgcgaccgcatctccacccgccgctcctcctacgaggactcctccctcccctccatcaacgccctcctccaggccgaggtcctctcccgccagatcacctcccccgtctccggcatcaacggcgacatccgcgccaagaagatcgcctccatcgccgacgtctgcgagtccatgaaggagcagctcctcgtcctcgtcgagtgggccaagtacatccccgccttctgcgagctccccctcgacgaccaggtcgccctcctccgcgcccacgccggcgagcacctcctcctcggcgccaccaagcgctccatggtcttcaaggacgtcctcctcctcggcaacgactacatcgtcccccgccactgccccgagctcgccgagatgtcccgcgtctccatccgcatcctcgacgagctcgtcctccccttccaggagctccagatcgacgacaacgagtacgcctacctcaaggccatcatcttcttcgaccccgacgccaagggcctctccgaccccggcaagatcaagcgcctccgctcccaggtccaggtctccctcgaggactacatcaacgaccgccagtacgactcccgcggccgcttcggcgagctcctcctcctcctccccaccctccagtccatcacctggcagatgatcgagcagatccagttcatcaagctcttcggcatggccaagatcgacaacctcctccaggagatgctcctctgaggactagtccctgttcccagagcccacttttttttctttttttgaaataaaatagcctgtctttcagatctaaaaaaaaaaaaaaaaaaaaaaaaaaaaaaaaaaaaaaaaaaaaaaaaaaaaaaaaaaaaaaaaaaaaaaaaaaaaaaaaaaaaaaaaaaaaaaaaaaaa

SEQ ID NO: 4816 - RNA, 1376 nt, synthetic construct; identical to SEQ ID NO: 4814
  misc_feature 1..1376: note = mRNA a-1 (A100) (opt2) from Homo sapiens__NP_000448.3__HNF4A(1-375)(S87A_K106R_K108R_K126R_K 127R_S142A_S143A_S148A_T166A_S167A_S313A_S378A_T429A_T432A_ S436A_K458R_S461A)
  source 1..1376: mol_type = other RNA

SEQ ID NO: 4817 - RNA, 1376 nt, synthetic construct; identical to SEQ ID NO: 4814
  misc_feature 1..1376: note = mRNA a-1 (A100) (opt2) from Homo sapiens__NP_000448.3__HNF4A(1-375)(S87A_K106R_K108R_K126R_K 127R_S142A_S143A_S148A_T166A_S167A_S313A_S378A_T429A_T432A_ S436A_K458R_S461E)
  source 1..1376: mol_type = other RNA

SEQ ID NO: 4818 - RNA, 1376 nt, synthetic construct
  misc_feature 1..1376: note = mRNA a-1 (A100) (opt2) from Homo sapiens__NP_000448.3__HNF4A(1-375)(S87A_K106R_K108R_K126R_K 127R_S142A_S143A_S148E_T166A_S167E_S313A_S378E_T429E_T432E_ S436E_K458R_S461E)
  source 1..1376: mol_type = other RNA
aggagagtcccgcagtcggcgtccagcggctctgcttgttcgtgtgtgtgtcgttgcaggccttattcaagcttaccatgcgcctctccaagaccctcgtcgacatggacatggccgactactccgccgccctcgaccccgcctacaccaccctcgagttcgagaacgtccaggtcctcaccatgggcaacgacacctccccctccgagggcaccaacctcaacgcccccaactccctcggcgtctccgccctctgcgccatctgcggcgaccgcgccaccggcaagcactacggcgcctcctcctgcgacggctgcaagggcttcttccgccgcgccgtccgcaagaaccacatgtactcctgccgcttctcccgccagtgcgtcgtcgaccgcgaccgccgcaaccagtgccgctactgccgcctcaagaagtgcttccgcgccggcatgcgccgcgaggccgtccagaacgagcgcgaccgcatctccacccgccgcgccgcctacgaggactccgagctcccctccatcaacgccctcctccaggccgaggtcctctcccgccagatcgccgagcccgtctccggcatcaacggcgacatccgcgccaagaagatcgcctccatcgccgacgtctgcgagtccatgaaggagcagctcctcgtcctcgtcgagtgggccaagtacatccccgccttctgcgagctccccctcgacgaccaggtcgccctcctccgcgcccacgccggcgagcacctcctcctcggcgccaccaagcgctccatggtcttcaaggacgtcctcctcctcggcaacgactacatcgtcccccgccactgccccgagctcgccgagatgtcccgcgtctccatccgcatcctcgacgagctcgtcctccccttccaggagctccagatcgacgacaacgagtacgcctacctcaaggccatcatcttcttcgaccccgacgccaagggcctctccgaccccggcaagatcaagcgcctccgcgcccaggtccaggtctccctcgaggactacatcaacgaccgccagtacgactcccgcggccgcttcggcgagctcctcctcctcctccccaccctccagtccatcacctggcagatgatcgagcagatccagttcatcaagctcttcggcatggccaagatcgacaacctcctccaggagatgctcctctgaggactagtccctgttcccagagcccacttttttttctttttttgaaataaaatagcctgtctttcagatctaaaaaaaaaaaaaaaaaaaaaaaaaaaaaaaaaaaaaaaaaaaaaaaaaaaaaaaaaaaaaaaaaaaaaaaaaaaaaaaaaaaaaaaaaaaaaaaaaaaa

SEQ ID NO: 4819 - RNA, 1376 nt, synthetic construct
  misc_feature 1..1376: note = mRNA a-1 (A100) (opt2) from Homo sapiens__NP_000448.3__HNF4A(1-375)(S87A_K106R_K108R_K126R_K 127R_S142A_S143A_S148A_T166A_S167A_K179R_K180R_S313A_S378A_ T429A_T432A_S436A_K458R_S461E)
  source 1..1376: mol_type = other RNA
aggagagtcccgcagtcggcgtccagcggctctgcttgttcgtgtgtgtgtcgttgcaggccttattcaagcttaccatgcgcctctccaagaccctcgtcgacatggacatggccgactactccgccgccctcgaccccgcctacaccaccctcgagttcgagaacgtccaggtcctcaccatgggcaacgacacctccccctccgagggcaccaacctcaacgcccccaactccctcggcgtctccgccctctgcgccatctgcggcgaccgcgccaccggcaagcactacggcgcctcctcctgcgacggctgcaagggcttcttccgccgcgccgtccgcaagaaccacatgtactcctgccgcttctcccgccagtgcgtcgtcgaccgcgaccgccgcaaccagtgccgctactgccgcctcaagaagtgcttccgcgccggcatgcgccgcgaggccgtccagaacgagcgcgaccgcatctccacccgccgcgccgcctacgaggactccgccctcccctccatcaacgccctcctccaggccgaggtcctctcccgccagatcgccgcccccgtctccggcatcaacggcgacatccgcgcccgccgcatcgcctccatcgccgacgtctgcgagtccatgaaggagcagctcctcgtcctcgtcgagtgggccaagtacatccccgccttctgcgagctccccctcgacgaccaggtcgccctcctccgcgcccacgccggcgagcacctcctcctcggcgccaccaagcgctccatggtcttcaaggacgtcctcctcctcggcaacgactacatcgtcccccgccactgccccgagctcgccgagatgtcccgcgtctccatccgcatcctcgacgagctcgtcctccccttccaggagctccagatcgacgacaacgagtacgcctacctcaaggccatcatcttcttcgaccccgacgccaagggcctctccgaccccggcaagatcaagcgcctccgcgcccaggtccaggtctccctcgaggactacatcaacgaccgccagtacgactcccgcggccgcttcggcgagctcctcctcctcctccccaccctccagtccatcacctggcagatgatcgagcagatccagttcatcaagctcttcggcatggccaagatcgacaacctcctccaggagatgctcctctgaggactagtccctgttcccagagcccacttttttttctttttttgaaataaaatagcctgtctttcagatctaaaaaaaaaaaaaaaaaaaaaaaaaaaaaaaaaaaaaaaaaaaaaaaaaaaaaaaaaaaaaaaaaaaaaaaaaaaaaaaaaaaaaaaaaaaaaaaaaaaa

SEQ ID NO: 4820 - RNA, 1376 nt, synthetic construct
  misc_feature 1..1376: note = mRNA a-1 (A100) (opt2) from Homo sapiens__NP_000448.3__HNF4A(1-375)(S87A_K106R_K108R_K126R_K 127R_S142A_S143A_S148A_T166A_S167A_K300R_K307R_K309R_S313A_ S378A_T429A_T432A_S436A_K458R_S461E)
  source 1..1376: mol_type = other RNA
aggagagtcccgcagtcggcgtccagcggctctgcttgttcgtgtgtgtgtcgttgcaggccttattcaagcttaccatgcgcctctccaagaccctcgtcgacatggacatggccgactactccgccgccctcgaccccgcctacaccaccctcgagttcgagaacgtccaggtcctcaccatgggcaacgacacctccccctccgagggcaccaacctcaacgcccccaactccctcggcgtctccgccctctgcgccatctgcggcgaccgcgccaccggcaagcactacggcgcctcctcctgcgacggctgcaagggcttcttccgccgcgccgtccgcaagaaccacatgtactcctgccgcttctcccgccagtgcgtcgtcgaccgcgaccgccgcaaccagtgccgctactgccgcctcaagaagtgcttccgcgccggcatgcgccgcgaggccgtccagaacgagcgcgaccgcatctccacccgccgcgccgcctacgaggactccgccctcccctccatcaacgccctcctccaggccgaggtcctctcccgccagatcgccgcccccgtctccggcatcaacggcgacatccgcgccaagaagatcgcctccatcgccgacgtctgcgagtccatgaaggagcagctcctcgtcctcgtcgagtgggccaagtacatccccgccttctgcgagctccccctcgacgaccaggtcgccctcctccgcgcccacgccggcgagcacctcctcctcggcgccaccaagcgctccatggtcttcaaggacgtcctcctcctcggcaacgactacatcgtcccccgccactgccccgagctcgccgagatgtcccgcgtctccatccgcatcctcgacgagctcgtcctccccttccaggagctccagatcgacgacaacgagtacgcctacctcaaggccatcatcttcttcgaccccgacgcccgcggcctctccgaccccggccgcatccgccgcctccgcgcccaggtccaggtctccctcgaggactacatcaacgaccgccagtacgactcccgcggccgcttcggcgagctcctcctcctcctccccaccctccagtccatcacctggcagatgatcgagcagatccagttcatcaagctcttcggcatggccaagatcgacaacctcctccaggagatgctcctctgaggactagtccctgttcccagagcccacttttttttctttttttgaaataaaatagcctgtctttcagatctaaaaaaaaaaaaaaaaaaaaaaaaaaaaaaaaaaaaaaaaaaaaaaaaaaaaaaaaaaaaaaaaaaaaaaaaaaaaaaaaaaaaaaaaaaaaaaaaaaaa

SEQ ID NO: 4821 - RNA, 1376 nt, synthetic construct; identical to SEQ ID NO: 4814
  misc_feature 1..1376: note = mRNA a-1 (A100) (opt2) from Homo sapiens__NP_000448.3__HNF4A(1-375)(S87A_K106R_K108R_K126R_K 127R_S142A_S143A_S148A_T166A_S167A_S313A_S378A_T429A_T432A_ S436A_K447R_K458R_S461E_K470R)
  source 1..1376: mol_type = other RNA

SEQ ID NO: 4822 - RNA, 1376 nt, synthetic construct
  misc_feature 1..1376: note = mRNA a-1 (A100) (opt2) from Homo sapiens__NP_000448.3__HNF4A(1-375)(S87A_K106R_K108R_K126R_K 127R_S142A_S143A_S148A_T166A_S167A_K179R_K180R_K234R_K300R_ K307R_K309R_S313A_S378A_T429A_T432A_S436A_K447R_K458R_S461E _K470R)
  source 1..1376: mol_type = other RNA
aggagagtcccgcagtcggcgtccagcggctctgcttgttcgtgtgtgtgtcgttgcaggccttattcaagcttaccatgcgcctctccaagaccctcgtcgacatggacatggccgactactccgccgccctcgaccccgcctacaccaccctcgagttcgagaacgtccaggtcctcaccatgggcaacgacacctccccctccgagggcaccaacctcaacgcccccaactccctcggcgtctccgccctctgcgccatctgcggcgaccgcgccaccggcaagcactacggcgcctcctcctgcgacggctgcaagggcttcttccgccgcgccgtccgcaagaaccacatgtactcctgccgcttctcccgccagtgcgtcgtcgaccgcgaccgccgcaaccagtgccgctactgccgcctcaagaagtgcttccgcgccggcatgcgccgcgaggccgtccagaacgagcgcgaccgcatctccacccgccgcgccgcctacgaggactccgccctcccctccatcaacgccctcctccaggccgaggtcctctcccgccagatcgccgcccccgtctccggcatcaacggcgacatccgcgcccgccgcatcgcctccatcgccgacgtctgcgagtccatgaaggagcagctcctcgtcctcgtcgagtgggccaagtacatccccgccttctgcgagctccccctcgacgaccaggtcgccctcctccgcgcccacgccggcgagcacctcctcctcggcgccacccgccgctccatggtcttcaaggacgtcctcctcctcggcaacgactacatcgtcccccgccactgccccgagctcgccgagatgtcccgcgtctccatccgcatcctcgacgagctcgtcctccccttccaggagctccagatcgacgacaacgagtacgcctacctcaaggccatcatcttcttcgaccccgacgcccgcggcctctccgaccccggccgcatccgccgcctccgcgcccaggtccaggtctccctcgaggactacatcaacgaccgccagtacgactcccgcggccgcttcggcgagctcctcctcctcctccccaccctccagtccatcacctggcagatgatcgagcagatccagttcatcaagctcttcggcatggccaagatcgacaacctcctccaggagatgctcctctgaggactagtccctgttcccagagcccacttttttttctttttttgaaataaaatagcctgtctttcagatctaaaaaaaaaaaaaaaaaaaaaaaaaaaaaaaaaaaaaaaaaaaaaaaaaaaaaaaaaaaaaaaaaaaaaaaaaaaaaaaaaaaaaaaaaaaaaaaaaaaa

SEQ ID NO: 4823 - RNA, 1376 nt, synthetic construct
  misc_feature 1..1376: note = mRNA a-1 (A100) (opt2) from Homo sapiens__NP_000448.3__HNF4A(1-375)(S87A_S95A_S99A_K106R_K10 8R_K126R_K127R_S142A_S143A_S148A_T166A_S167A_S313A_S378A_T4 29A_T432A_S436A_K458R_S461E)
  source 1..1376: mol_type = other RNA
aggagagtcccgcagtcggcgtccagcggctctgcttgttcgtgtgtgtgtcgttgcaggccttattcaagcttaccatgcgcctctccaagaccctcgtcgacatggacatggccgactactccgccgccctcgaccccgcctacaccaccctcgagttcgagaacgtccaggtcctcaccatgggcaacgacacctccccctccgagggcaccaacctcaacgcccccaactccctcggcgtctccgccctctgcgccatctgcggcgaccgcgccaccggcaagcactacggcgcctcctcctgcgacggctgcaagggcttcttccgccgcgccgtccgcaagaaccacatgtacgcctgccgcttcgcccgccagtgcgtcgtcgaccgcgaccgccgcaaccagtgccgctactgccgcctcaagaagtgcttccgcgccggcatgcgccgcgaggccgtccagaacgagcgcgaccgcatctccacccgccgcgccgcctacgaggactccgccctcccctccatcaacgccctcctccaggccgaggtcctctcccgccagatcgccgcccccgtctccggcatcaacggcgacatccgcgccaagaagatcgcctccatcgccgacgtctgcgagtccatgaaggagcagctcctcgtcctcgtcgagtgggccaagtacatccccgccttctgcgagctccccctcgacgaccaggtcgccctcctccgcgcccacgccggcgagcacctcctcctcggcgccaccaagcgctccatggtcttcaaggacgtcctcctcctcggcaacgactacatcgtcccccgccactgccccgagctcgccgagatgtcccgcgtctccatccgcatcctcgacgagctcgtcctccccttccaggagctccagatcgacgacaacgagtacgcctacctcaaggccatcatcttcttcgaccccgacgccaagggcctctccgaccccggcaagatcaagcgcctccgcgcccaggtccaggtctccctcgaggactacatcaacgaccgccagtacgactcccgcggccgcttcggcgagctcctcctcctcctccccaccctccagtccatcacctggcagatgatcgagcagatccagttcatcaagctcttcggcatggccaagatcgacaacctcctccaggagatgctcctctgaggactagtccctgttcccagagcccacttttttttctttttttgaaataaaatagcctgtctttcagatctaaaaaaaaaaaaaaaaaaaaaaaaaaaaaaaaaaaaaaaaaaaaaaaaaaaaaaaaaaaaaaaaaaaaaaaaaaaaaaaaaaaaaaaaaaaaaaaaaaaa

SEQ ID NO: 4824 - RNA, 1376 nt, synthetic construct
  misc_feature 1..1376: note = mRNA a-1 (A100) (opt2) from Homo sapiens__NP_000448.3__HNF4A(1-375)(S87A_K106R_K108R_K126R_K 127R_S138A_T139A_S142A_S143A_S148A_T166A_S167A_S313A_S378A_ T429A_T432A_S436A_K458R_S461E)
  source 1..1376: mol_type = other RNA
aggagagtcccgcagtcggcgtccagcggctctgcttgttcgtgtgtgtgtcgttgcaggccttattcaagcttaccatgcgcctctccaagaccctcgtcgacatggacatggccgactactccgccgccctcgaccccgcctacaccaccctcgagttcgagaacgtccaggtcctcaccatgggcaacgacacctccccctccgagggcaccaacctcaacgcccccaactccctcggcgtctccgccctctgcgccatctgcggcgaccgcgccaccggcaagcactacggcgcctcctcctgcgacggctgcaagggcttcttccgccgcgccgtccgcaagaaccacatgtactcctgccgcttctcccgccagtgcgtcgtcgaccgcgaccgccgcaaccagtgccgctactgccgcctcaagaagtgcttccgcgccggcatgcgccgcgaggccgtccagaacgagcgcgaccgcatcgccgcccgccgcgccgcctacgaggactccgccctcccctccatcaacgccctcctccaggccgaggtcctctcccgccagatcgccgcccccgtctccggcatcaacggcgacatccgcgccaagaagatcgcctccatcgccgacgtctgcgagtccatgaaggagcagctcctcgtcctcgtcgagtgggccaagtacatccccgccttctgcgagctccccctcgacgaccaggtcgccctcctccgcgcccacgccggcgagcacctcctcctcggcgccaccaagcgctccatggtcttcaaggacgtcctcctcctcggcaacgactacatcgtcccccgccactgccccgagctcgccgagatgtcccgcgtctccatccgcatcctcgacgagctcgtcctccccttccaggagctccagatcgacgacaacgagtacgcctacctcaaggccatcatcttcttcgaccccgacgccaagggcctctccgaccccggcaagatcaagcgcctccgcgcccaggtccaggtctccctcgaggactacatcaacgaccgccagtacgactcccgcggccgcttcggcgagctcctcctcctcctccccaccctccagtccatcacctggcagatgatcgagcagatccagttcatcaagctcttcggcatggccaagatcgacaacctcctccaggagatgctcctctgaggactagtccctgttcccagagcccacttttttttctttttttgaaataaaatagcctgtctttcagatctaaaaaaaaaaaaaaaaaaaaaaaaaaaaaaaaaaaaaaaaaaaaaaaaaaaaaaaaaaaaaaaaaaaaaaaaaaaaaaaaaaaaaaaaaaaaaaaaaaaa

SEQ ID NO: 4825 - RNA, 1376 nt, synthetic construct
  misc_feature 1..1376: note = mRNA a-1 (A100) (opt2) from Homo sapiens__NP_000448.3__HNF4A(1-375)(S87A_S95A_S99A_K106R_K10 8R_K126R_K127R_S138A_T139A_S142A_S143A_S148A_T166A_S167A_S3 13A_S378A_T429A_T432A_S436A_K458R_S461E)
  source 1..1376: mol_type = other RNA
aggagagtcccgcagtcggcgtccagcggctctgcttgttcgtgtgtgtgtcgttgcaggccttattcaagcttaccatgcgcctctccaagaccctcgtcgacatggacatggccgactactccgccgccctcgaccccgcctacaccaccctcgagttcgagaacgtccaggtcctcaccatgggcaacgacacctccccctccgagggcaccaacctcaacgcccccaactccctcggcgtctccgccctctgcgccatctgcggcgaccgcgccaccggcaagcactacggcgcctcctcctgcgacggctgcaagggcttcttccgccgcgccgtccgcaagaaccacatgtacgcctgccgcttcgcccgccagtgcgtcgtcgaccgcgaccgccgcaaccagtgccgctactgccgcctcaagaagtgcttccgcgccggcatgcgccgcgaggccgtccagaacgagcgcgaccgcatcgccgcccgccgcgccgcctacgaggactccgccctcccctccatcaacgccctcctccaggccgaggtcctctcccgccagatcgccgcccccgtctccggcatcaacggcgacatccgcgccaagaagatcgcctccatcgccgacgtctgcgagtccatgaaggagcagctcctcgtcctcgtcgagtgggccaagtacatccccgccttctgcgagctccccctcgacgaccaggtcgccctcctccgcgcccacgccggcgagcacctcctcctcggcgccaccaagcgctccatggtcttcaaggacgtcctcctcctcggcaacgactacatcgtcccccgccactgccccgagctcgccgagatgtcccgcgtctccatccgcatcctcgacgagctcgtcctccccttccaggagctccagatcgacgacaacgagtacgcctacctcaaggccatcatcttcttcgaccccgacgccaagggcctctccgaccccggcaagatcaagcgcctccgcgcccaggtccaggtctccctcgaggactacatcaacgaccgccagtacgactcccgcggccgcttcggcgagctcctcctcctcctccccaccctccagtccatcacctggcagatgatcgagcagatccagttcatcaagctcttcggcatggccaagatcgacaacctcctccaggagatgctcctctgaggactagtccctgttcccagagcccacttttttttctttttttgaaataaaatagcctgtctttcagatctaaaaaaaaaaaaaaaaaaaaaaaaaaaaaaaaaaaaaaaaaaaaaaaaaaaaaaaaaaaaaaaaaaaaaaaaaaaaaaaaaaaaaaaaaaaaaaaaaaaa

SEQ ID NO: 4826 - RNA, 1376 nt, synthetic construct
  misc_feature 1..1376: note = mRNA a-1 (A100) (opt3) from Homo sapiens__NP_000448.3__HNF4A(1-375)
  source 1..1376: mol_type = other RNA
aggagagtcccgcagtcggcgtccagcggctctgcttgttcgtgtgtgtgtcgttgcaggccttattcaagcttaccatgagactgagcaagaccctcgtggacatggatatggccgactactccgctgcacttgatcccgcctatacaactctggagttcgaaaacgtccaggttttgacgatgggcaatgacacctctccttcagaggggacaaacttaaatgcgccaaacagtctgggagtgagcgctctatgcgccatctgtggtgatagggcaactggcaaacactacggggcctcctcttgcgacggatgtaagggctttttccggcgctcggtacgtaaaaatcatatgtattcatgccgatttagcagacaatgtgtggtcgataaggacaaaaggaaccagtgccggtactgtcgcctcaagaagtgcttcagagctggtatgaaaaaggaagcagtgcagaatgagagggatcggattagtacccgccgatcctcttatgaagacagctccctgccgtcaataaacgcccttctgcaggctgaggttttgagtagacaaatcacaagccccgtgtctgggattaatggagatatcagggccaaaaagattgcgtccatcgcagacgtctgtgagtcaatgaaagaacagctcctggtgctggtagagtgggccaagtacatacctgctttttgcgaactcccattagatgaccaggttgccctgcttcgggcacacgctggcgagcatttgctgctaggcgccaccaagcgtagcatggtgttcaaagacgtcctcctgcttgggaacgattatatcgtgccccgccactgtcctgagctggcggaaatgagtagagtgtctattaggatcttggacgagctcgtcctgccatttcaggaattacaaattgatgacaatgagtacgcctacctgaaggcaatcatattctttgatcccgacgctaaaggactctccgatcctggtaagattaaacggcttcgaagccaggttcaggtgtcgctggaagactatatcaacgatcgccagtacgactctagaggcaggttcggggagttgctactgctcctgccaactcttcaatccattacatggcagatgatcgagcagatccaatttattaagctgttcggaatggccaaaatagataatttgctccaggaaatgctgttatgaggactagtccctgttcccagagcccacttttttttctttttttgaaataaaatagcctgtctttcagatctaaaaaaaaaaaaaaaaaaaaaaaaaaaaaaaaaaaaaaaaaaaaaaaaaaaaaaaaaaaaaaaaaaaaaaaaaaaaaaaaaaaaaaaaaaaaaaaaaaaa

SEQ ID NO: 4827 - RNA, 1376 nt, synthetic construct
  misc_feature 1..1376: note = mRNA a-1 (A100) (opt3) from Homo sapiens__NP_000448.3__HNF4A(1-375)(S313A)
  source 1..1376: mol_type = other RNA
aggagagtcccgcagtcggcgtccagcggctctgcttgttcgtgtgtgtgtcgttgcaggccttattcaagcttaccatgagactgagcaagaccctcgtggacatggatatggccgactactccgctgcacttgatcccgcctatacaactctggagttcgaaaacgtccaggttttgacgatgggcaatgacacctctccttcagaggggacaaacttaaatgcgccaaacagtctgggagtgagcgctctatgcgccatctgtggtgatagggcaactggcaaacactacggggcctcctcttgcgacggatgtaagggctttttccggcgctcggtacgtaaaaatcatatgtattcatgccgatttagcagacaatgtgtggtcgataaggacaaaaggaaccagtgccggtactgtcgcctcaagaagtgcttcagagctggtatgaaaaaggaagcagtgcagaatgagagggatcggattagtacccgccgatcctcttatgaagacagctccctgccgtcaataaacgcccttctgcaggctgaggttttgagtagacaaatcacaagccccgtgtctgggattaatggagatatcagggccaaaaagattgcgtccatcgcagacgtctgtgagtcaatgaaagaacagctcctggtgctggtagagtgggccaagtacatacctgctttttgcgaactcccattagatgaccaggttgccctgcttcgggcacacgctggcgagcatttgctgctaggcgccaccaagcgtagcatggtgttcaaagacgtcctcctgcttgggaacgattatatcgtgccccgccactgtcctgagctggcggaaatgagtagagtgtctattaggatcttggacgagctcgtcctgccatttcaggaattacaaattgatgacaatgagtacgcctacctgaaggcaatcatattctttgatcccgacgctaaaggactctccgatcctggtaagattaaacggcttcgagcccaggttcaggtgagcctggaagactatatcaacgatcgccagtacgactcgagaggcaggttcggggagttgctactgctcctgccaactcttcaatctattacatggcagatgatcgagcagatccaatttattaagctgttcggaatggctaaaatagataatttgctccaggaaatgctgttatgaggactagtccctgttcccagagcccacttttttttctttttttgaaataaaatagcctgtctttcagatctaaaaaaaaaaaaaaaaaaaaaaaaaaaaaaaaaaaaaaaaaaaaaaaaaaaaaaaaaaaaaaaaaaaaaaaaaaaaaaaaaaaaaaaaaaaaaaaaaaaa

SEQ ID NO: 4828 - RNA, 1376 nt, synthetic construct
  misc_feature 1..1376: note = mRNA a-1 (A100) (opt3) from Homo sapiens__NP_000448.3__HNF4A(1-375)(S313E)
  source 1..1376: mol_type = other RNA
aggagagtcccgcagtcggcgtccagcggctctgcttgttcgtgtgtgtgtcgttgcaggccttattcaagcttaccatgagactgagcaagaccctcgtggacatggatatggccgactactccgctgcacttgatcccgcctatacaactctggagttcgaaaacgtccaggttttgacgatgggcaatgacacctctccttcagaggggacaaacttaaatgcgccaaacagtctgggagtgagcgctctatgcgccatctgtggtgatagggcaactggcaaacactacggggcctcctcttgcgacggatgtaagggctttttccggcgctcggtacgtaaaaatcatatgtattcatgccgatttagcagacaatgtgtggtcgataaggacaaaaggaaccagtgccggtactgtcgcctcaagaagtgcttcagagctggtatgaaaaaggaagcagtgcagaatgagagggatcggattagtacccgccgatcctcttatgaagacagctccctgccgtcaataaacgcccttctgcaggctgaggttttgagtagacaaatcacaagccccgtgtctgggattaatggagatatcagggccaaaaagattgcgtccatcgcagacgtctgtgagtcaatgaaagaacagctcctggtgctggtagagtgggccaagtacatacctgctttttgcgaactcccattagatgaccaggttgccctgcttcgggcacacgctggcgagcatttgctgctaggcgccaccaagcgtagcatggtgttcaaagacgtcctcctgcttgggaacgattatatcgtgccccgccactgtcctgagctggcggaaatgagtagagtgtctattaggatcttggacgagctcgtcctgccatttcaggaattacaaattgatgacaatgagtacgcctacctgaaggcaatcatattctttgatcccgacgctaaaggactctccgatcctggtaagattaaacggcttcgagaacaggttcaggtgagcctggaggactatatcaacgatcgccagtacgactcgagaggcaggttcggggagttgctactgctcctgccaactcttcaatctattacatggcagatgatcgaacagatccaatttattaagctgttcggaatggccaaaatagataatttgctccaggagatgctgttatgaggactagtccctgttcccagagcccacttttttttctttttttgaaataaaatagcctgtctttcagatctaaaaaaaaaaaaaaaaaaaaaaaaaaaaaaaaaaaaaaaaaaaaaaaaaaaaaaaaaaaaaaaaaaaaaaaaaaaaaaaaaaaaaaaaaaaaaaaaaaaa

SEQ ID NO: 4829 - RNA, 1376 nt, synthetic construct
  misc_feature 1..1376: note = mRNA a-1 (A100) (opt3) from Homo sapiens__NP_000448.3__HNF4A(1-375)(S142A_S143A)
  source 1..1376: mol_type = other RNA
aggagagtcccgcagtcggcgtccagcggctctgcttgttcgtgtgtgtgtcgttgcaggccttattcaagcttaccatgagactgagcaagaccctcgtggacatggatatggccgactactccgctgcacttgatcccgcctatacaactctggagttcgaaaacgtccaggttttgacgatgggcaatgacacctctccttcagaggggacaaacttaaatgcgccaaacagtctgggagtgagcgctctatgcgccatctgtggtgatagggcaactggcaaacactacggggcctcctcttgcgacggatgtaagggctttttccggcgctcggtacgtaaaaatcatatgtattcatgccgatttagcagacaatgtgtggtcgataaggacaaaaggaaccagtgccggtactgtcgcctcaagaagtgcttcagagctggtatgaaaaaggaagcagtgcagaatgagagggatcggattagtacccgccgagccgcttatgaagactcctctctgccgagcataaacgcccttctgcaggcggaggttttgtccagacaaatcacatcacccgtgagtgggattaatggagatatcagggccaaaaagattgcaagcatcgctgacgtctgtgagtctatgaaagaacagctcctggtgctggtagagtgggccaagtacatacctgcattttgcgaactcccattagatgaccaggttgctctgcttcgggcccacgcgggcgagcatttgctgctaggcgccaccaagcgttccatggtgttcaaagacgtcctcctgcttgggaacgattatatcgtgccccgccactgtcctgagctggcagaaatgtcaagagtgagcattaggatcttggacgagctcgtcctgccatttcaggaattacaaattgatgacaatgagtacgcttacctgaaggccatcatattctttgatcccgacgctaaaggactcagtgatcctggtaagattaaacggcttcgatctcaggttcaggtgtccctggaagactatatcaacgatcgccagtacgacagcagaggcaggttcggggagttgctactgctcctgccaactcttcaatcgattacatggcagatgatcgagcagatccaatttattaagctgttcggaatggccaaaatagataatttgctccaggaaatgctgttatgaggactagtccctgttcccagagcccacttttttttctttttttgaaataaaatagcctgtctttcagatctaaaaaaaaaaaaaaaaaaaaaaaaaaaaaaaaaaaaaaaaaaaaaaaaaaaaaaaaaaaaaaaaaaaaaaaaaaaaaaaaaaaaaaaaaaaaaaaaaaaa

SEQ ID NO: 4830 - RNA, 1376 nt, synthetic construct
  misc_feature 1..1376: note = mRNA a-1 (A100) (opt3) from Homo sapiens__NP_000448.3__HNF4A(1-375)(S142E_S143E)
  source 1..1376: mol_type = other RNA
aggagagtcccgcagtcggcgtccagcggctctgcttgttcgtgtgtgtgtcgttgcaggccttattcaagcttaccatgagactgagcaagaccctcgtggacatggatatggccgactactccgctgcacttgatcccgcctatacaactctggagttcgaaaacgtccaggttttgacgatgggcaatgacacctctccttcagaggggacaaacttaaatgcgccaaacagtctgggagtgagcgctctatgcgccatctgtggtgatagggcaactggcaaacactacggggcctcctcttgcgacggatgtaagggctttttccggcgctcggtacgtaaaaatcatatgtattcatgccgatttagcagacaatgtgtggtcgataaggacaaaaggaaccagtgccggtactgtcgcctcaagaagtgcttcagagctggtatgaaaaaggaagcagtgcagaatgagagggatcggattagtacccgccgagaagagtatgaggactcctctctgccgagcataaacgcccttctgcaggctgaagttttgtccagacaaatcacatcacccgtgagtgggattaatggagatatcagggccaaaaagattgcgagcatcgcagacgtctgtgagtctatgaaagaacagctcctggtgctggtagagtgggccaagtacatacctgctttttgcgagctcccattagatgaccaggttgccctgcttcgggcacacgctggcgaacatttgctgctaggcgccaccaagcgttccatggtgttcaaagacgtcctcctgcttgggaacgattatatcgtgccccgccactgtcctgagctggcggaaatgtcaagagtgagcattaggatcttggacgagctcgtcctgccatttcaggaattacaaattgatgacaatgagtacgcctacctgaaggcaatcatattctttgatcccgacgctaaaggactcagtgatcctggtaagattaaacggcttcgatctcaggttcaggtgtccctggaggactatatcaacgatcgccagtacgacagcagaggcaggttcggggaattgctactgctcctgccaactcttcaatcgattacatggcagatgatcgagcagatccaatttattaagctgttcggaatggccaaaatagataatttgctccaggaaatgctgttatgaggactagtccctgttcccagagcccacttttttttctttttttgaaataaaatagcctgtctttcagatctaaaaaaaaaaaaaaaaaaaaaaaaaaaaaaaaaaaaaaaaaaaaaaaaaaaaaaaaaaaaaaaaaaaaaaaaaaaaaaaaaaaaaaaaaaaaaaaaaaaa

SEQ ID NO: 4831 - RNA, 1376 nt, synthetic construct
  misc_feature 1..1376: note = mRNA a-1 (A100) (opt3) from Homo sapiens__NP_000448.3__HNF4A(1-375)(S143A)
  source 1..1376: mol_type = other RNA
aggagagtcccgcagtcggcgtccagcggctctgcttgttcgtgtgtgtgtcgttgcaggccttattcaagcttaccatgagactgagcaagaccctcgtggacatggatatggccgactactccgctgcacttgatcccgcctatacaactctggagttcgaaaacgtccaggttttgacgatgggcaatgacacctctccttcagaggggacaaacttaaatgcgccaaacagtctgggagtgagcgctctatgcgccatctgtggtgatagggcaactggcaaacactacggggcctcctcttgcgacggatgtaagggctttttccggcgctcggtacgtaaaaatcatatgtattcatgccgatttagcagacaatgtgtggtcgataaggacaaaaggaaccagtgccggtactgtcgcctcaagaagtgcttcagagctggtatgaaaaaggaagcagtgcagaatgagagggatcggattagtacccgccgatccgcctatgaagactctagcctgccgtccataaacgcccttctgcaggccgaggttttgtcaagacaaatcacaagtcccgtgagcgggattaatggagatatcagggcgaaaaagattgcatctatcgccgacgtctgtgagtccatgaaagaacagctcctggtgctggtagagtgggctaagtacatacctgccttttgcgaactcccattagatgaccaggttgcactgcttcgggctcacgccggcgagcatttgctgctaggcgcgaccaagcgttcaatggtgttcaaagacgtcctcctgcttgggaacgattatatcgtgccccgccactgtcctgagctggccgaaatgagcagagtgagtattaggatcttggacgagctcgtcctgccatttcaggaattacaaattgatgacaatgagtacgcatacctgaaggctatcatattctttgatcccgacgccaaaggactctctgatcctggtaagattaaacggcttcgatcccaggttcaggtgagcctggaagactatatcaacgatcgccagtacgactcgagaggcaggttcggggagttgctactgctcctgccaactcttcaatctattacatggcagatgatcgagcagatccaatttattaagctgttcggaatggctaaaatagataatttgctccaggaaatgctgttatgaggactagtccctgttcccagagcccacttttttttctttttttgaaataaaatagcctgtctttcagatctaaaaaaaaaaaaaaaaaaaaaaaaaaaaaaaaaaaaaaaaaaaaaaaaaaaaaaaaaaaaaaaaaaaaaaaaaaaaaaaaaaaaaaaaaaaaaaaaaaaa

SEQ ID NO: 4832 - RNA, 1376 nt, synthetic construct
  misc_feature 1..1376: note = mRNA a-1 (A100) (opt3) from Homo sapiens__NP_000448.3__HNF4A(1-375)(T166A)
  source 1..1376: mol_type = other RNA
aggagagtcccgcagtcggcgtccagcggctctgcttgttcgtgtgtgtgtcgttgcaggccttattcaagcttaccatgagactgagcaagaccctcgtggacatggatatggccgactactccgctgcacttgatcccgcctatacaactctggagttcgaaaacgtccaggttttgacgatgggcaatgacacctctccttcagaggggacaaacttaaatgcgccaaacagtctgggagtgagcgctctatgcgccatctgtggtgatagggcaactggcaaacactacggggcctcctcttgcgacggatgtaagggctttttccggcgctcggtacgtaaaaatcatatgtattcatgccgatttagcagacaatgtgtggtcgataaggacaaaaggaaccagtgccggtactgtcgcctcaagaagtgcttcagagctggtatgaaaaaggaagcagtgcagaatgagagggatcggattagtacccgccgatcctcttatgaagacagctccctgccgtcaataaacgcccttctgcaggctgaggttttgagtagacaaatcgccagccccgtgtctgggattaatggagatatcagggcgaaaaagattgcatccatcgccgacgtctgtgagtcaatgaaagaacagctcctggtgctggtagagtgggctaagtacatacctgccttttgcgaactcccattagatgaccaggttgcactgcttcgggctcacgccggcgagcatttgctgctaggcgcgacaaagcgtagcatggtgttcaaagacgtcctcctgcttgggaacgattatatcgtgccccgccactgtcctgagctggccgaaatgagtagagtgtctattaggatcttggacgagctcgtcctgccatttcaggaattacaaattgatgacaatgagtacgcatacctgaaggctatcatattctttgatcccgacgccaaaggactctccgatcctggtaagattaaacggcttcgaagccaggttcaggtgtcgctggaagactatatcaacgatcgccagtacgactctagaggcaggttcggggagttgctactgctcctgccaacccttcaatccattacttggcagatgatcgagcagatccaatttattaagctgttcggaatggctaaaatagataatttgctccaggaaatgctgttatgaggactagtccctgttcccagagcccacttttttttctttttttgaaataaaatagcctgtctttcagatctaaaaaaaaaaaaaaaaaaaaaaaaaaaaaaaaaaaaaaaaaaaaaaaaaaaaaaaaaaaaaaaaaaaaaaaaaaaaaaaaaaaaaaaaaaaaaaaaaaaa

SEQ ID NO: 4833 - RNA, 1376 nt, synthetic construct
  misc_feature 1..1376: note = mRNA a-1 (A100) (opt3) from Homo sapiens__NP_000448.3__HNF4A(1-375)(S167E)
  source 1..1376: mol_type = other RNA
aggagagtcccgcagtcggcgtccagcggctctgcttgttcgtgtgtgtgtcgttgcaggccttattcaagcttaccatgagactgagcaagaccctcgtggacatggatatggccgactactccgctgcacttgatcccgcctatacaactctggagttcgaaaacgtccaggttttgacgatgggcaatgacacctctccttcagaggggacaaacttaaatgcgccaaacagtctgggagtgagcgctctatgcgccatctgtggtgatagggcaactggcaaacactacggggcctcctcttgcgacggatgtaagggctttttccggcgctcggtacgtaaaaatcatatgtattcatgccgatttagcagacaatgtgtggtcgataaggacaaaaggaaccagtgccggtactgtcgcctcaagaagtgcttcagagctggtatgaaaaaggaagcagtgcagaatgagagggatcggattagtacccgccgatcctcttatgaagacagctccctgccgtcaataaacgcccttctgcaggctgaggttttgagtagacaaatcacagagcccgtgagcgggattaatggagatatcagggccaaaaagattgcgtctatcgcagacgtctgtgaatccatgaaagagcagctcctggtgctggtagaatgggccaagtacatacctgctttttgcgagctcccattagatgaccaggttgccctgcttcgggcacacgctggcgagcatttgctgctaggcgccaccaagcgttcaatggtgttcaaagacgtcctcctgcttgggaacgattatatcgtgccccgccactgtcctgaactggcggagatgagcagagtgagtattaggatcttggacgaactcgtcctgccatttcaggagttacaaattgatgacaatgaatacgcctacctgaaggcaatcatattctttgatcccgacgctaaaggactctctgatcctggtaagattaaacggcttcgatcccaggttcaggtgagcctggaggactatatcaacgatcgccagtacgactcgagaggcaggttcggggagttgctactgctcctgccaactcttcaatctattacatggcagatgatcgaacagatccaatttattaagctgttcggaatggccaaaatagataatttgctccaggagatgctgttatgaggactagtccctgttcccagagcccacttttttttctttttttgaaataaaatagcctgtctttcagatctaaaaaaaaaaaaaaaaaaaaaaaaaaaaaaaaaaaaaaaaaaaaaaaaaaaaaaaaaaaaaaaaaaaaaaaaaaaaaaaaaaaaaaaaaaaaaaaaaaaa

SEQ ID NO: 4834 - RNA, 1376 nt, synthetic construct
  misc_feature 1..1376: note = mRNA a-1 (A100) (opt3) from Homo sapiens__NP_000448.3__HNF4A(1-375)(S167A)
  source 1..1376: mol_type = other RNA
aggagagtcccgcagtcggcgtccagcggctctgcttgttcgtgtgtgtgtcgttgcaggccttattcaagcttaccatgagactgagcaagaccctcgtggacatggatatggccgactactccgctgcacttgatcccgcctatacaactctggagttcgaaaacgtccaggttttgacgatgggcaatgacacctctccttcagaggggacaaacttaaatgcgccaaacagtctgggagtgagcgctctatgcgccatctgtggtgatagggcaactggcaaacactacggggcctcctcttgcgacggatgtaagggctttttccggcgctcggtacgtaaaaatcatatgtattcatgccgatttagcagacaatgtgtggtcgataaggacaaaaggaaccagtgccggtactgtcgcctcaagaagtgcttcagagctggtatgaaaaaggaagcagtgcagaatgagagggatcggattagtacccgccgatcctcttatgaagacagctccctgccgtcaataaacgcccttctgcaggctgaggttttgagtagacaaatcacagcccccgtgagcgggattaatggagatatcagggcgaaaaagattgcatctatcgccgacgtctgtgagtccatgaaagaacagctcctggtgctggtagagtgggctaagtacatacctgccttttgcgaactcccattagatgaccaggttgcactgcttcgggctcacgccggcgagcatttgctgctaggcgcgaccaagcgttcaatggtgttcaaagacgtcctcctgcttgggaacgattatatcgtgccccgccactgtcctgagctggccgaaatgagcagagtgagtattaggatcttggacgagctcgtcctgccatttcaggaattacaaattgatgacaatgagtacgcatacctgaaggctatcatattctttgatcccgacgccaaaggactctctgatcctggtaagattaaacggcttcgatcccaggttcaggtgagcctggaagactatatcaacgatcgccagtacgactcgagaggcaggttcggggagttgctactgctcctgccaactcttcaatctattacatggcagatgatcgagcagatccaatttattaagctgttcggaatggctaaaatagataatttgctccaggaaatgctgttatgaggactagtccctgttcccagagcccacttttttttctttttttgaaataaaatagcctgtctttcagatctaaaaaaaaaaaaaaaaaaaaaaaaaaaaaaaaaaaaaaaaaaaaaaaaaaaaaaaaaaaaaaaaaaaaaaaaaaaaaaaaaaaaaaaaaaaaaaaaaaaa

SEQ ID NO: 4835 - RNA, 1376 nt, synthetic construct; identical to SEQ ID NO: 4834
  misc_feature 1..1376: note = mRNA a-1 (A100) (opt3) from Homo sapiens__NP_000448.3__HNF4A(1-375)(S167A_S378A_T429A_T432A_ S436A)
  source 1..1376: mol_type = other RNA

SEQ ID NO: 4836 - RNA, 1376 nt, synthetic construct; identical to SEQ ID NO: 4833
  misc_feature 1..1376: note = mRNA a-1 (A100) (opt3) from Homo sapiens__NP_000448.3__HNF4A(1-375)(S167E_S378E_T429E_T432E_ S436E)
  source 1..1376: mol_type = other RNA

SEQ ID NO: 4837 - RNA, 1376 nt, synthetic construct
  misc_feature 1..1376: note = mRNA a-1 (A100) (opt3) from Homo sapiens__NP_000448.3__HNF4A(1-375)(S87A)
  source 1..1376: mol_type = other RNA
aggagagtcccgcagtcggcgtccagcggctctgcttgttcgtgtgtgtgtcgttgcaggccttattcaagcttaccatgagactgagcaagaccctcgtggacatggatatggccgactactccgctgcacttgatcccgcctatacaactctggagttcgaaaacgtccaggttttgacgatgggcaatgacacctctccttcagaggggacaaacttaaatgcgccaaacagtctgggagtgagcgctctatgcgccatctgtggtgatagggcaactggcaaacactacggggcctcctcttgcgacggatgtaagggctttttccggcgcgctgtacgtaaaaatcatatgtattcgtgccgattttcaagacaatgtgtggtcgataaggacaaaaggaaccagtgccggtactgtcgcctcaagaagtgcttcagagcaggtatgaaaaaggaagccgtgcagaatgagagggatcggattagcacccgccgaagttcctatgaagactctagcctgccgtccataaacgcccttctgcaggccgaggttttgtcaagacaaatcacaagtcccgtgagcgggattaatggagatatcagggcgaaaaagattgcatctatcgccgacgtctgtgagtccatgaaagaacagctcctggtgctggtagagtgggctaagtacatacctgccttttgcgaactcccattagatgaccaggttgcactgcttcgggctcacgccggcgagcatttgctgctaggcgcgaccaagcgttcaatggtgttcaaagacgtcctcctgcttgggaacgattatatcgtgccccgccactgtcctgagctggccgaaatgagcagagtgagtattaggatcttggacgagctcgtcctgccatttcaggaattacaaattgatgacaatgagtacgcatacctgaaggctatcatattctttgatcccgacgccaaaggactctctgatcctggtaagattaaacggcttcgatcccaggttcaggtgagcctggaagactatatcaacgatcgccagtacgactcgagaggcaggttcggggagttgctactgctcctgccaactcttcaatctattacatggcagatgatcgagcagatccaatttattaagctgttcggaatggctaaaatagataatttgctccaggaaatgctgttatgaggactagtccctgttcccagagcccacttttttttctttttttgaaataaaatagcctgtctttcagatctaaaaaaaaaaaaaaaaaaaaaaaaaaaaaaaaaaaaaaaaaaaaaaaaaaaaaaaaaaaaaaaaaaaaaaaaaaaaaaaaaaaaaaaaaaaaaaaaaaaa

SEQ ID NO: 4838 - RNA, 1376 nt, synthetic construct
  misc_feature 1..1376: note = mRNA a-1 (A100) (opt3) from Homo sapiens__NP_000448.3__HNF4A(1-375)(S87E)
  source 1..1376: mol_type = other RNA
aggagagtcccgcagtcggcgtccagcggctctgcttgttcgtgtgtgtgtcgttgcaggccttattcaagcttaccatgagactgagcaagaccctcgtggacatggatatggccgactactccgctgcacttgatcccgcctatacaactctggagttcgaaaacgtccaggttttgacgatgggcaatgacacctctccttcagaggggacaaacttaaatgcgccaaacagtctgggagtgagcgctctatgcgccatctgtggtgatagggcaactggcaaacactacggggcctcctcttgcgacggatgtaagggctttttccggcgcgaagtacgtaaaaatcatatgtattcgtgccgattttcaagacaatgtgtggtcgataaggacaaaaggaaccagtgccggtactgtcgcctcaagaagtgcttcagagctggtatgaaaaaggaggcagtgcagaatgaaagggatcggattagcacccgccgaagttcctatgaggactctagcctgccgtccataaacgcccttctgcaggctgaggttttgtcaagacaaatcacaagtcccgtgagcgggattaatggagatatcagggccaaaaagattgcgtctatcgcagacgtctgtgaatccatgaaagagcagctcctggtgctggtagaatgggccaagtacatacctgctttttgcgagctcccattagatgaccaggttgccctgcttcgggcacacgctggcgagcatttgctgctaggcgccaccaagcgttcaatggtgttcaaagacgtcctcctgcttgggaacgattatatcgtgccccgccactgtcctgaactggcggagatgagcagagtgagtattaggatcttggacgaactcgtcctgccatttcaggagttacaaattgatgacaatgaatacgcctacctgaaggcaatcatattctttgatcccgacgctaaaggactctctgatcctggtaagattaaacggcttcgatcccaggttcaggtgagcctggaggactatatcaacgatcgccagtacgactcgagaggcaggttcggggagttgctactgctcctgccaactcttcaatctattacatggcagatgatcgaacagatccaatttattaagctgttcggaatggccaaaatagataatttgctccaggagatgctgttatgaggactagtccctgttcccagagcccacttttttttctttttttgaaataaaatagcctgtctttcagatctaaaaaaaaaaaaaaaaaaaaaaaaaaaaaaaaaaaaaaaaaaaaaaaaaaaaaaaaaaaaaaaaaaaaaaaaaaaaaaaaaaaaaaaaaaaaaaaaaaaa

SEQ ID NO: 4839 - RNA, 1376 nt, synthetic construct
  misc_feature 1..1376: note = mRNA a-1 (A100) (opt3) from Homo sapiens__NP_000448.3__HNF4A(1-375)(R2V)
  source 1..1376: mol_type = other RNA
aggagagtcccgcagtcggcgtccagcggctctgcttgttcgtgtgtgtgtcgttgcaggccttattcaagcttaccatggtgctgagcaagaccctcgtcgacatggatatggccgactactccgctgcacttgatcccgcctatacaactctggagttcgaaaacgttcaggtgttgacgatgggcaatgacacctctccttcagaggggacaaacttaaatgcgccaaacagtctgggagtaagcgctctatgcgccatctgtggtgatagagcaactggcaaacactacggggcctcctcttgcgacggatgtaagggctttttcaggcggtcggtgcgcaaaaatcatatgtattcatgccgatttagccgtcaatgtgtcgtggataaggacaaaagaaaccagtgcaggtactgtcggctcaagaagtgcttccgcgctggtatgaaaaaggaagcagttcagaatgagagagataggattagtacccggcgctcctcttatgaagacagctccctgccgtcaataaacgcccttctgcaggctgaggtgttgagtcgacaaatcacaagccccgtctctgggattaatggagatatcagagccaaaaagattgcgtccatcgcagacgtgtgtgagtcaatgaaagaacagctcctggtactggttgagtgggccaagtacatacctgctttttgcgaactcccattagatgaccaggtggccctgcttagggcacacgctggcgagcatttgctgctaggcgccaccaagcggagcatggtcttcaaagacgtgctcctgcttgggaacgattatatcgtgccccgtcactgtcctgagctggcggaaatgagtcgcgtctctattagaatcttggacgagctcgttctgccatttcaggaattacaaattgatgacaatgagtacgcctacctgaaggcaatcatattctttgatcccgacgctaaaggactctccgatcctggtaagattaaaaggcttcggagccaggtgcaggtatcgctggaagactatatcaacgatcgacagtacgactctcgcggcagattcggggagttgctactgctcctgccaactcttcaatccattacatggcagatgatcgagcagatccaatttattaagctgttcggaatggccaaaatagataatttgctccaggaaatgctgttatgaggactagtccctgttcccagagcccacttttttttctttttttgaaataaaatagcctgtctttcagatctaaaaaaaaaaaaaaaaaaaaaaaaaaaaaaaaaaaaaaaaaaaaaaaaaaaaaaaaaaaaaaaaaaaaaaaaaaaaaaaaaaaaaaaaaaaaaaaaaaaa

SEQ ID NO: 4840 - RNA, 1376 nt, synthetic construct
  misc_feature 1..1376: note = mRNA a-1 (A100) (opt3) from Homo sapiens__NP_000448.3__HNF4A(1-375)(R2V_K5V)
  source 1..1376: mol_type = other RNA
aggagagtcccgcagtcggcgtccagcggctctgcttgttcgtgtgtgtgtcgttgcaggccttattcaagcttaccatggtgctgagcgtcaccctcgttgacatggatatggccgactactccgctgcacttgatcccgcctatacaactctggagttcgaaaacgtgcaggtattgacgatgggcaatgacacctctccttcagaggggacaaacttaaatgcgccaaacagtctgggagtgagcgctctatgcgccatctgtggtgatagagcaactggcaagcactacggggcctcctcttgcgacggatgtaaaggctttttcaggcggtcggtccgcaagaatcatatgtattcatgccgatttagccgtcaatgtgtggttgataaagacaagagaaaccagtgcaggtactgtcggctcaaaaagtgcttccgcgctggtatgaagaaagaagcagtgcagaatgagagagataggattagtacccggcgctcctcttatgaagacagctccctgccgtcaataaacgcccttctgcaggctgaggtcttgagtcgacaaatcacaagccccgtgtctgggattaatggagatatcagagccaagaaaattgcgtccatcgcagacgtatgtgagtcaatgaaggaacagctcctggttctggtggagtgggccaaatacatacctgctttttgcgaactcccattagatgaccaggtcgccctgcttagggcacacgctggcgagcatttgctgctaggcgccaccaagcggagcatggtgttcaaggacgtgctcctgcttgggaacgattatatcgtcccccgtcactgtcctgagctggcggaaatgagtcgcgtttctattagaatcttggacgagctcgtgctgccatttcaggaattacaaattgatgacaatgagtacgcctacctgaaagcaatcatattctttgatcccgacgctaagggactctccgatcctggtaaaattaagaggcttcggagccaggtacaggtgtcgctggaagactatatcaacgatcgacagtacgactctcgcggcagattcggggagttgctactgctcctgccaactcttcaatccattacatggcagatgatcgagcagatccaatttattaaactgttcggaatggccaagatagataatttgctccaggaaatgctgttatgaggactagtccctgttcccagagcccacttttttttctttttttgaaataaaatagcctgtctttcagatctaaaaaaaaaaaaaaaaaaaaaaaaaaaaaaaaaaaaaaaaaaaaaaaaaaaaaaaaaaaaaaaaaaaaaaaaaaaaaaaaaaaaaaaaaaaaaaaaaaaa

SEQ ID NO: 4841 - RNA, 1376 nt, synthetic construct
  misc_feature 1..1376: note = mRNA a-1 (A100) (opt3) from Homo sapiens__NP_000448.3__HNF4A(1-375)(K179R_K180R)
  source 1..1376: mol_type = other RNA
aggagagtcccgcagtcggcgtccagcggctctgcttgttcgtgtgtgtgtcgttgcaggccttattcaagcttaccatgagactgagcaagaccctcgtggacatggatatggccgactactccgctgcacttgatcccgcctatacaactctggagttcgaaaacgtccaggttttgacgatgggcaatgacacctctccttcagaggggacaaacttaaatgcgccaaacagtctgggagtgagcgctctatgcgccatctgtggtgatagggcaactggcaaacactacggggcctcctcttgcgacggatgtaagggctttttccggcgctcggtacgtaaaaatcatatgtattcatgccgatttagcagacaatgtgtggtcgataaggacaaaaggaaccagtgccggtactgtcgcctcaagaagtgcttcagagctggtatgaaaaaggaagcagtgcagaatgagagggatcggattagtacccgccgatcctcttatgaagacagctccctgccgtcaataaacgcccttctgcaggctgaggttttgagtagacaaatcacaagccccgtgtctgggattaatggagatatcagggcccggcgtattgcgtccatcgcagacgtctgtgagtcaatgaaagaacagctcctggtgctggtagagtgggccaagtacatacctgctttttgcgaactcccattagatgaccaggttgccctgcttcgcgcacacgctggcgagcatttgctgctaggcgccaccaaaagaagcatggtgttcaaggacgtcctcctgcttgggaacgattatatcgtgcccaggcactgtcctgagctggcggaaatgagtcgggtgtctattcgaatcttggacgagctcgtcctgccatttcaggaattacaaattgatgacaatgagtacgcctacctgaaggcaatcatattctttgatcccgacgctaaaggactctccgatcctggtaagattaaacgccttagaagccaggttcaggtgtcgctggaagactatatcaacgataggcagtacgactctcggggccgcttcggggagttgctactgctcctgccaactcttcaatccattacatggcagatgatcgagcagatccaatttattaagctgttcggaatggccaaaatagataatttgctccaggaaatgctgttatgaggactagtccctgttcccagagcccacttttttttctttttttgaaataaaatagcctgtctttcagatctaaaaaaaaaaaaaaaaaaaaaaaaaaaaaaaaaaaaaaaaaaaaaaaaaaaaaaaaaaaaaaaaaaaaaaaaaaaaaaaaaaaaaaaaaaaaaaaaaaaa

SEQ ID NO: 4842 - RNA, 1376 nt, synthetic construct
  misc_feature 1..1376: note = mRNA a-1 (A100) (opt3) from Homo sapiens__NP_000448.3__HNF4A(1-375)(K234R)
  source 1..1376: mol_type = other RNA
aggagagtcccgcagtcggcgtccagcggctctgcttgttcgtgtgtgtgtcgttgcaggccttattcaagcttaccatgagactgagcaagaccctcgtggacatggatatggccgactactccgctgcacttgatcccgcctatacaactctggagttcgaaaacgtccaggttttgacgatgggcaatgacacctctccttcagaggggacaaacttaaatgcgccaaacagtctgggagtgagcgctctatgcgccatctgtggtgatagggcaactggcaaacactacggggcctcctcttgcgacggatgtaagggctttttccggcgctcggtacgtaaaaatcatatgtattcatgccgatttagcagacaatgtgtggtcgataaggacaaaaggaaccagtgccggtactgtcgcctcaagaagtgcttcagagctggtatgaaaaaggaagcagtgcagaatgagagggatcggattagtacccgccgatcctcttatgaagacagctccctgccgtcaataaacgcccttctgcaggctgaggttttgagtagacaaatcacaagccccgtgtctgggattaatggagatatcagggccaaaaagattgcgtccatcgcagacgtctgtgagtcaatgaaagaacagctcctggtgctggtagagtgggccaagtacatacctgctttttgcgaactcccattagatgaccaggttgccctgcttcgggcacacgctggcgagcatttgctgctaggcgccacccgtcgcagcatggtgttcaaggacgtcctcctgcttgggaacgattatatcgtgcccagacactgtcctgagctggcggaaatgagtagggtgtctattcggatcttggacgagctcgtcctgccatttcaggaattacaaattgatgacaatgagtacgcctacctgaaagcaatcatattctttgatcccgacgctaagggactctccgatcctggtaaaattaagcgacttcgcagccaggttcaggtgtcgctggaagactatatcaacgatagacagtacgactctaggggccggttcggggagttgctactgctcctgccaactcttcaatccattacatggcagatgatcgagcagatccaatttattaaactgttcggaatggccaagatagataatttgctccaggaaatgctgttatgaggactagtccctgttcccagagcccacttttttttctttttttgaaataaaatagcctgtctttcagatctaaaaaaaaaaaaaaaaaaaaaaaaaaaaaaaaaaaaaaaaaaaaaaaaaaaaaaaaaaaaaaaaaaaaaaaaaaaaaaaaaaaaaaaaaaaaaaaaaaaa

SEQ ID NO: 4843 - RNA, 1376 nt, synthetic construct
  misc_feature 1..1376: note = mRNA a-1 (A100) (opt3) from Homo sapiens__NP_000448.3__HNF4A(1-375)(K300R)
  source 1..1376: mol_type = other RNA
aggagagtcccgcagtcggcgtccagcggctctgcttgttcgtgtgtgtgtcgttgcaggccttattcaagcttaccatgagactgagcaagaccctcgtggacatggatatggccgactactccgctgcacttgatcccgcctatacaactctggagttcgaaaacgtccaggttttgacgatgggcaatgacacctctccttcagaggggacaaacttaaatgcgccaaacagtctgggagtgagcgctctatgcgccatctgtggtgatagggcaactggcaaacactacggggcctcctcttgcgacggatgtaagggctttttccggcgctcggtacgtaaaaatcatatgtattcatgccgatttagcagacaatgtgtggtcgataaggacaaaaggaaccagtgccggtactgtcgcctcaagaagtgcttcagagctggtatgaaaaaggaagcagtgcagaatgagagggatcggattagtacccgccgatcctcttatgaagacagctccctgccgtcaataaacgcccttctgcaggctgaggttttgagtagacaaatcacaagccccgtgtctgggattaatggagatatcagggccaaaaagattgcgtccatcgcagacgtctgtgagtcaatgaaagaacagctcctggtgctggtagagtgggccaagtacatacctgctttttgcgaactcccattagatgaccaggttgccctgcttcgggcacacgctggcgagcatttgctgctaggcgccaccaagcgtagcatggtgttcaaagacgtcctcctgcttgggaacgattatatcgtgccccgccactgtcctgagctggcggaaatgagtagagtgtctattaggatcttggacgagctcgtcctgccatttcaggaattacaaattgatgacaatgagtacgcctacctgaaggcaatcatattctttgatcccgacgctcggggactctccgatcctggtaaaattaagcgacttcgcagccaggttcaggtgtcgctggaagactatatcaacgatagacagtacgactctaggggccggttcggggagttgctactgctcctgccaactcttcaatccattacatggcagatgatcgagcagatccaatttattaaactgttcggaatggccaagatagataatttgctccaggaaatgctgttatgaggactagtccctgttcccagagcccacttttttttctttttttgaaataaaatagcctgtctttcagatctaaaaaaaaaaaaaaaaaaaaaaaaaaaaaaaaaaaaaaaaaaaaaaaaaaaaaaaaaaaaaaaaaaaaaaaaaaaaaaaaaaaaaaaaaaaaaaaaaaaa

SEQ ID NO: 4844 - RNA, 1376 nt, synthetic construct
  misc_feature 1..1376: note = mRNA a-1 (A100) (opt3) from Homo sapiens__NP_000448.3__HNF4A(1-375)(K300R_K307R_K309R)
  source 1..1376: mol_type = other RNA
aggagagtcccgcagtcggcgtccagcggctctgcttgttcgtgtgtgtgtcgttgcaggccttattcaagcttaccatgagactgagcaagaccctcgtggacatggatatggccgactactccgctgcacttgatcccgcctatacaactctggagttcgaaaacgtccaggttttgacgatgggcaatgacacctctccttcagaggggacaaacttaaatgcgccaaacagtctgggagtgagcgctctatgcgccatctgtggtgatagggcaactggcaaacactacggggcctcctcttgcgacggatgtaagggctttttccggcgctcggtacgtaaaaatcatatgtattcatgccgatttagcagacaatgtgtggtcgataaggacaaaaggaaccagtgccggtactgtcgcctcaagaagtgcttcagagctggtatgaaaaaggaagcagtgcagaatgagagggatcggattagtacccgccgatcctcttatgaagacagctccctgccgtcaataaacgcccttctgcaggctgaggttttgagtagacaaatcacaagccccgtgtctgggattaatggagatatcagggccaaaaagattgcgtccatcgcagacgtctgtgagtcaatgaaagaacagctcctggtgctggtagagtgggccaagtacatacctgctttttgcgaactcccattagatgaccaggttgccctgcttcgggcacacgctggcgagcatttgctgctaggcgccaccaagcgtagcatggtgttcaaagacgtcctcctgcttgggaacgattatatcgtgccccgccactgtcctgagctggcggaaatgagtagagtgtctattaggatcttggacgagctcgtcctgccatttcaggaattacaaattgatgacaatgagtacgcctacctgaaggcaatcatattctttgatcccgacgctcggggactctccgatcctggtcgcattcgaagacttaggagccaggttcaggtgtcgctggaagactatatcaacgatcggcagtacgactctcgcggcagattcggggagttgctactgctcctgccaactcttcaatccattacatggcagatgatcgagcagatccaatttattaaactgttcggaatggccaagatagataatttgctccaggaaatgctgttatgaggactagtccctgttcccagagcccacttttttttctttttttgaaataaaatagcctgtctttcagatctaaaaaaaaaaaaaaaaaaaaaaaaaaaaaaaaaaaaaaaaaaaaaaaaaaaaaaaaaaaaaaaaaaaaaaaaaaaaaaaaaaaaaaaaaaaaaaaaaaaa

SEQ ID NO: 4845 - RNA, 1376 nt, synthetic construct; identical to SEQ ID NO: 4826
  misc_feature 1..1376: note = mRNA a-1 (A100) (opt3) from Homo sapiens__NP_000448.3__HNF4A(1-375)(K447R_K470R)
  source 1..1376: mol_type = other RNA

SEQ ID NO: 4846 - RNA, 1376 nt, synthetic construct; identical to SEQ ID NO: 4826
  misc_feature 1..1376: note = mRNA a-1 (A100) (opt3) from Homo sapiens__NP_000448.3__HNF4A(1-375)(K458R)
  source 1..1376: mol_type = other RNA

SEQ ID NO: 4847 - RNA, 1376 nt, synthetic construct
  misc_feature 1..1376: note = mRNA a-1 (A100) (opt3) from Homo sapiens__NP_000448.3__HNF4A(1-375)(K106R_K108R_K126R_K127R)
  source 1..1376: mol_type = other RNA
aggagagtcccgcagtcggcgtccagcggctctgcttgttcgtgtgtgtgtcgttgcaggccttattcaagcttaccatgagactgagcaagaccctcgtggacatggatatggccgactactccgctgcacttgatcccgcctatacaactctggagttcgaaaacgtccaggttttgacgatgggcaatgacacctctccttcagaggggacaaacttaaatgcgccaaacagtctgggagtgagcgctctatgcgccatctgtggtgatagggcaactggcaaacactacggggcctcctcttgcgacggatgtaagggctttttccggcgctcggtacgtaaaaatcatatgtattcatgccgatttagcagacaatgtgtggtcgatagggaccggcgcaaccagtgcagatactgtaggctcaagaaatgcttccgggctggtatgcgccgagaagcagtgcagaatgagagagataggattagtacccggcgttcctcttatgaagacagctccctgccgtcaataaacgcccttctgcaggctgaggttttgagtcgccaaatcacaagccccgtgtctgggattaatggagatatcagagccaagaagattgcgtccatcgcagacgtctgtgagtcaatgaaagaacagctcctggtgctggtagagtgggccaagtacatacctgctttttgcgaactcccattagatgaccaggttgccctgcttagggcacacgctggcgagcatttgctgctaggcgccaccaaacggagcatggtgttcaaggacgtcctcctgcttgggaacgattatatcgtgccccgacactgtcctgagctggcggaaatgagtcgcgtgtctattagaatcttggacgagctcgtcctgccatttcaggaattacaaattgatgacaatgagtacgcctacctgaaagcaatcatattctttgatcccgacgctaagggactctccgatcctggtaagattaaaaggcttcggagccaggttcaggtgtcgctggaagactatatcaacgatcgccagtacgactctagaggcaggttcggggagttgctactgctcctgccaactcttcaatccattacatggcagatgatcgagcagatccaatttattaagctgttcggaatggccaaaatagataatttgctccaggaaatgctgttatgaggactagtccctgttcccagagcccacttttttttctttttttgaaataaaatagcctgtctttcagatctaaaaaaaaaaaaaaaaaaaaaaaaaaaaaaaaaaaaaaaaaaaaaaaaaaaaaaaaaaaaaaaaaaaaaaaaaaaaaaaaaaaaaaaaaaaaaaaaaaaa

SEQ ID NO: 4848 - RNA, 1376 nt, synthetic construct
  misc_feature 1..1376: note = mRNA a-1 (A100) (opt3) from Homo sapiens__NP_000448.3__HNF4A(1-375)(E285Q)
  source 1..1376: mol_type = other RNA
aggagagtcccgcagtcggcgtccagcggctctgcttgttcgtgtgtgtgtcgttgcaggccttattcaagcttaccatgagactgagcaagaccctcgtggacatggatatggccgactactccgctgcacttgatcccgcctatacaactctggagttcgaaaacgtccaggttttgacgatgggcaatgacacctctccttcagaggggacaaacttaaatgcgccaaacagtctgggagtgagcgctctatgcgccatctgtggtgatagggcaactggcaaacactacggggcctcctcttgcgacggatgtaagggctttttccggcgctcggtacgtaaaaatcatatgtattcatgccgatttagcagacaatgtgtggtcgataaggacaaaaggaaccagtgccggtactgtcgcctcaagaagtgcttcagagctggtatgaaaaaggaagcagtgcagaatgagagggatcggattagtacccgccgatcctcttatgaagacagctccctgccgtcaataaacgcccttctgcaggctgaggttttgagtagacaaatcacaagccccgtgtctgggattaatggagatatcagggccaaaaagattgcgtccatcgcagacgtctgtgagtcaatgaaagaacagctcctggtgctggtagagtgggccaagtacatacctgctttttgcgaactcccattagatgaccaggttgccctgcttcgggcacacgctggcgagcatttgctgctaggcgccaccaagcgtagcatggtgttcaaagacgtcctcctgcttgggaacgattatatcgtgccccgccactgtcctgagctggcggaaatgagtagagtgtctattaggatcttggacgagctcgtcctgccatttcaggaattacaaattgatgacaatcagtacgcctacctgaaggcaatcatattctttgatcccgacgctaaaggactctccgatcctggtaagattaaacggcttcgaagccaggttcaggtgtcgctggaggactatatcaacgatcgccaatacgactctagaggcaggttcggggaattgctactgctcctgccaactcttcagtccattacatggcagatgatcgagcaaatccagtttattaagctgttcggaatggccaaaatagataatttgctccaggagatgctgttatgaggactagtccctgttcccagagcccacttttttttctttttttgaaataaaatagcctgtctttcagatctaaaaaaaaaaaaaaaaaaaaaaaaaaaaaaaaaaaaaaaaaaaaaaaaaaaaaaaaaaaaaaaaaaaaaaaaaaaaaaaaaaaaaaaaaaaaaaaaaaaa

SEQ ID NO: 4849 - RNA, 1376 nt, synthetic construct
  misc_feature 1..1376: note = mRNA a-1 (A100) (opt3) from Homo sapiens__NP_000448.3__HNF4A(1-375)(T166E)
  source 1..1376: mol_type = other RNA
aggagagtcccgcagtcggcgtccagcggctctgcttgttcgtgtgtgtgtcgttgcaggccttattcaagcttaccatgagactgagcaagaccctcgtggacatggatatggccgactactccgctgcacttgatcccgcctatacaactctggagttcgaaaacgtccaggttttgacgatgggcaatgacacctctccttcagaggggacaaacttaaatgcgccaaacagtctgggagtgagcgctctatgcgccatctgtggtgatagggcaactggcaaacactacggggcctcctcttgcgacggatgtaagggctttttccggcgctcggtacgtaaaaatcatatgtattcatgccgatttagcagacaatgtgtggtcgataaggacaaaaggaaccagtgccggtactgtcgcctcaagaagtgcttcagagctggtatgaaaaaggaagcagtgcagaatgagagggatcggattagtacccgccgatcctcttatgaagacagctccctgccgtcaataaacgcccttctgcaggctgaggttttgagtagacaaatcgagagccccgtgtctgggattaatggagatatcagggccaaaaagattgcgtccatcgcagacgtctgtgaatcaatgaaagagcagctcctggtgctggtagaatgggccaagtacatacctgctttttgcgagctcccattagatgaccaggttgccctgcttcgggcacacgctggcgagcatttgctgctaggcgccacaaagcgtagcatggtgttcaaagacgtcctcctgcttgggaacgattatatcgtgccccgccactgtcctgaactggcggagatgagtagagtgtctattaggatcttggacgaactcgtcctgccatttcaggagttacaaattgatgacaatgaatacgcctacctgaaggcaatcatattctttgatcccgacgctaaaggactctccgatcctggtaagattaaacggcttcgaagccaggttcaggtgtcgctggaggactatatcaacgatcgccagtacgactctagaggcaggttcggggagttgctactgctcctgccaacccttcaatccattacttggcagatgatcgaacagatccaatttattaagctgttcggaatggccaaaatagataatttgctccaggagatgctgttatgaggactagtccctgttcccagagcccacttttttttctttttttgaaataaaatagcctgtctttcagatctaaaaaaaaaaaaaaaaaaaaaaaaaaaaaaaaaaaaaaaaaaaaaaaaaaaaaaaaaaaaaaaaaaaaaaaaaaaaaaaaaaaaaaaaaaaaaaaaaaaa

SEQ ID NO: 4850 - RNA, 1376 nt, synthetic construct
  misc_feature 1..1376: note = mRNA a-1 (A100) (opt3) from Homo sapiens__NP_000448.3__HNF4A(1-375)(S148A)
  source 1..1376: mol_type = other RNA
aggagagtcccgcagtcggcgtccagcggctctgcttgttcgtgtgtgtgtcgttgcaggccttattcaagcttaccatgagactgagcaagaccctcgtggacatggatatggccgactactccgctgcacttgatcccgcctatacaactctggagttcgaaaacgtccaggttttgacgatgggcaatgacacctctccttcagaggggacaaacttaaatgcgccaaacagtctgggagtgagcgctctatgcgccatctgtggtgatagggcaactggcaaacactacggggcctcctcttgcgacggatgtaagggctttttccggcgctcggtacgtaaaaatcatatgtattcatgccgatttagcagacaatgtgtggtcgataaggacaaaaggaaccagtgccggtactgtcgcctcaagaagtgcttcagagctggtatgaaaaaggaagcagtgcagaatgagagggatcggattagtacccgccgatcctcttatgaagacagcgccctgccgtccataaacgcccttctgcaggccgaggttttgtcaagacaaatcacaagtcccgtgagcgggattaatggagatatcagggcgaaaaagattgcatctatcgccgacgtctgtgagtccatgaaagaacagctcctggtgctggtagagtgggctaagtacatacctgccttttgcgaactcccattagatgaccaggttgcactgcttcgggctcacgccggcgagcatttgctgctaggcgcgaccaagcgttcaatggtgttcaaagacgtcctcctgcttgggaacgattatatcgtgccccgccactgtcctgagctggccgaaatgagcagagtgagtattaggatcttggacgagctcgtcctgccatttcaggaattacaaattgatgacaatgagtacgcatacctgaaggctatcatattctttgatcccgacgccaaaggactctctgatcctggtaagattaaacggcttcgatcccaggttcaggtgagcctggaagactatatcaacgatcgccagtacgactcgagaggcaggttcggggagttgctactgctcctgccaactcttcaatctattacatggcagatgatcgagcagatccaatttattaagctgttcggaatggctaaaatagataatttgctccaggaaatgctgttatgaggactagtccctgttcccagagcccacttttttttctttttttgaaataaaatagcctgtctttcagatctaaaaaaaaaaaaaaaaaaaaaaaaaaaaaaaaaaaaaaaaaaaaaaaaaaaaaaaaaaaaaaaaaaaaaaaaaaaaaaaaaaaaaaaaaaaaaaaaaaaa

SEQ ID NO: 4851 - RNA, 1376 nt, synthetic construct
  misc_feature 1..1376: note = mRNA a-1 (A100) (opt3) from Homo sapiens__NP_000448.3__HNF4A(1-375)(S148E)
  source 1..1376: mol_type = other RNA
aggagagtcccgcagtcggcgtccagcggctctgcttgttcgtgtgtgtgtcgttgcaggccttattcaagcttaccatgagactgagcaagaccctcgtggacatggatatggccgactactccgctgcacttgatcccgcctatacaactctggagttcgaaaacgtccaggttttgacgatgggcaatgacacctctccttcagaggggacaaacttaaatgcgccaaacagtctgggagtgagcgctctatgcgccatctgtggtgatagggcaactggcaaacactacggggcctcctcttgcgacggatgtaagggctttttccggcgctcggtacgtaaaaatcatatgtattcatgccgatttagcagacaatgtgtggtcgataaggacaaaaggaaccagtgccggtactgtcgcctcaagaagtgcttcagagctggtatgaaaaaggaagcagtgcagaatgagagggatcggattagtacccgccgatcctcttatgaagacagcgagctgccgtccataaacgcccttctgcaggctgaggttttgtcaagacaaatcacaagtcccgtgagcgggattaatggagatatcagggccaaaaagattgcgtctatcgcagacgtctgtgaatccatgaaagagcagctcctggtgctggtagaatgggccaagtacatacctgctttttgcgagctcccattagatgaccaggttgccctgcttcgggcacacgctggcgagcatttgctgctaggcgccaccaagcgttcaatggtgttcaaagacgtcctcctgcttgggaacgattatatcgtgccccgccactgtcctgaactggcggagatgagcagagtgagtattaggatcttggacgaactcgtcctgccatttcaggagttacaaattgatgacaatgaatacgcctacctgaaggcaatcatattctttgatcccgacgctaaaggactctctgatcctggtaagattaaacggcttcgatcccaggttcaggtgagcctggaggactatatcaacgatcgccagtacgactcgagaggcaggttcggggagttgctactgctcctgccaactcttcaatctattacatggcagatgatcgaacagatccaatttattaagctgttcggaatggccaaaatagataatttgctccaggagatgctgttatgaggactagtccctgttcccagagcccacttttttttctttttttgaaataaaatagcctgtctttcagatctaaaaaaaaaaaaaaaaaaaaaaaaaaaaaaaaaaaaaaaaaaaaaaaaaaaaaaaaaaaaaaaaaaaaaaaaaaaaaaaaaaaaaaaaaaaaaaaaaaaa

SEQ ID NO: 4852 - RNA, 1376 nt, synthetic construct
  misc_feature 1..1376: note = mRNA a-1 (A100) (opt3) from Homo sapiens__NP_000448.3__HNF4A(1-375)(S183A)
  source 1..1376: mol_type = other RNA
aggagagtcccgcagtcggcgtccagcggctctgcttgttcgtgtgtgtgtcgttgcaggccttattcaagcttaccatgagactgagcaagaccctcgtggacatggatatggccgactactccgctgcacttgatcccgcctatacaactctggagttcgaaaacgtccaggttttgacgatgggcaatgacacctctccttcagaggggacaaacttaaatgcgccaaacagtctgggagtgagcgctctatgcgccatctgtggtgatagggcaactggcaaacactacggggcctcctcttgcgacggatgtaagggctttttccggcgctcggtacgtaaaaatcatatgtattcatgccgatttagcagacaatgtgtggtcgataaggacaaaaggaaccagtgccggtactgtcgcctcaagaagtgcttcagagctggtatgaaaaaggaagcagtgcagaatgagagggatcggattagtacccgccgatcctcttatgaagacagctccctgccgtcaataaacgcccttctgcaggctgaggttttgagtagacaaatcacaagccccgtgtctgggattaatggagatatcagggccaaaaagattgcggcaatcgccgacgtctgtgagtccatgaaagaacagctcctggtgctggtagagtgggctaagtacatacctgccttttgcgaactcccattagatgaccaggttgcactgcttcgggctcacgccggcgagcatttgctgctaggcgcgaccaagcgttcaatggtgttcaaagacgtcctcctgcttgggaacgattatatcgtgccccgccactgtcctgagctggccgaaatgagcagagtgagtattaggatcttggacgagctcgtcctgccatttcaggaattacaaattgatgacaatgagtacgcatacctgaaggctatcatattctttgatcccgacgccaaaggactctctgatcctggtaagattaaacggcttcgatcccaggttcaggtgagcctggaagactatatcaacgatcgccagtacgactcgagaggcaggttcggggagttgctactgctcctgccaactcttcaatctattacatggcagatgatcgagcagatccaatttattaagctgttcggaatggctaaaatagataatttgctccaggaaatgctgttatgaggactagtccctgttcccagagcccacttttttttctttttttgaaataaaatagcctgtctttcagatctaaaaaaaaaaaaaaaaaaaaaaaaaaaaaaaaaaaaaaaaaaaaaaaaaaaaaaaaaaaaaaaaaaaaaaaaaaaaaaaaaaaaaaaaaaaaaaaaaaaa

SEQ ID NO: 4853 - RNA, 1376 nt, synthetic construct
  misc_feature 1..1376: note = mRNA a-1 (A100) (opt3) from Homo sapiens__NP_000448.3__HNF4A(1-375)(S183E)
  source 1..1376: mol_type = other RNA
aggagagtcccgcagtcggcgtccagcggctctgcttgttcgtgtgtgtgtcgttgcaggccttattcaagcttaccatgagactgagcaagaccctcgtggacatggatatggccgactactccgctgcacttgatcccgcctatacaactctggagttcgaaaacgtccaggttttgacgatgggcaatgacacctctccttcagaggggacaaacttaaatgcgccaaacagtctgggagtgagcgctctatgcgccatctgtggtgatagggcaactggcaaacactacggggcctcctcttgcgacggatgtaagggctttttccggcgctcggtacgtaaaaatcatatgtattcatgccgatttagcagacaatgtgtggtcgataaggacaaaaggaaccagtgccggtactgtcgcctcaagaagtgcttcagagctggtatgaaaaaggaagcagtgcagaatgagagggatcggattagtacccgccgatcctcttatgaagacagctccctgccgtcaataaacgcccttctgcaggctgaggttttgagtagacaaatcacaagccccgtgtctgggattaatggagatatcagggccaaaaagattgcggagatcgcagacgtctgtgaatccatgaaagagcagctcctggtgctggtagaatgggccaagtacatacctgctttttgcgagctcccattagatgaccaggttgccctgcttcgggcacacgctggcgagcatttgctgctaggcgccaccaagcgttcaatggtgttcaaagacgtcctcctgcttgggaacgattatatcgtgccccgccactgtcctgaactggcggagatgagcagagtgagtattaggatcttggacgaactcgtcctgccatttcaggagttacaaattgatgacaatgaatacgcctacctgaaggcaatcatattctttgatcccgacgctaaaggactctctgatcctggtaagattaaacggcttcgatcccaggttcaggtgagcctggaggactatatcaacgatcgccagtacgactcgagaggcaggttcggggagttgctactgctcctgccaactcttcaatctattacatggcagatgatcgaacagatccaatttattaagctgttcggaatggccaaaatagataatttgctccaggagatgctgttatgaggactagtccctgttcccagagcccacttttttttctttttttgaaataaaatagcctgtctttcagatctaaaaaaaaaaaaaaaaaaaaaaaaaaaaaaaaaaaaaaaaaaaaaaaaaaaaaaaaaaaaaaaaaaaaaaaaaaaaaaaaaaaaaaaaaaaaaaaaaaaa

SEQ ID NO: 4854 - RNA, 1376 nt, synthetic construct; identical to SEQ ID NO: 4826
  misc_feature 1..1376: note = mRNA a-1 (A100) (opt3) from Homo sapiens__NP_000448.3__HNF4A(1-375)(S461A)
  source 1..1376: mol_type = other RNA

SEQ ID NO: 4855 - RNA, 1376 nt, synthetic construct; identical to SEQ ID NO: 4826
  misc_feature 1..1376: note = mRNA a-1 (A100) (opt3) from Homo sapiens__NP_000448.3__HNF4A(1-375)(S461E)
  source 1..1376: mol_type = other RNA

SEQ ID NO: 4856 - RNA, 1376 nt, synthetic construct
  misc_feature 1..1376: note = mRNA a-1 (A100) (opt3) from Homo sapiens__NP_000448.3__HNF4A(1-375)(S142A_S143A_S313A)
  source 1..1376: mol_type = other RNA
aggagagtcccgcagtcggcgtccagcggctctgcttgttcgtgtgtgtgtcgttgcaggccttattcaagcttaccatgagactgagcaagaccctcgtggacatggatatggccgactactccgctgcacttgatcccgcctatacaactctggagttcgaaaacgtccaggttttgacgatgggcaatgacacctctccttcagaggggacaaacttaaatgcgccaaacagtctgggagtgagcgctctatgcgccatctgtggtgatagggcaactggcaaacactacggggcctcctcttgcgacggatgtaagggctttttccggcgctcggtacgtaaaaatcatatgtattcatgccgatttagcagacaatgtgtggtcgataaggacaaaaggaaccagtgccggtactgtcgcctcaagaagtgcttcagagctggtatgaaaaaggaagcagtgcagaatgagagggatcggattagtacccgccgagccgcttatgaagactcctctctgccgagcataaacgcccttctgcaggcggaggttttgtccagacaaatcacatcacccgtgagtgggattaatggagatatcagggccaaaaagattgccagcatcgctgacgtctgtgagtctatgaaagaacagctcctggtgctggtagagtgggccaagtacatacctgcattttgcgaactcccattagatgaccaggttgctctgcttcgggcccacgcgggcgagcatttgctgctaggcgccaccaagcgttccatggtgttcaaagacgtcctcctgcttgggaacgattatatcgtgccccgccactgtcctgagctggcagaaatgtcaagagtgagcattaggatcttggacgagctcgtcctgccatttcaggaattacaaattgatgacaatgagtacgcttacctgaaggccatcatattctttgatcccgacgctaaaggactcagtgatcctggtaagattaaacggcttcgagcccaggttcaggtgtctctggaagactatatcaacgatcgccagtacgactccagaggcaggttcggggagttgctactgctcctgccaactcttcaaagcattacatggcagatgatcgagcagatccaatttattaagctgttcggaatggcaaaaatagataatttgctccaggaaatgctgttatgaggactagtccctgttcccagagcccacttttttttctttttttgaaataaaatagcctgtctttcagatctaaaaaaaaaaaaaaaaaaaaaaaaaaaaaaaaaaaaaaaaaaaaaaaaaaaaaaaaaaaaaaaaaaaaaaaaaaaaaaaaaaaaaaaaaaaaaaaaaaaa

SEQ ID NO: 4857 - RNA, 1376 nt, synthetic construct; identical to SEQ ID NO: 4856
  misc_feature 1..1376: note = mRNA a-1 (A100) (opt3) from Homo sapiens__NP_000448.3__HNF4A(1-375)(S142A_S143A_S313A_K458R)
  source 1..1376: mol_type = other RNA

SEQ ID NO: 4858 - RNA, 1376 nt, synthetic construct
  misc_feature 1..1376: note = mRNA a-1 (A100) (opt3) from Homo sapiens__NP_000448.3__HNF4A(1-375)(S142A_S143A_S167A_S313A_ S378A_T429A_T432A_S436A_K458R)
  source 1..1376: mol_type = other RNA
aggagagtcccgcagtcggcgtccagcggctctgcttgttcgtgtgtgtgtcgttgcaggccttattcaagcttaccatgagactgagcaagaccctcgtggacatggatatggccgactactccgctgcacttgatcccgcctatacaactctggagttcgaaaacgtccaggttttgacgatgggcaatgacacctctccttcagaggggacaaacttaaatgcgccaaacagtctgggagtgagcgctctatgcgccatctgtggtgatagggcaactggcaaacactacggggcctcctcttgcgacggatgtaagggctttttccggcgctcggtacgtaaaaatcatatgtattcatgccgatttagcagacaatgtgtggtcgataaggacaaaaggaaccagtgccggtactgtcgcctcaagaagtgcttcagagctggtatgaaaaaggaagcagtgcagaatgagagggatcggattagtacccgccgagccgcttatgaagactcctctctgccgagcataaacgcccttctgcaggcggaggttttgtccagacaaatcacagcacccgtgtcagggattaatggagatatcagggccaaaaagattgctagtatcgccgacgtctgtgagagcatgaaagaacagctcctggtgctggtagagtgggcaaagtacatacctgctttttgcgaactcccattagatgaccaggttgccctgcttcgggcgcacgccggcgagcatttgctgctaggcgcaaccaagcgttctatggtgttcaaagacgtcctcctgcttgggaacgattatatcgtgccccgccactgtcctgagctggctgaaatgtccagagtgtcaattaggatcttggacgagctcgtcctgccatttcaggaattacaaattgatgacaatgagtacgcctacctgaaggctatcatattctttgatcccgacgccaaaggactcagcgatcctggtaagattaaacggcttcgagcacaggttcaggtgagtctggaagactatatcaacgatcgccagtacgactctagaggcaggttcggggagttgctactgctcctgccaactcttcaatccattacatggcagatgatcgagcagatccaatttattaagctgttcggaatggccaaaatagataatttgctccaggaaatgctgttatgaggactagtccctgttcccagagcccacttttttttctttttttgaaataaaatagcctgtctttcagatctaaaaaaaaaaaaaaaaaaaaaaaaaaaaaaaaaaaaaaaaaaaaaaaaaaaaaaaaaaaaaaaaaaaaaaaaaaaaaaaaaaaaaaaaaaaaaaaaaaaa

SEQ ID NO: 4859 - RNA, 1376 nt, synthetic construct
  misc_feature 1..1376: note = mRNA a-1 (A100) (opt3) from Homo sapiens__NP_000448.3__HNF4A(1-375)(S142A_S143A_S148A_S167A_ S313A_S378A_T429A_T432A_S436A_K458R)
  source 1..1376: mol_type = other RNA
aggagagtcccgcagtcggcgtccagcggctctgcttgttcgtgtgtgtgtcgttgcaggccttattcaagcttaccatgagactgagcaagaccctcgtggacatggatatggccgactactccgctgcacttgatcccgcctatacaactctggagttcgaaaacgtccaggttttgacgatgggcaatgacacctctccttcagaggggacaaacttaaatgcgccaaacagtctgggagtgagcgctctatgcgccatctgtggtgatagggcaactggcaaacactacggggcctcctcttgcgacggatgtaagggctttttccggcgctcggtacgtaaaaatcatatgtattcatgccgatttagcagacaatgtgtggtcgataaggacaaaaggaaccagtgccggtactgtcgcctcaagaagtgcttcagagctggtatgaaaaaggaagcagtgcagaatgagagggatcggattagtacccgccgagccgcttatgaagactccgccctgccgtctataaacgcgcttctgcaggcagaggttttgagcagacaaatcacagcccccgtgtccgggattaatggagatatcagggctaaaaagattgcctcaatcgcagacgtctgtgagagtatgaaagaacagctcctggtgctggtagagtgggctaagtacatacctgccttttgcgaactcccattagatgaccaggttgcgctgcttcgggcccacgcaggcgagcatttgctgctaggcgctaccaagcgtagcatggtgttcaaagacgtcctcctgcttgggaacgattatatcgtgccccgccactgtcctgagctggccgaaatgtctagagtgtccattaggatcttggacgagctcgtcctgccatttcaggaattacaaattgatgacaatgagtacgcttacctgaaggccatcatattctttgatcccgacgcaaaaggactctcagatcctggtaagattaaacggcttcgagcccaggttcaggtgagcctggaagactatatcaacgatcgccagtacgacagtagaggcaggttcggggagttgctactgctcctgccaactcttcaatctattacatggcagatgatcgagcagatccaatttattaagctgttcggaatggctaaaatagataatttgctccaggaaatgctgttatgaggactagtccctgttcccagagcccacttttttttctttttttgaaataaaatagcctgtctttcagatctaaaaaaaaaaaaaaaaaaaaaaaaaaaaaaaaaaaaaaaaaaaaaaaaaaaaaaaaaaaaaaaaaaaaaaaaaaaaaaaaaaaaaaaaaaaaaaaaaaaa

SEQ ID NO: 4860 - RNA, 1376 nt, synthetic construct
  misc_feature 1..1376: note = mRNA a-1 (A100) (opt3) from Homo sapiens__NP_000448.3__HNF4A(1-375)(K106R_K108R_K126R_K127R_ S142A_S143A_S148A_S167A_S313A_S378A_T429A_T432A_S436A_K458R )
  source 1..1376: mol_type = other RNA
aggagagtcccgcagtcggcgtccagcggctctgcttgttcgtgtgtgtgtcgttgcaggccttattcaagcttaccatgagactgagcaagaccctcgtggacatggatatggccgactactccgctgcacttgatcccgcctatacaactctggagttcgaaaacgtccaggttttgacgatgggcaatgacacctctccttcagaggggacaaacttaaatgcgccaaacagtctgggagtgagcgctctatgcgccatctgtggtgatagggcaactggcaaacactacggggcctcctcttgcgacggatgtaagggctttttccggcgctcggtacgtaaaaatcatatgtattcatgccgatttagcagacaatgtgtggtcgatagggaccggcgcaaccagtgcagatactgtaggctcaagaaatgcttccgggctggtatgcgccgagaagcagtgcagaatgagagagataggattagtacccggcgtgccgcttatgaagactccgccctgccgtctataaacgcgcttctgcaggcagaggttttgagccgccaaatcacagcccccgtgtccgggattaatggagatatcagagctaagaagattgcctcaatcgcagacgtctgtgagagtatgaaagaacagctcctggtgctggtagagtgggctaagtacatacctgccttttgcgaactcccattagatgaccaggttgcgctgcttagggcccacgcaggcgagcatttgctgctaggcgctaccaaacggagcatggtgttcaaggacgtcctcctgcttgggaacgattatatcgtgccccgacactgtcctgagctggccgaaatgtctcgcgtgtccattagaatcttggacgagctcgtcctgccatttcaggaattacaaattgatgacaatgagtacgcttacctgaaagccatcatattctttgatcccgacgcaaagggactctcagatcctggtaagattaaaaggcttcgggcccaggttcaggtgagcctggaagactatatcaacgatcgccagtacgacagtagaggcaggttcggggagttgctactgctcctgccaactcttcaatctattacatggcagatgatcgagcagatccaatttattaagctgttcggaatggctaaaatagataatttgctccaggaaatgctgttatgaggactagtccctgttcccagagcccacttttttttctttttttgaaataaaatagcctgtctttcagatctaaaaaaaaaaaaaaaaaaaaaaaaaaaaaaaaaaaaaaaaaaaaaaaaaaaaaaaaaaaaaaaaaaaaaaaaaaaaaaaaaaaaaaaaaaaaaaaaaaaa

SEQ ID NO: 4861 - RNA, 1376 nt, synthetic construct
  misc_feature 1..1376: note = mRNA a-1 (A100) (opt3) from Homo sapiens__NP_000448.3__HNF4A(1-375)(S142A_S143A_S148A_T166A_ S167A_S313A_S378A_T429A_T432A_S436A_K458R)
  source 1..1376: mol_type = other RNA
aggagagtcccgcagtcggcgtccagcggctctgcttgttcgtgtgtgtgtcgttgcaggccttattcaagcttaccatgagactgagcaagaccctcgtggacatggatatggccgactactccgctgcacttgatcccgcctatacaactctggagttcgaaaacgtccaggttttgacgatgggcaatgacacctctccttcagaggggacaaacttaaatgcgccaaacagtctgggagtgagcgctctatgcgccatctgtggtgatagggcaactggcaaacactacggggcctcctcttgcgacggatgtaagggctttttccggcgctcggtacgtaaaaatcatatgtattcatgccgatttagcagacaatgtgtggtcgataaggacaaaaggaaccagtgccggtactgtcgcctcaagaagtgcttcagagctggtatgaaaaaggaagcagtgcagaatgagagggatcggattagtacccgccgagccgcttatgaagactccgccctgccgtctataaacgcgcttctgcaggcagaggttttgagcagacaaatcgccgctcccgtgtccgggattaatggagatatcagggccaaaaagattgcatcaatcgctgacgtctgtgagagtatgaaagaacagctcctggtgctggtagagtgggccaagtacatacctgcgttttgcgaactcccattagatgaccaggttgccctgcttcgggcacacgctggcgagcatttgctgctaggcgccacaaagcgtagcatggtgttcaaagacgtcctcctgcttgggaacgattatatcgtgccccgccactgtcctgagctggctgaaatgtctagagtgtccattaggatcttggacgagctcgtcctgccatttcaggaattacaaattgatgacaatgagtacgcctacctgaaggcaatcatattctttgatcccgacgccaaaggactctcagatcctggtaagattaaacggcttcgagctcaggttcaggtgagcctggaagactatatcaacgatcgccagtacgacagtagaggcaggttcggggagttgctactgctcctgccaacccttcaatctattacttggcagatgatcgagcagatccaatttattaagctgttcggaatggcgaaaatagataatttgctccaggaaatgctgttatgaggactagtccctgttcccagagcccacttttttttctttttttgaaataaaatagcctgtctttcagatctaaaaaaaaaaaaaaaaaaaaaaaaaaaaaaaaaaaaaaaaaaaaaaaaaaaaaaaaaaaaaaaaaaaaaaaaaaaaaaaaaaaaaaaaaaaaaaaaaaaa

SEQ ID NO: 4862 - RNA, 1376 nt, synthetic construct
  misc_feature 1..1376: note = mRNA a-1 (A100) (opt3) from Homo sapiens__NP_000448.3__HNF4A(1-375)(S87A_S142A_S143A_S148A_T 166A_S167A_S313A_S378A_T429A_T432A_S436A_K458R)
  source 1..1376: mol_type = other RNA
aggagagtcccgcagtcggcgtccagcggctctgcttgttcgtgtgtgtgtcgttgcaggccttattcaagcttaccatgagactgagcaagaccctcgtggacatggatatggccgactactccgctgcacttgatcccgcctatacaactctggagttcgaaaacgtccaggttttgacgatgggcaatgacacctctccttcagaggggacaaacttaaatgcgccaaacagtctgggagtgagcgctctatgcgccatctgtggtgatagggcaactggcaaacactacggggcctcctcttgcgacggatgtaagggctttttccggcgcgctgtacgtaaaaatcatatgtattcgtgccgattttcaagacaatgtgtggtcgataaggacaaaaggaaccagtgccggtactgtcgcctcaagaagtgcttcagagcaggtatgaaaaaggaagccgtgcagaatgagagggatcggattagcacccgccgagctgcctatgaagacagtgcgctgccgtccataaacgcacttctgcaggccgaggttttgtctagacaaatcgctgcccccgtgagcgggattaatggagatatcagggctaaaaagattgcatccatcgccgacgtctgtgagtcaatgaaagaacagctcctggtgctggtagagtgggcgaagtacatacctgccttttgcgaactcccattagatgaccaggttgcactgcttcgggctcacgccggcgagcatttgctgctaggcgctacaaagcgtagtatggtgttcaaagacgtcctcctgcttgggaacgattatatcgtgccccgccactgtcctgagctggccgaaatgagcagagtgtctattaggatcttggacgagctcgtcctgccatttcaggaattacaaattgatgacaatgagtacgcatacctgaaggccatcatattctttgatcccgacgctaaaggactctccgatcctggtaagattaaacggcttcgagcgcaggttcaggtgtcactggaagactatatcaacgatcgccagtacgacagcagaggcaggttcggggagttgctactgctcctgccaacccttcaaagtattacttggcagatgatcgagcagatccaatttattaagctgttcggaatggcaaaaatagataatttgctccaggaaatgctgttatgaggactagtccctgttcccagagcccacttttttttctttttttgaaataaaatagcctgtctttcagatctaaaaaaaaaaaaaaaaaaaaaaaaaaaaaaaaaaaaaaaaaaaaaaaaaaaaaaaaaaaaaaaaaaaaaaaaaaaaaaaaaaaaaaaaaaaaaaaaaaaa

SEQ ID NO: 4863 - RNA, 1376 nt, synthetic construct
  misc_feature 1..1376: note = mRNA a-1 (A100) (opt3) from Homo sapiens__NP_000448.3__HNF4A(1-375)(S87A_K106R_K108R_K126R_K 127R_S142A_S143A_S148A_T166A_S167A_S313A_S378A_T429A_T432A_ S436A_K458R)
  source 1..1376: mol_type = other RNA
aggagagtcccgcagtcggcgtccagcggctctgcttgttcgtgtgtgtgtcgttgcaggccttattcaagcttaccatgagactgagcaagaccctcgtggacatggatatggccgactactccgctgcacttgatcccgcctatacaactctggagttcgaaaacgtccaggttttgacgatgggcaatgacacctctccttcagaggggacaaacttaaatgcgccaaacagtctgggagtgagcgctctatgcgccatctgtggtgatagggcaactggcaaacactacggggcctcctcttgcgacggatgtaagggctttttccggcgcgctgtacgtaaaaatcatatgtattcgtgccgattttcaagacaatgtgtggtcgatagggaccggcgcaaccagtgcagatactgtaggctcaagaaatgcttccgggcaggtatgcgccgagaagccgtgcagaatgagagagataggattagcacccggcgtgctgcctatgaagacagtgcgctgccgtccataaacgcacttctgcaggccgaggttttgtctcgccaaatcgctgcccccgtgagcgggattaatggagatatcagagcaaagaagattgcttccatcgccgacgtctgtgagtcaatgaaagaacagctcctggtgctggtagagtgggcgaagtacatacctgccttttgcgaactcccattagatgaccaggttgcactgcttagggctcacgccggcgagcatttgctgctaggcgctacaaaacggagtatggtgttcaaggacgtcctcctgcttgggaacgattatatcgtgccccgacactgtcctgagctggccgaaatgagccgcgtgtctattagaatcttggacgagctcgtcctgccatttcaggaattacaaattgatgacaatgagtacgcatacctgaaagccatcatattctttgatcccgacgctaagggactctccgatcctggtaagattaaaaggcttcgggcgcaggttcaggtgtcactggaagactatatcaacgatcgccagtacgacagcagaggcaggttcggggagttgctactgctcctgccaacccttcaaagtattacttggcagatgatcgagcagatccaatttattaagctgttcggaatggcaaaaatagataatttgctccaggaaatgctgttatgaggactagtccctgttcccagagcccacttttttttctttttttgaaataaaatagcctgtctttcagatctaaaaaaaaaaaaaaaaaaaaaaaaaaaaaaaaaaaaaaaaaaaaaaaaaaaaaaaaaaaaaaaaaaaaaaaaaaaaaaaaaaaaaaaaaaaaaaaaaaaa

SEQ ID NO: 4864 - RNA, 1376 nt, synthetic construct
  misc_feature 1..1376: note = mRNA a-1 (A100) (opt3) from Homo sapiens__NP_000448.3__HNF4A(1-375)(S87A_K106R_K108R_K126R_K 127R)
  source 1..1376: mol_type = other RNA
aggagagtcccgcagtcggcgtccagcggctctgcttgttcgtgtgtgtgtcgttgcaggccttattcaagcttaccatgagactgagcaagaccctcgtggacatggatatggccgactactccgctgcacttgatcccgcctatacaactctggagttcgaaaacgtccaggttttgacgatgggcaatgacacctctccttcagaggggacaaacttaaatgcgccaaacagtctgggagtgagcgctctatgcgccatctgtggtgatagggcaactggcaaacactacggggcctcctcttgcgacggatgtaagggctttttccggcgcgctgtacgtaaaaatcatatgtattcgtgccgattttcaagacaatgtgtggtcgatagggaccggcgcaaccagtgcagatactgtaggctcaagaaatgcttccgggcaggtatgcgccgagaagccgtgcagaatgagagagataggattagcacccggcgtagttcctatgaagactctagcctgccgtccataaacgcccttctgcaggccgaggttttgtcacgccaaatcacaagtcccgtgagcgggattaatggagatatcagagcgaagaagattgcatctatcgccgacgtctgtgagtccatgaaagaacagctcctggtgctggtagagtgggctaagtacatacctgccttttgcgaactcccattagatgaccaggttgcactgcttagggctcacgccggcgagcatttgctgctaggcgcgaccaaacggtcaatggtgttcaaggacgtcctcctgcttgggaacgattatatcgtgccccgacactgtcctgagctggccgaaatgagccgcgtgagtattagaatcttggacgagctcgtcctgccatttcaggaattacaaattgatgacaatgagtacgcatacctgaaagctatcatattctttgatcccgacgccaagggactctctgatcctggtaagattaaaaggcttcggtcccaggttcaggtgagcctggaagactatatcaacgatcgccagtacgactcgagaggcaggttcggggagttgctactgctcctgccaactcttcaatctattacatggcagatgatcgagcagatccaatttattaagctgttcggaatggctaaaatagataatttgctccaggaaatgctgttatgaggactagtccctgttcccagagcccacttttttttctttttttgaaataaaatagcctgtctttcagatctaaaaaaaaaaaaaaaaaaaaaaaaaaaaaaaaaaaaaaaaaaaaaaaaaaaaaaaaaaaaaaaaaaaaaaaaaaaaaaaaaaaaaaaaaaaaaaaaaaaa

SEQ ID NO: 4865 - RNA, 1376 nt, synthetic construct; identical to SEQ ID NO: 4863
  misc_feature 1..1376: note = mRNA a-1 (A100) (opt3) from Homo sapiens__NP_000448.3__HNF4A(1-375)(S87A_K106R_K108R_K126R_K 127R_S142A_S143A_S148A_T166A_S167A_S313A_S378A_T429A_T432A_ S436A_K458R_S461A)
  source 1..1376: mol_type = other RNA

SEQ ID NO: 4866 - RNA, 1376 nt, synthetic construct; identical to SEQ ID NO: 4863
  misc_feature 1..1376: note = mRNA a-1 (A100) (opt3) from Homo sapiens__NP_000448.3__HNF4A(1-375)(S87A_K106R_K108R_K126R_K 127R_S142A_S143A_S148A_T166A_S167A_S313A_S378A_T429A_T432A_ S436A_K458R_S461E)
  source 1..1376: mol_type = other RNA

SEQ ID NO: 4867 - RNA, 1376 nt, synthetic construct
  misc_feature 1..1376: note = mRNA a-1 (A100) (opt3) from Homo sapiens__NP_000448.3__HNF4A(1-375)(S87A_K106R_K108R_K126R_K 127R_S142A_S143A_S148E_T166A_S167E_S313A_S378E_T429E_T432E_ S436E_K458R_S461E)
  source 1..1376: mol_type = other RNA
aggagagtcccgcagtcggcgtccagcggctctgcttgttcgtgtgtgtgtcgttgcaggccttattcaagcttaccatgagactgagcaagaccctcgtggacatggatatggccgactactccgctgcacttgatcccgcctatacaactctggagttcgaaaacgtccaggttttgacgatgggcaatgacacctctccttcagaggggacaaacttaaatgcgccaaacagtctgggagtgagcgctctatgcgccatctgtggtgatagggcaactggcaaacactacggggcctcctcttgcgacggatgtaagggctttttccggcgcgctgtacgtaaaaatcatatgtattcgtgccgattttcaagacaatgtgtggtcgatagggaccggcgcaaccagtgcagatactgtaggctcaagaaatgcttccgggcaggtatgcgccgagaagccgtgcagaatgagagagataggattagcacccggcgtgctgcctatgaagacagtgagctgccgtccataaacgcgcttctgcaggcagaggttttgtctcgccaaatcgccgaacccgtgagcgggattaatggagatatcagagctaagaagattgcctccatcgcagacgtctgtgagtcaatgaaagaacagctcctggtgctggtagagtgggctaagtacatacctgccttttgcgagctcccattagatgaccaggttgcgctgcttagggcccacgcaggcgaacatttgctgctaggcgctacaaaacggagtatggtgttcaaggacgtcctcctgcttgggaacgattatatcgtgccccgacactgtcctgagctggccgaaatgagccgcgtgtctattagaatcttggacgagctcgtcctgccatttcaggaattacaaattgatgacaatgagtacgcttacctgaaagccatcatattctttgatcccgacgcaaagggactctccgatcctggtaagattaaaaggcttcgggcccaggttcaggtgtcactggaggactatatcaacgatcgccagtacgacagcagaggcaggttcggggaattgctactgctcctgccaacccttcaaagtattacttggcagatgatcgagcagatccaatttattaagctgttcggaatggctaaaatagataatttgctccaggaaatgctgttatgaggactagtccctgttcccagagcccacttttttttctttttttgaaataaaatagcctgtctttcagatctaaaaaaaaaaaaaaaaaaaaaaaaaaaaaaaaaaaaaaaaaaaaaaaaaaaaaaaaaaaaaaaaaaaaaaaaaaaaaaaaaaaaaaaaaaaaaaaaaaaa

SEQ ID NO: 4868 - RNA, 1376 nt, synthetic construct
  misc_feature 1..1376: note = mRNA a-1 (A100) (opt3) from Homo sapiens__NP_000448.3__HNF4A(1-375)(S87A_K106R_K108R_K126R_K 127R_S142A_S143A_S148A_T166A_S167A_K179R_K180R_S313A_S378A_ T429A_T432A_S436A_K458R_S461E)
  source 1..1376: mol_type = other RNA
aggagagtcccgcagtcggcgtccagcggctctgcttgttcgtgtgtgtgtcgttgcaggccttattcaagcttaccatgagactgagcaagaccctcgtggacatggatatggccgactactccgctgcacttgatcccgcctatacaactctggagttcgaaaacgtccaggttttgacgatgggcaatgacacctctccttcagaggggacaaacttaaatgcgccaaacagtctgggagtgagcgctctatgcgccatctgtggtgatagggcaactggcaaacactacggggcctcctcttgcgacggatgtaagggctttttccggcgcgctgtacgtaaaaatcatatgtattcgtgccgattttcaagacaatgtgtggtcgatagggaccggcgcaaccagtgcagatactgtaggctcaagaaatgcttccgggcaggtatgcgccgagaagccgtgcagaatgagagagataggattagcacccggcgtgctgcctatgaagacagtgcgctgccgtccataaacgcacttctgcaggccgaggttttgtctcgccaaatcgctgcccccgtgagcgggattaatggagatatcagagcaaggcggattgcttccatcgccgacgtctgtgagtcaatgaaggaacagctcctggtgctggtagagtgggcgaagtacatacctgccttttgcgaactcccattagatgaccaggttgcactgcttcgagctcacgccggcgagcatttgctgctaggcgctacaaaacgcagtatggtgttcaaggacgtcctcctgcttgggaacgattatatcgtgcccagacactgtcctgagctggccgaaatgagcagggtgtctattcggatcttggacgagctcgtcctgccatttcaggaattacaaattgatgacaatgagtacgcatacctgaaagccatcatattctttgatcccgacgctaagggactctccgatcctggtaaaattaagcgccttagagcgcaggttcaggtgtcactggaagactatatcaacgataggcagtacgacagccgtggccggttcggggagttgctactgctcctgccaacccttcaaagtattacttggcagatgatcgagcagatccaatttattaagctgttcggaatggcaaaaatagataatttgctccaggaaatgctgttatgaggactagtccctgttcccagagcccacttttttttctttttttgaaataaaatagcctgtctttcagatctaaaaaaaaaaaaaaaaaaaaaaaaaaaaaaaaaaaaaaaaaaaaaaaaaaaaaaaaaaaaaaaaaaaaaaaaaaaaaaaaaaaaaaaaaaaaaaaaaaaa

SEQ ID NO: 4869 - RNA, 1376 nt, synthetic construct
  misc_feature 1..1376: note = mRNA a-1 (A100) (opt3) from Homo sapiens__NP_000448.3__HNF4A(1-375)(S87A_K106R_K108R_K126R_K 127R_S142A_S143A_S148A_T166A_S167A_K300R_K307R_K309R_S313A_ S378A_T429A_T432A_S436A_K458R_S461E)
  source 1..1376: mol_type = other RNA
aggagagtcccgcagtcggcgtccagcggctctgcttgttcgtgtgtgtgtcgttgcaggccttattcaagcttaccatgagactgagcaagaccctcgtggacatggatatggccgactactccgctgcacttgatcccgcctatacaactctggagttcgaaaacgtccaggttttgacgatgggcaatgacacctctccttcagaggggacaaacttaaatgcgccaaacagtctgggagtgagcgctctatgcgccatctgtggtgatagggcaactggcaaacactacggggcctcctcttgcgacggatgtaagggctttttccggcgcgctgtacgtaaaaatcatatgtattcgtgccgattttcaagacaatgtgtggtcgatagggaccggcgcaaccagtgcagatactgtaggctcaagaaatgcttccgggcaggtatgcgccgagaagccgtgcagaatgagagagataggattagcacccggcgtgctgcctatgaagacagtgcgctgccgtccataaacgcacttctgcaggccgaggttttgtctcgccaaatcgctgcccccgtgagcgggattaatggagatatcagagcaaagaagattgcttccatcgccgacgtctgtgagtcaatgaaagaacagctcctggtgctggtagagtgggcgaagtacatacctgccttttgcgaactcccattagatgaccaggttgcactgcttagggctcacgccggcgagcatttgctgctaggcgctacaaaacggagtatggtgttcaaggacgtcctcctgcttgggaacgattatatcgtgccccgacactgtcctgagctggccgaaatgagccgcgtgtctattagaatcttggacgagctcgtcctgccatttcaggaattacaaattgatgacaatgagtacgcatacctgaaagccatcatattctttgatcccgacgctaggggactctccgatcctggtcggattcgcagacttagggcgcaggttcaggtgtcactggaagactatatcaacgatcgtcagtacgacagccggggccgattcggggagttgctactgctcctgccaacccttcaaagtattacttggcagatgatcgagcagatccaatttattaagctgttcggaatggcaaagatagataatttgctccaggaaatgctgttatgaggactagtccctgttcccagagcccacttttttttctttttttgaaataaaatagcctgtctttcagatctaaaaaaaaaaaaaaaaaaaaaaaaaaaaaaaaaaaaaaaaaaaaaaaaaaaaaaaaaaaaaaaaaaaaaaaaaaaaaaaaaaaaaaaaaaaaaaaaaaaa

SEQ ID NO: 4870 - RNA, 1376 nt, synthetic construct; identical to SEQ ID NO: 4863
  misc_feature 1..1376: note = mRNA a-1 (A100) (opt3) from Homo sapiens__NP_000448.3__HNF4A(1-375)(S87A_K106R_K108R_K126R_K 127R_S142A_S143A_S148A_T166A_S167A_S313A_S378A_T429A_T432A_ S436A_K447R_K458R_S461E_K470R)
  source 1..1376: mol_type = other RNA

SEQ ID NO: 4871 - RNA, 1376 nt, synthetic construct
  misc_feature 1..1376: note = mRNA a-1 (A100) (opt3) from Homo sapiens__NP_000448.3__HNF4A(1-375)(S87A_K106R_K108R_K126R_K 127R_S142A_S143A_S148A_T166A_S167A_K179R_K180R_K234R_K300R_ K307R_K309R_S313A_S378A_T429A_T432A_S436A_K447R_K458R_S461E _K470R)
  source 1..1376: mol_type = other RNA
aggagagtcccgcagtcggcgtccagcggctctgcttgttcgtgtgtgtgtcgttgcaggccttattcaagcttaccatgagactgagcaagaccctcgtggacatggatatggccgactactccgctgcacttgatcccgcctatacaactctggagttcgaaaacgtccaggttttgacgatgggcaatgacacctctccttcagaggggacaaacttaaatgcgccaaacagtctgggagtgagcgctctatgcgccatctgtggtgatagggcaactggcaaacactacggggcctcctcttgcgacggatgtaagggctttttccggcgcgctgtacgtaaaaatcatatgtattcgtgccgattttcaagacaatgtgtggtcgatagggaccggcgcaaccagtgcagatactgtaggctcaagaaatgcttccgggcaggtatgcgccgagaagccgtgcagaatgagagagataggattagcacccggcgtgctgcctatgaagacagtgcgctgccgtccataaacgcacttctgcaggccgaggttttgtctcgccaaatcgctgcccccgtgagcgggattaatggagatatcagagcaaggcggattgcttccatcgccgacgtctgtgagtcaatgaaggaacagctcctggtgctggtagagtgggcgaagtacatacctgccttttgcgaactcccattagatgaccaggttgcactgcttcgagctcacgccggcgagcatttgctgctaggcgctacacgcagaagtatggtgttcaaagacgtcctcctgcttgggaacgattatatcgtgcccaggcactgtcctgagctggccgaaatgagccgggtgtctattcgcatcttggacgagctcgtcctgccatttcaggaattacaaattgatgacaatgagtacgcatacctgaaggccatcatattctttgatcccgacgctagaggactctccgatcctggtaggattcgtcggcttcgagcgcaggttcaggtgtcactggaagactatatcaacgatagacagtacgacagcaggggccgcttcggggagttgctactgctcctgccaacccttcaaagtattacttggcagatgatcgagcagatccaatttattaaactgttcggaatggcaaagatagataatttgctccaggaaatgctgttatgaggactagtccctgttcccagagcccacttttttttctttttttgaaataaaatagcctgtctttcagatctaaaaaaaaaaaaaaaaaaaaaaaaaaaaaaaaaaaaaaaaaaaaaaaaaaaaaaaaaaaaaaaaaaaaaaaaaaaaaaaaaaaaaaaaaaaaaaaaaaaa

SEQ ID NO: 4872 - RNA, 1376 nt, synthetic construct
  misc_feature 1..1376: note = mRNA a-1 (A100) (opt3) from Homo sapiens__NP_000448.3__HNF4A(1-375)(S87A_S95A_S99A_K106R_K10 8R_K126R_K127R_S142A_S143A_S148A_T166A_S167A_S313A_S378A_T4 29A_T432A_S436A_K458R_S461E)
  source 1..1376: mol_type = other RNA
aggagagtcccgcagtcggcgtccagcggctctgcttgttcgtgtgtgtgtcgttgcaggccttattcaagcttaccatgagactgagcaagaccctcgtggacatggatatggccgactactccgctgcacttgatcccgcctatacaactctggagttcgaaaacgtccaggttttgacgatgggcaatgacacctctccttcagaggggacaaacttaaatgcgccaaacagtctgggagtgagcgctctatgcgccatctgtggtgatagggcaactggcaaacactacggggcctcctcttgcgacggatgtaagggctttttccggcgcgctgtacgtaaaaatcatatgtatgcatgccgatttgccagacaatgtgtggtcgatagggaccggcgcaaccagtgcagatactgtaggctcaagaaatgcttccgggctggtatgcgccgagaagccgtgcagaatgagagagataggatttcgacccggcgtgcggcatatgaagactcagccctgccgagcataaacgcccttctgcaggccgaggttttgagtcgccaaatcgcagctcccgtgtccgggattaatggagatatcagagccaagaagattgcgtctatcgccgacgtctgtgagagcatgaaagaacagctcctggtgctggtagagtgggcaaagtacatacctgctttttgcgaactcccattagatgaccaggttgccctgcttagggctcacgccggcgagcatttgctgctaggcgcaacaaaacggtccatggtgttcaaggacgtcctcctgcttgggaacgattatatcgtgccccgacactgtcctgagctggccgaaatgtcacgcgtgagtattagaatcttggacgagctcgtcctgccatttcaggaattacaaattgatgacaatgagtacgcttacctgaaagcgatcatattctttgatcccgacgcaaagggactcagcgatcctggtaagattaaaaggcttcgggcccaggttcaggtgtctctggaagactatatcaacgatcgccagtacgactccagaggcaggttcggggagttgctactgctcctgccaacccttcaatcaattacttggcagatgatcgagcagatccaatttattaagctgttcggaatggctaaaatagataatttgctccaggaaatgctgttatgaggactagtccctgttcccagagcccacttttttttctttttttgaaataaaatagcctgtctttcagatctaaaaaaaaaaaaaaaaaaaaaaaaaaaaaaaaaaaaaaaaaaaaaaaaaaaaaaaaaaaaaaaaaaaaaaaaaaaaaaaaaaaaaaaaaaaaaaaaaaaa

SEQ ID NO: 4873 - RNA, 1376 nt, synthetic construct
  misc_feature 1..1376: note = mRNA a-1 (A100) (opt3) from Homo sapiens__NP_000448.3__HNF4A(1-375)(S87A_K106R_K108R_K126R_K 127R_S138A_T139A_S142A_S143A_S148A_T166A_S167A_S313A_S378A_ T429A_T432A_S436A_K458R_S461E)
  source 1..1376: mol_type = other RNA
aggagagtcccgcagtcggcgtccagcggctctgcttgttcgtgtgtgtgtcgttgcaggccttattcaagcttaccatgagactgagcaagaccctcgtggacatggatatggccgactactccgctgcacttgatcccgcctatacaactctggagttcgaaaacgtccaggttttgacgatgggcaatgacacctctccttcagaggggacaaacttaaatgcgccaaacagtctgggagtgagcgctctatgcgccatctgtggtgatagggcaactggcaaacactacggggcctcctcttgcgacggatgtaagggctttttccggcgcgctgtacgtaaaaatcatatgtattcgtgccgattttcaagacaatgtgtggtcgatagggaccggcgcaaccagtgcagatactgtaggctcaagaaatgcttccgggcaggtatgcgccgagaagccgtgcagaatgagagagataggattgctgcccggcgtgcggcatatgaagacagcgccctgccgagtataaacgcccttctgcaggccgaggttttgtcccgccaaatcgcagctcccgtgtctgggattaatggagatatcagagccaagaagattgcgagcatcgccgacgtctgtgagtccatgaaagaacagctcctggtgctggtagagtgggcaaagtacatacctgctttttgcgaactcccattagatgaccaggttgccctgcttagggctcacgccggcgagcatttgctgctaggcgcaaccaaacggtcaatggtgttcaaggacgtcctcctgcttgggaacgattatatcgtgccccgacactgtcctgagctggccgaaatgagtcgcgtgagcattagaatcttggacgagctcgtcctgccatttcaggaattacaaattgatgacaatgagtacgcttacctgaaagcgatcatattctttgatcccgacgcaaagggactctctgatcctggtaagattaaaaggcttcgggcccaggttcaggtgtccctggaagactatatcaacgatcgccagtacgactcaagaggcaggttcggggagttgctactgctcctgccaacacttcaaagcattacctggcagatgatcgagcagatccaatttattaagctgttcggaatggctaaaatagataatttgctccaggaaatgctgttatgaggactagtccctgttcccagagcccacttttttttctttttttgaaataaaatagcctgtctttcagatctaaaaaaaaaaaaaaaaaaaaaaaaaaaaaaaaaaaaaaaaaaaaaaaaaaaaaaaaaaaaaaaaaaaaaaaaaaaaaaaaaaaaaaaaaaaaaaaaaaaa

SEQ ID NO: 4874 - RNA, 1376 nt, synthetic construct
  misc_feature 1..1376: note = mRNA a-1 (A100) (opt3) from Homo sapiens__NP_000448.3__HNF4A(1-375)(S87A_S95A_S99A_K106R_K10 8R_K126R_K127R_S138A_T139A_S142A_S143A_S148A_T166A_S167A_S3 13A_S378A_T429A_T432A_S436A_K458R_S461E)
  source 1..1376: mol_type = other RNA
aggagagtcccgcagtcggcgtccagcggctctgcttgttcgtgtgtgtgtcgttgcaggccttattcaagcttaccatgagactgagcaagaccctcgtggacatggatatggccgactactccgctgcacttgatcccgcctatacaactctggagttcgaaaacgtccaggttttgacgatgggcaatgacacctctccttcagaggggacaaacttaaatgcgccaaacagtctgggagtgagcgctctatgcgccatctgtggtgatagggcaactggcaaacactacggggcctcctcttgcgacggatgtaagggctttttccggcgcgctgtacgtaaaaatcatatgtatgcatgccgatttgccagacaatgtgtggtcgatagggaccggcgcaaccagtgcagatactgtaggctcaagaaatgcttccgggctggtatgcgccgagaagccgtgcagaatgagagagataggattgcggcacggcgtgccgcttatgaagactcggccctgccgtcaataaacgcacttctgcaggctgaggttttgagccgccaaatcgccgcgcccgtgagtgggattaatggagatatcagagccaagaagattgcatccatcgctgacgtctgtgagtctatgaaagaacagctcctggtgctggtagagtgggccaagtacatacctgctttttgcgaactcccattagatgaccaggttgccctgcttagggcacacgccggcgagcatttgctgctaggcgctaccaaacggagcatggtgttcaaggacgtcctcctgcttgggaacgattatatcgtgccccgacactgtcctgagctggcggaaatgtcccgcgtgtcaattagaatcttggacgagctcgtcctgccatttcaggaattacaaattgatgacaatgagtacgcatacctgaaagccatcatattctttgatcccgacgctaagggactcagtgatcctggtaagattaaaaggcttcgggcccaggttcaggtgagcctggaagactatatcaacgatcgccagtacgactctagaggcaggttcggggagttgctactgctcctgccaacacttcaatccattacctggcagatgatcgagcagatccaatttattaagctgttcggaatggcaaaaatagataatttgctccaggaaatgctgttatgaggactagtccctgttcccagagcccacttttttttctttttttgaaataaaatagcctgtctttcagatctaaaaaaaaaaaaaaaaaaaaaaaaaaaaaaaaaaaaaaaaaaaaaaaaaaaaaaaaaaaaaaaaaaaaaaaaaaaaaaaaaaaaaaaaaaaaaaaaaaaa

SEQ ID NO: 4875 - RNA, 1376 nt, synthetic construct
  misc_feature 1..1376: note = mRNA a-1 (A100) (opt4) from Homo sapiens__NP_000448.3__HNF4A(1-375)
  source 1..1376: mol_type = other RNA
aggagagtcccgcagtcggcgtccagcggctctgcttgttcgtgtgtgtgtcgttgcaggccttattcaagcttaccatgagactgagcaagaccctggtggacatggacatggccgactacagcgccgccctggaccccgcctacaccaccctggagttcgagaacgtgcaggtgctgaccatgggcaacgacaccagccccagcgagggcaccaacctgaacgcccccaacagcctgggcgtgagcgccctgtgcgccatctgcggcgacagagccaccggcaagcactacggcgccagcagctgcgacggctgcaagggcttcttcagaagaagcgtgagaaagaaccacatgtacagctgcagattcagcagacagtgcgtggtggacaaggacaagagaaaccagtgcagatactgcagactgaagaagtgcttcagagccggcatgaagaaggaggccgtgcagaacgagagagacagaatcagcaccagaagaagcagctacgaggacagcagcctgcccagcatcaacgccctgctgcaggccgaggtgctgagcagacagatcaccagccccgtgagcggcatcaacggcgacatcagagccaagaagatcgccagcatcgccgacgtgtgcgagagcatgaaggagcagctgctggtgctggtggagtgggccaagtacatccccgccttctgcgagctgcccctggacgaccaggtggccctgctgagagcccacgccggcgagcacctgctgctgggcgccaccaagagaagcatggtgttcaaggacgtgctgctgctgggcaacgactacatcgtgcccagacactgccccgagctggccgagatgagcagagtgagcatcagaatcctggacgagctggtgctgcccttccaggagctgcagatcgacgacaacgagtacgcctacctgaaggccatcatcttcttcgaccccgacgccaagggcctgagcgaccccggcaagatcaagagactgagaagccaggtgcaggtgagcctggaggactacatcaacgacagacagtacgacagcagaggcagattcggcgagctgctgctgctgctgcccaccctgcagagcatcacctggcagatgatcgagcagatccagttcatcaagctgttcggcatggccaagatcgacaacctgctgcaggagatgctgctgtgaggactagtccctgttcccagagcccacttttttttctttttttgaaataaaatagcctgtctttcagatctaaaaaaaaaaaaaaaaaaaaaaaaaaaaaaaaaaaaaaaaaaaaaaaaaaaaaaaaaaaaaaaaaaaaaaaaaaaaaaaaaaaaaaaaaaaaaaaaaaaa

SEQ ID NO: 4876 - RNA, 1376 nt, synthetic construct
  misc_feature 1..1376: note = mRNA a-1 (A100) (opt4) from Homo sapiens__NP_000448.3__HNF4A(1-375)(S313A)
  source 1..1376: mol_type = other RNA
aggagagtcccgcagtcggcgtccagcggctctgcttgttcgtgtgtgtgtcgttgcaggccttattcaagcttaccatgagactgagcaagaccctggtggacatggacatggccgactacagcgccgccctggaccccgcctacaccaccctggagttcgagaacgtgcaggtgctgaccatgggcaacgacaccagccccagcgagggcaccaacctgaacgcccccaacagcctgggcgtgagcgccctgtgcgccatctgcggcgacagagccaccggcaagcactacggcgccagcagctgcgacggctgcaagggcttcttcagaagaagcgtgagaaagaaccacatgtacagctgcagattcagcagacagtgcgtggtggacaaggacaagagaaaccagtgcagatactgcagactgaagaagtgcttcagagccggcatgaagaaggaggccgtgcagaacgagagagacagaatcagcaccagaagaagcagctacgaggacagcagcctgcccagcatcaacgccctgctgcaggccgaggtgctgagcagacagatcaccagccccgtgagcggcatcaacggcgacatcagagccaagaagatcgccagcatcgccgacgtgtgcgagagcatgaaggagcagctgctggtgctggtggagtgggccaagtacatccccgccttctgcgagctgcccctggacgaccaggtggccctgctgagagcccacgccggcgagcacctgctgctgggcgccaccaagagaagcatggtgttcaaggacgtgctgctgctgggcaacgactacatcgtgcccagacactgccccgagctggccgagatgagcagagtgagcatcagaatcctggacgagctggtgctgcccttccaggagctgcagatcgacgacaacgagtacgcctacctgaaggccatcatcttcttcgaccccgacgccaagggcctgagcgaccccggcaagatcaagagactgagagcccaggtgcaggtgagcctggaggactacatcaacgacagacagtacgacagcagaggcagattcggcgagctgctgctgctgctgcccaccctgcagagcatcacctggcagatgatcgagcagatccagttcatcaagctgttcggcatggccaagatcgacaacctgctgcaggagatgctgctgtgaggactagtccctgttcccagagcccacttttttttctttttttgaaataaaatagcctgtctttcagatctaaaaaaaaaaaaaaaaaaaaaaaaaaaaaaaaaaaaaaaaaaaaaaaaaaaaaaaaaaaaaaaaaaaaaaaaaaaaaaaaaaaaaaaaaaaaaaaaaaaa

SEQ ID NO: 4877 - RNA, 1376 nt, synthetic construct
  misc_feature 1..1376: note = mRNA a-1 (A100) (opt4) from Homo sapiens__NP_000448.3__HNF4A(1-375)(S313E)
  source 1..1376: mol_type = other RNA
aggagagtcccgcagtcggcgtccagcggctctgcttgttcgtgtgtgtgtcgttgcaggccttattcaagcttaccatgagactgagcaagaccctggtggacatggacatggccgactacagcgccgccctggaccccgcctacaccaccctggagttcgagaacgtgcaggtgctgaccatgggcaacgacaccagccccagcgagggcaccaacctgaacgcccccaacagcctgggcgtgagcgccctgtgcgccatctgcggcgacagagccaccggcaagcactacggcgccagcagctgcgacggctgcaagggcttcttcagaagaagcgtgagaaagaaccacatgtacagctgcagattcagcagacagtgcgtggtggacaaggacaagagaaaccagtgcagatactgcagactgaagaagtgcttcagagccggcatgaagaaggaggccgtgcagaacgagagagacagaatcagcaccagaagaagcagctacgaggacagcagcctgcccagcatcaacgccctgctgcaggccgaggtgctgagcagacagatcaccagccccgtgagcggcatcaacggcgacatcagagccaagaagatcgccagcatcgccgacgtgtgcgagagcatgaaggagcagctgctggtgctggtggagtgggccaagtacatccccgccttctgcgagctgcccctggacgaccaggtggccctgctgagagcccacgccggcgagcacctgctgctgggcgccaccaagagaagcatggtgttcaaggacgtgctgctgctgggcaacgactacatcgtgcccagacactgccccgagctggccgagatgagcagagtgagcatcagaatcctggacgagctggtgctgcccttccaggagctgcagatcgacgacaacgagtacgcctacctgaaggccatcatcttcttcgaccccgacgccaagggcctgagcgaccccggcaagatcaagagactgagagagcaggtgcaggtgagcctggaggactacatcaacgacagacagtacgacagcagaggcagattcggcgagctgctgctgctgctgcccaccctgcagagcatcacctggcagatgatcgagcagatccagttcatcaagctgttcggcatggccaagatcgacaacctgctgcaggagatgctgctgtgaggactagtccctgttcccagagcccacttttttttctttttttgaaataaaatagcctgtctttcagatctaaaaaaaaaaaaaaaaaaaaaaaaaaaaaaaaaaaaaaaaaaaaaaaaaaaaaaaaaaaaaaaaaaaaaaaaaaaaaaaaaaaaaaaaaaaaaaaaaaaa

SEQ ID NO: 4878 - RNA, 1376 nt, synthetic construct
  misc_feature 1..1376: note = mRNA a-1 (A100) (opt4) from Homo sapiens__NP_000448.3__HNF4A(1-375)(S142A_S143A)
  source 1..1376: mol_type = other RNA
aggagagtcccgcagtcggcgtccagcggctctgcttgttcgtgtgtgtgtcgttgcaggccttattcaagcttaccatgagactgagcaagaccctggtggacatggacatggccgactacagcgccgccctggaccccgcctacaccaccctggagttcgagaacgtgcaggtgctgaccatgggcaacgacaccagccccagcgagggcaccaacctgaacgcccccaacagcctgggcgtgagcgccctgtgcgccatctgcggcgacagagccaccggcaagcactacggcgccagcagctgcgacggctgcaagggcttcttcagaagaagcgtgagaaagaaccacatgtacagctgcagattcagcagacagtgcgtggtggacaaggacaagagaaaccagtgcagatactgcagactgaagaagtgcttcagagccggcatgaagaaggaggccgtgcagaacgagagagacagaatcagcaccagaagagccgcctacgaggacagcagcctgcccagcatcaacgccctgctgcaggccgaggtgctgagcagacagatcaccagccccgtgagcggcatcaacggcgacatcagagccaagaagatcgccagcatcgccgacgtgtgcgagagcatgaaggagcagctgctggtgctggtggagtgggccaagtacatccccgccttctgcgagctgcccctggacgaccaggtggccctgctgagagcccacgccggcgagcacctgctgctgggcgccaccaagagaagcatggtgttcaaggacgtgctgctgctgggcaacgactacatcgtgcccagacactgccccgagctggccgagatgagcagagtgagcatcagaatcctggacgagctggtgctgcccttccaggagctgcagatcgacgacaacgagtacgcctacctgaaggccatcatcttcttcgaccccgacgccaagggcctgagcgaccccggcaagatcaagagactgagaagccaggtgcaggtgagcctggaggactacatcaacgacagacagtacgacagcagaggcagattcggcgagctgctgctgctgctgcccaccctgcagagcatcacctggcagatgatcgagcagatccagttcatcaagctgttcggcatggccaagatcgacaacctgctgcaggagatgctgctgtgaggactagtccctgttcccagagcccacttttttttctttttttgaaataaaatagcctgtctttcagatctaaaaaaaaaaaaaaaaaaaaaaaaaaaaaaaaaaaaaaaaaaaaaaaaaaaaaaaaaaaaaaaaaaaaaaaaaaaaaaaaaaaaaaaaaaaaaaaaaaaa

SEQ ID NO: 4879 - RNA, 1376 nt, synthetic construct
  misc_feature 1..1376: note = mRNA a-1 (A100) (opt4) from Homo sapiens__NP_000448.3__HNF4A(1-375)(S142E_S143E)
  source 1..1376: mol_type = other RNA
aggagagtcccgcagtcggcgtccagcggctctgcttgttcgtgtgtgtgtcgttgcaggccttattcaagcttaccatgagactgagcaagaccctggtggacatggacatggccgactacagcgccgccctggaccccgcctacaccaccctggagttcgagaacgtgcaggtgctgaccatgggcaacgacaccagccccagcgagggcaccaacctgaacgcccccaacagcctgggcgtgagcgccctgtgcgccatctgcggcgacagagccaccggcaagcactacggcgccagcagctgcgacggctgcaagggcttcttcagaagaagcgtgagaaagaaccacatgtacagctgcagattcagcagacagtgcgtggtggacaaggacaagagaaaccagtgcagatactgcagactgaagaagtgcttcagagccggcatgaagaaggaggccgtgcagaacgagagagacagaatcagcaccagaagagaggagtacgaggacagcagcctgcccagcatcaacgccctgctgcaggccgaggtgctgagcagacagatcaccagccccgtgagcggcatcaacggcgacatcagagccaagaagatcgccagcatcgccgacgtgtgcgagagcatgaaggagcagctgctggtgctggtggagtgggccaagtacatccccgccttctgcgagctgcccctggacgaccaggtggccctgctgagagcccacgccggcgagcacctgctgctgggcgccaccaagagaagcatggtgttcaaggacgtgctgctgctgggcaacgactacatcgtgcccagacactgccccgagctggccgagatgagcagagtgagcatcagaatcctggacgagctggtgctgcccttccaggagctgcagatcgacgacaacgagtacgcctacctgaaggccatcatcttcttcgaccccgacgccaagggcctgagcgaccccggcaagatcaagagactgagaagccaggtgcaggtgagcctggaggactacatcaacgacagacagtacgacagcagaggcagattcggcgagctgctgctgctgctgcccaccctgcagagcatcacctggcagatgatcgagcagatccagttcatcaagctgttcggcatggccaagatcgacaacctgctgcaggagatgctgctgtgaggactagtccctgttcccagagcccacttttttttctttttttgaaataaaatagcctgtctttcagatctaaaaaaaaaaaaaaaaaaaaaaaaaaaaaaaaaaaaaaaaaaaaaaaaaaaaaaaaaaaaaaaaaaaaaaaaaaaaaaaaaaaaaaaaaaaaaaaaaaaa

SEQ ID NO: 4880 - RNA, 1376 nt, synthetic construct
  misc_feature 1..1376: note = mRNA a-1 (A100) (opt4) from Homo sapiens__NP_000448.3__HNF4A(1-375)(S143A)
  source 1..1376: mol_type = other RNA
aggagagtcccgcagtcggcgtccagcggctctgcttgttcgtgtgtgtgtcgttgcaggccttattcaagcttaccatgagactgagcaagaccctggtggacatggacatggccgactacagcgccgccctggaccccgcctacaccaccctggagttcgagaacgtgcaggtgctgaccatgggcaacgacaccagccccagcgagggcaccaacctgaacgcccccaacagcctgggcgtgagcgccctgtgcgccatctgcggcgacagagccaccggcaagcactacggcgccagcagctgcgacggctgcaagggcttcttcagaagaagcgtgagaaagaaccacatgtacagctgcagattcagcagacagtgcgtggtggacaaggacaagagaaaccagtgcagatactgcagactgaagaagtgcttcagagccggcatgaagaaggaggccgtgcagaacgagagagacagaatcagcaccagaagaagcgcctacgaggacagcagcctgcccagcatcaacgccctgctgcaggccgaggtgctgagcagacagatcaccagccccgtgagcggcatcaacggcgacatcagagccaagaagatcgccagcatcgccgacgtgtgcgagagcatgaaggagcagctgctggtgctggtggagtgggccaagtacatccccgccttctgcgagctgcccctggacgaccaggtggccctgctgagagcccacgccggcgagcacctgctgctgggcgccaccaagagaagcatggtgttcaaggacgtgctgctgctgggcaacgactacatcgtgcccagacactgccccgagctggccgagatgagcagagtgagcatcagaatcctggacgagctggtgctgcccttccaggagctgcagatcgacgacaacgagtacgcctacctgaaggccatcatcttcttcgaccccgacgccaagggcctgagcgaccccggcaagatcaagagactgagaagccaggtgcaggtgagcctggaggactacatcaacgacagacagtacgacagcagaggcagattcggcgagctgctgctgctgctgcccaccctgcagagcatcacctggcagatgatcgagcagatccagttcatcaagctgttcggcatggccaagatcgacaacctgctgcaggagatgctgctgtgaggactagtccctgttcccagagcccacttttttttctttttttgaaataaaatagcctgtctttcagatctaaaaaaaaaaaaaaaaaaaaaaaaaaaaaaaaaaaaaaaaaaaaaaaaaaaaaaaaaaaaaaaaaaaaaaaaaaaaaaaaaaaaaaaaaaaaaaaaaaaa

SEQ ID NO: 4881 - RNA, 1376 nt, synthetic construct
  misc_feature 1..1376: note = mRNA a-1 (A100) (opt4) from Homo sapiens__NP_000448.3__HNF4A(1-375)(T166A)
  source 1..1376: mol_type = other RNA
aggagagtcccgcagtcggcgtccagcggctctgcttgttcgtgtgtgtgtcgttgcaggccttattcaagcttaccatgagactgagcaagaccctggtggacatggacatggccgactacagcgccgccctggaccccgcctacaccaccctggagttcgagaacgtgcaggtgctgaccatgggcaacgacaccagccccagcgagggcaccaacctgaacgcccccaacagcctgggcgtgagcgccctgtgcgccatctgcggcgacagagccaccggcaagcactacggcgccagcagctgcgacggctgcaagggcttcttcagaagaagcgtgagaaagaaccacatgtacagctgcagattcagcagacagtgcgtggtggacaaggacaagagaaaccagtgcagatactgcagactgaagaagtgcttcagagccggcatgaagaaggaggccgtgcagaacgagagagacagaatcagcaccagaagaagcagctacgaggacagcagcctgcccagcatcaacgccctgctgcaggccgaggtgctgagcagacagatcgccagccccgtgagcggcatcaacggcgacatcagagccaagaagatcgccagcatcgccgacgtgtgcgagagcatgaaggagcagctgctggtgctggtggagtgggccaagtacatccccgccttctgcgagctgcccctggacgaccaggtggccctgctgagagcccacgccggcgagcacctgctgctgggcgccaccaagagaagcatggtgttcaaggacgtgctgctgctgggcaacgactacatcgtgcccagacactgccccgagctggccgagatgagcagagtgagcatcagaatcctggacgagctggtgctgcccttccaggagctgcagatcgacgacaacgagtacgcctacctgaaggccatcatcttcttcgaccccgacgccaagggcctgagcgaccccggcaagatcaagagactgagaagccaggtgcaggtgagcctggaggactacatcaacgacagacagtacgacagcagaggcagattcggcgagctgctgctgctgctgcccaccctgcagagcatcacctggcagatgatcgagcagatccagttcatcaagctgttcggcatggccaagatcgacaacctgctgcaggagatgctgctgtgaggactagtccctgttcccagagcccacttttttttctttttttgaaataaaatagcctgtctttcagatctaaaaaaaaaaaaaaaaaaaaaaaaaaaaaaaaaaaaaaaaaaaaaaaaaaaaaaaaaaaaaaaaaaaaaaaaaaaaaaaaaaaaaaaaaaaaaaaaaaaa

SEQ ID NO: 4882 - RNA, 1376 nt, synthetic construct
  misc_feature 1..1376: note = mRNA a-1 (A100) (opt4) from Homo sapiens__NP_000448.3__HNF4A(1-375)(S167E)
  source 1..1376: mol_type = other RNA
aggagagtcccgcagtcggcgtccagcggctctgcttgttcgtgtgtgtgtcgttgcaggccttattcaagcttaccatgagactgagcaagaccctggtggacatggacatggccgactacagcgccgccctggaccccgcctacaccaccctggagttcgagaacgtgcaggtgctgaccatgggcaacgacaccagccccagcgagggcaccaacctgaacgcccccaacagcctgggcgtgagcgccctgtgcgccatctgcggcgacagagccaccggcaagcactacggcgccagcagctgcgacggctgcaagggcttcttcagaagaagcgtgagaaagaaccacatgtacagctgcagattcagcagacagtgcgtggtggacaaggacaagagaaaccagtgcagatactgcagactgaagaagtgcttcagagccggcatgaagaaggaggccgtgcagaacgagagagacagaatcagcaccagaagaagcagctacgaggacagcagcctgcccagcatcaacgccctgctgcaggccgaggtgctgagcagacagatcaccgagcccgtgagcggcatcaacggcgacatcagagccaagaagatcgccagcatcgccgacgtgtgcgagagcatgaaggagcagctgctggtgctggtggagtgggccaagtacatccccgccttctgcgagctgcccctggacgaccaggtggccctgctgagagcccacgccggcgagcacctgctgctgggcgccaccaagagaagcatggtgttcaaggacgtgctgctgctgggcaacgactacatcgtgcccagacactgccccgagctggccgagatgagcagagtgagcatcagaatcctggacgagctggtgctgcccttccaggagctgcagatcgacgacaacgagtacgcctacctgaaggccatcatcttcttcgaccccgacgccaagggcctgagcgaccccggcaagatcaagagactgagaagccaggtgcaggtgagcctggaggactacatcaacgacagacagtacgacagcagaggcagattcggcgagctgctgctgctgctgcccaccctgcagagcatcacctggcagatgatcgagcagatccagttcatcaagctgttcggcatggccaagatcgacaacctgctgcaggagatgctgctgtgaggactagtccctgttcccagagcccacttttttttctttttttgaaataaaatagcctgtctttcagatctaaaaaaaaaaaaaaaaaaaaaaaaaaaaaaaaaaaaaaaaaaaaaaaaaaaaaaaaaaaaaaaaaaaaaaaaaaaaaaaaaaaaaaaaaaaaaaaaaaaa

SEQ ID NO: 4883 - RNA, 1376 nt, synthetic construct
  misc_feature 1..1376: note = mRNA a-1 (A100) (opt4) from Homo sapiens__NP_000448.3__HNF4A(1-375)(S167A)
  source 1..1376: mol_type = other RNA
aggagagtcccgcagtcggcgtccagcggctctgcttgttcgtgtgtgtgtcgttgcaggccttattcaagcttaccatgagactgagcaagaccctggtggacatggacatggccgactacagcgccgccctggaccccgcctacaccaccctggagttcgagaacgtgcaggtgctgaccatgggcaacgacaccagccccagcgagggcaccaacctgaacgcccccaacagcctgggcgtgagcgccctgtgcgccatctgcggcgacagagccaccggcaagcactacggcgccagcagctgcgacggctgcaagggcttcttcagaagaagcgtgagaaagaaccacatgtacagctgcagattcagcagacagtgcgtggtggacaaggacaagagaaaccagtgcagatactgcagactgaagaagtgcttcagagccggcatgaagaaggaggccgtgcagaacgagagagacagaatcagcaccagaagaagcagctacgaggacagcagcctgcccagcatcaacgccctgctgcaggccgaggtgctgagcagacagatcaccgcccccgtgagcggcatcaacggcgacatcagagccaagaagatcgccagcatcgccgacgtgtgcgagagcatgaaggagcagctgctggtgctggtggagtgggccaagtacatccccgccttctgcgagctgcccctggacgaccaggtggccctgctgagagcccacgccggcgagcacctgctgctgggcgccaccaagagaagcatggtgttcaaggacgtgctgctgctgggcaacgactacatcgtgcccagacactgccccgagctggccgagatgagcagagtgagcatcagaatcctggacgagctggtgctgcccttccaggagctgcagatcgacgacaacgagtacgcctacctgaaggccatcatcttcttcgaccccgacgccaagggcctgagcgaccccggcaagatcaagagactgagaagccaggtgcaggtgagcctggaggactacatcaacgacagacagtacgacagcagaggcagattcggcgagctgctgctgctgctgcccaccctgcagagcatcacctggcagatgatcgagcagatccagttcatcaagctgttcggcatggccaagatcgacaacctgctgcaggagatgctgctgtgaggactagtccctgttcccagagcccacttttttttctttttttgaaataaaatagcctgtctttcagatctaaaaaaaaaaaaaaaaaaaaaaaaaaaaaaaaaaaaaaaaaaaaaaaaaaaaaaaaaaaaaaaaaaaaaaaaaaaaaaaaaaaaaaaaaaaaaaaaaaaa

SEQ ID NO: 4884 - RNA, 1376 nt, synthetic construct; identical to SEQ ID NO: 4883
  misc_feature 1..1376: note = mRNA a-1 (A100) (opt4) from Homo sapiens__NP_000448.3__HNF4A(1-375)(S167A_S378A_T429A_T432A_ S436A)
  source 1..1376: mol_type = other RNA

SEQ ID NO: 4885 - RNA, 1376 nt, synthetic construct; identical to SEQ ID NO: 4882
  misc_feature 1..1376: note = mRNA a-1 (A100) (opt4) from Homo sapiens__NP_000448.3__HNF4A(1-375)(S167E_S378E_T429E_T432E_ S436E)
  source 1..1376: mol_type = other RNA

SEQ ID NO: 4886 - RNA, 1376 nt, synthetic construct
  misc_feature 1..1376: note = mRNA a-1 (A100) (opt4) from Homo sapiens__NP_000448.3__HNF4A(1-375)(S87A)
  source 1..1376: mol_type = other RNA
aggagagtcccgcagtcggcgtccagcggctctgcttgttcgtgtgtgtgtcgttgcaggccttattcaagcttaccatgagactgagcaagaccctggtggacatggacatggccgactacagcgccgccctggaccccgcctacaccaccctggagttcgagaacgtgcaggtgctgaccatgggcaacgacaccagccccagcgagggcaccaacctgaacgcccccaacagcctgggcgtgagcgccctgtgcgccatctgcggcgacagagccaccggcaagcactacggcgccagcagctgcgacggctgcaagggcttcttcagaagagccgtgagaaagaaccacatgtacagctgcagattcagcagacagtgcgtggtggacaaggacaagagaaaccagtgcagatactgcagactgaagaagtgcttcagagccggcatgaagaaggaggccgtgcagaacgagagagacagaatcagcaccagaagaagcagctacgaggacagcagcctgcccagcatcaacgccctgctgcaggccgaggtgctgagcagacagatcaccagccccgtgagcggcatcaacggcgacatcagagccaagaagatcgccagcatcgccgacgtgtgcgagagcatgaaggagcagctgctggtgctggtggagtgggccaagtacatccccgccttctgcgagctgcccctggacgaccaggtggccctgctgagagcccacgccggcgagcacctgctgctgggcgccaccaagagaagcatggtgttcaaggacgtgctgctgctgggcaacgactacatcgtgcccagacactgccccgagctggccgagatgagcagagtgagcatcagaatcctggacgagctggtgctgcccttccaggagctgcagatcgacgacaacgagtacgcctacctgaaggccatcatcttcttcgaccccgacgccaagggcctgagcgaccccggcaagatcaagagactgagaagccaggtgcaggtgagcctggaggactacatcaacgacagacagtacgacagcagaggcagattcggcgagctgctgctgctgctgcccaccctgcagagcatcacctggcagatgatcgagcagatccagttcatcaagctgttcggcatggccaagatcgacaacctgctgcaggagatgctgctgtgaggactagtccctgttcccagagcccacttttttttctttttttgaaataaaatagcctgtctttcagatctaaaaaaaaaaaaaaaaaaaaaaaaaaaaaaaaaaaaaaaaaaaaaaaaaaaaaaaaaaaaaaaaaaaaaaaaaaaaaaaaaaaaaaaaaaaaaaaaaaaa

SEQ ID NO: 4887 - RNA, 1376 nt, synthetic construct
  misc_feature 1..1376: note = mRNA a-1 (A100) (opt4) from Homo sapiens__NP_000448.3__HNF4A(1-375)(S87E)
  source 1..1376: mol_type = other RNA
aggagagtcccgcagtcggcgtccagcggctctgcttgttcgtgtgtgtgtcgttgcaggccttattcaagcttaccatgagactgagcaagaccctggtggacatggacatggccgactacagcgccgccctggaccccgcctacaccaccctggagttcgagaacgtgcaggtgctgaccatgggcaacgacaccagccccagcgagggcaccaacctgaacgcccccaacagcctgggcgtgagcgccctgtgcgccatctgcggcgacagagccaccggcaagcactacggcgccagcagctgcgacggctgcaagggcttcttcagaagagaggtgagaaagaaccacatgtacagctgcagattcagcagacagtgcgtggtggacaaggacaagagaaaccagtgcagatactgcagactgaagaagtgcttcagagccggcatgaagaaggaggccgtgcagaacgagagagacagaatcagcaccagaagaagcagctacgaggacagcagcctgcccagcatcaacgccctgctgcaggccgaggtgctgagcagacagatcaccagccccgtgagcggcatcaacggcgacatcagagccaagaagatcgccagcatcgccgacgtgtgcgagagcatgaaggagcagctgctggtgctggtggagtgggccaagtacatccccgccttctgcgagctgcccctggacgaccaggtggccctgctgagagcccacgccggcgagcacctgctgctgggcgccaccaagagaagcatggtgttcaaggacgtgctgctgctgggcaacgactacatcgtgcccagacactgccccgagctggccgagatgagcagagtgagcatcagaatcctggacgagctggtgctgcccttccaggagctgcagatcgacgacaacgagtacgcctacctgaaggccatcatcttcttcgaccccgacgccaagggcctgagcgaccccggcaagatcaagagactgagaagccaggtgcaggtgagcctggaggactacatcaacgacagacagtacgacagcagaggcagattcggcgagctgctgctgctgctgcccaccctgcagagcatcacctggcagatgatcgagcagatccagttcatcaagctgttcggcatggccaagatcgacaacctgctgcaggagatgctgctgtgaggactagtccctgttcccagagcccacttttttttctttttttgaaataaaatagcctgtctttcagatctaaaaaaaaaaaaaaaaaaaaaaaaaaaaaaaaaaaaaaaaaaaaaaaaaaaaaaaaaaaaaaaaaaaaaaaaaaaaaaaaaaaaaaaaaaaaaaaaaaaa

SEQ ID NO: 4888 - RNA, 1376 nt, synthetic construct
  misc_feature 1..1376: note = mRNA a-1 (A100) (opt4) from Homo sapiens__NP_000448.3__HNF4A(1-375)(R2V)
  source 1..1376: mol_type = other RNA
aggagagtcccgcagtcggcgtccagcggctctgcttgttcgtgtgtgtgtcgttgcaggccttattcaagcttaccatggtgctgagcaagaccctggtggacatggacatggccgactacagcgccgccctggaccccgcctacaccaccctggagttcgagaacgtgcaggtgctgaccatgggcaacgacaccagccccagcgagggcaccaacctgaacgcccccaacagcctgggcgtgagcgccctgtgcgccatctgcggcgacagagccaccggcaagcactacggcgccagcagctgcgacggctgcaagggcttcttcagaagaagcgtgagaaagaaccacatgtacagctgcagattcagcagacagtgcgtggtggacaaggacaagagaaaccagtgcagatactgcagactgaagaagtgcttcagagccggcatgaagaaggaggccgtgcagaacgagagagacagaatcagcaccagaagaagcagctacgaggacagcagcctgcccagcatcaacgccctgctgcaggccgaggtgctgagcagacagatcaccagccccgtgagcggcatcaacggcgacatcagagccaagaagatcgccagcatcgccgacgtgtgcgagagcatgaaggagcagctgctggtgctggtggagtgggccaagtacatccccgccttctgcgagctgcccctggacgaccaggtggccctgctgagagcccacgccggcgagcacctgctgctgggcgccaccaagagaagcatggtgttcaaggacgtgctgctgctgggcaacgactacatcgtgcccagacactgccccgagctggccgagatgagcagagtgagcatcagaatcctggacgagctggtgctgcccttccaggagctgcagatcgacgacaacgagtacgcctacctgaaggccatcatcttcttcgaccccgacgccaagggcctgagcgaccccggcaagatcaagagactgagaagccaggtgcaggtgagcctggaggactacatcaacgacagacagtacgacagcagaggcagattcggcgagctgctgctgctgctgcccaccctgcagagcatcacctggcagatgatcgagcagatccagttcatcaagctgttcggcatggccaagatcgacaacctgctgcaggagatgctgctgtgaggactagtccctgttcccagagcccacttttttttctttttttgaaataaaatagcctgtctttcagatctaaaaaaaaaaaaaaaaaaaaaaaaaaaaaaaaaaaaaaaaaaaaaaaaaaaaaaaaaaaaaaaaaaaaaaaaaaaaaaaaaaaaaaaaaaaaaaaaaaaa

SEQ ID NO: 4889 - RNA, 1376 nt, synthetic construct
  misc_feature 1..1376: note = mRNA a-1 (A100) (opt4) from Homo sapiens__NP_000448.3__HNF4A(1-375)(R2V_K5V)
  source 1..1376: mol_type = other RNA
aggagagtcccgcagtcggcgtccagcggctctgcttgttcgtgtgtgtgtcgttgcaggccttattcaagcttaccatggtgctgagcgtgaccctggtggacatggacatggccgactacagcgccgccctggaccccgcctacaccaccctggagttcgagaacgtgcaggtgctgaccatgggcaacgacaccagccccagcgagggcaccaacctgaacgcccccaacagcctgggcgtgagcgccctgtgcgccatctgcggcgacagagccaccggcaagcactacggcgccagcagctgcgacggctgcaagggcttcttcagaagaagcgtgagaaagaaccacatgtacagctgcagattcagcagacagtgcgtggtggacaaggacaagagaaaccagtgcagatactgcagactgaagaagtgcttcagagccggcatgaagaaggaggccgtgcagaacgagagagacagaatcagcaccagaagaagcagctacgaggacagcagcctgcccagcatcaacgccctgctgcaggccgaggtgctgagcagacagatcaccagccccgtgagcggcatcaacggcgacatcagagccaagaagatcgccagcatcgccgacgtgtgcgagagcatgaaggagcagctgctggtgctggtggagtgggccaagtacatccccgccttctgcgagctgcccctggacgaccaggtggccctgctgagagcccacgccggcgagcacctgctgctgggcgccaccaagagaagcatggtgttcaaggacgtgctgctgctgggcaacgactacatcgtgcccagacactgccccgagctggccgagatgagcagagtgagcatcagaatcctggacgagctggtgctgcccttccaggagctgcagatcgacgacaacgagtacgcctacctgaaggccatcatcttcttcgaccccgacgccaagggcctgagcgaccccggcaagatcaagagactgagaagccaggtgcaggtgagcctggaggactacatcaacgacagacagtacgacagcagaggcagattcggcgagctgctgctgctgctgcccaccctgcagagcatcacctggcagatgatcgagcagatccagttcatcaagctgttcggcatggccaagatcgacaacctgctgcaggagatgctgctgtgaggactagtccctgttcccagagcccacttttttttctttttttgaaataaaatagcctgtctttcagatctaaaaaaaaaaaaaaaaaaaaaaaaaaaaaaaaaaaaaaaaaaaaaaaaaaaaaaaaaaaaaaaaaaaaaaaaaaaaaaaaaaaaaaaaaaaaaaaaaaaa

SEQ ID NO: 4890 - RNA, 1376 nt, synthetic construct
  misc_feature 1..1376: note = mRNA a-1 (A100) (opt4) from Homo sapiens__NP_000448.3__HNF4A(1-375)(K179R_K180R)
  source 1..1376: mol_type = other RNA
aggagagtcccgcagtcggcgtccagcggctctgcttgttcgtgtgtgtgtcgttgcaggccttattcaagcttaccatgagactgagcaagaccctggtggacatggacatggccgactacagcgccgccctggaccccgcctacaccaccctggagttcgagaacgtgcaggtgctgaccatgggcaacgacaccagccccagcgagggcaccaacctgaacgcccccaacagcctgggcgtgagcgccctgtgcgccatctgcggcgacagagccaccggcaagcactacggcgccagcagctgcgacggctgcaagggcttcttcagaagaagcgtgagaaagaaccacatgtacagctgcagattcagcagacagtgcgtggtggacaaggacaagagaaaccagtgcagatactgcagactgaagaagtgcttcagagccggcatgaagaaggaggccgtgcagaacgagagagacagaatcagcaccagaagaagcagctacgaggacagcagcctgcccagcatcaacgccctgctgcaggccgaggtgctgagcagacagatcaccagccccgtgagcggcatcaacggcgacatcagagccagaagaatcgccagcatcgccgacgtgtgcgagagcatgaaggagcagctgctggtgctggtggagtgggccaagtacatccccgccttctgcgagctgcccctggacgaccaggtggccctgctgagagcccacgccggcgagcacctgctgctgggcgccaccaagagaagcatggtgttcaaggacgtgctgctgctgggcaacgactacatcgtgcccagacactgccccgagctggccgagatgagcagagtgagcatcagaatcctggacgagctggtgctgcccttccaggagctgcagatcgacgacaacgagtacgcctacctgaaggccatcatcttcttcgaccccgacgccaagggcctgagcgaccccggcaagatcaagagactgagaagccaggtgcaggtgagcctggaggactacatcaacgacagacagtacgacagcagaggcagattcggcgagctgctgctgctgctgcccaccctgcagagcatcacctggcagatgatcgagcagatccagttcatcaagctgttcggcatggccaagatcgacaacctgctgcaggagatgctgctgtgaggactagtccctgttcccagagcccacttttttttctttttttgaaataaaatagcctgtctttcagatctaaaaaaaaaaaaaaaaaaaaaaaaaaaaaaaaaaaaaaaaaaaaaaaaaaaaaaaaaaaaaaaaaaaaaaaaaaaaaaaaaaaaaaaaaaaaaaaaaaaa

SEQ ID NO: 4891 - RNA, 1376 nt, synthetic construct
  misc_feature 1..1376: note = mRNA a-1 (A100) (opt4) from Homo sapiens__NP_000448.3__HNF4A(1-375)(K234R)
  source 1..1376: mol_type = other RNA
aggagagtcccgcagtcggcgtccagcggctctgcttgttcgtgtgtgtgtcgttgcaggccttattcaagcttaccatgagactgagcaagaccctggtggacatggacatggccgactacagcgccgccctggaccccgcctacaccaccctggagttcgagaacgtgcaggtgctgaccatgggcaacgacaccagccccagcgagggcaccaacctgaacgcccccaacagcctgggcgtgagcgccctgtgcgccatctgcggcgacagagccaccggcaagcactacggcgccagcagctgcgacggctgcaagggcttcttcagaagaagcgtgagaaagaaccacatgtacagctgcagattcagcagacagtgcgtggtggacaaggacaagagaaaccagtgcagatactgcagactgaagaagtgcttcagagccggcatgaagaaggaggccgtgcagaacgagagagacagaatcagcaccagaagaagcagctacgaggacagcagcctgcccagcatcaacgccctgctgcaggccgaggtgctgagcagacagatcaccagccccgtgagcggcatcaacggcgacatcagagccaagaagatcgccagcatcgccgacgtgtgcgagagcatgaaggagcagctgctggtgctggtggagtgggccaagtacatccccgccttctgcgagctgcccctggacgaccaggtggccctgctgagagcccacgccggcgagcacctgctgctgggcgccaccagaagaagcatggtgttcaaggacgtgctgctgctgggcaacgactacatcgtgcccagacactgccccgagctggccgagatgagcagagtgagcatcagaatcctggacgagctggtgctgcccttccaggagctgcagatcgacgacaacgagtacgcctacctgaaggccatcatcttcttcgaccccgacgccaagggcctgagcgaccccggcaagatcaagagactgagaagccaggtgcaggtgagcctggaggactacatcaacgacagacagtacgacagcagaggcagattcggcgagctgctgctgctgctgcccaccctgcagagcatcacctggcagatgatcgagcagatccagttcatcaagctgttcggcatggccaagatcgacaacctgctgcaggagatgctgctgtgaggactagtccctgttcccagagcccacttttttttctttttttgaaataaaatagcctgtctttcagatctaaaaaaaaaaaaaaaaaaaaaaaaaaaaaaaaaaaaaaaaaaaaaaaaaaaaaaaaaaaaaaaaaaaaaaaaaaaaaaaaaaaaaaaaaaaaaaaaaaaa

SEQ ID NO: 4892 - RNA, 1376 nt, synthetic construct
  misc_feature 1..1376: note = mRNA a-1 (A100) (opt4) from Homo sapiens__NP_000448.3__HNF4A(1-375)(K300R)
  source 1..1376: mol_type = other RNA
aggagagtcccgcagtcggcgtccagcggctctgcttgttcgtgtgtgtgtcgttgcaggccttattcaagcttaccatgagactgagcaagaccctggtggacatggacatggccgactacagcgccgccctggaccccgcctacaccaccctggagttcgagaacgtgcaggtgctgaccatgggcaacgacaccagccccagcgagggcaccaacctgaacgcccccaacagcctgggcgtgagcgccctgtgcgccatctgcggcgacagagccaccggcaagcactacggcgccagcagctgcgacggctgcaagggcttcttcagaagaagcgtgagaaagaaccacatgtacagctgcagattcagcagacagtgcgtggtggacaaggacaagagaaaccagtgcagatactgcagactgaagaagtgcttcagagccggcatgaagaaggaggccgtgcagaacgagagagacagaatcagcaccagaagaagcagctacgaggacagcagcctgcccagcatcaacgccctgctgcaggccgaggtgctgagcagacagatcaccagccccgtgagcggcatcaacggcgacatcagagccaagaagatcgccagcatcgccgacgtgtgcgagagcatgaaggagcagctgctggtgctggtggagtgggccaagtacatccccgccttctgcgagctgcccctggacgaccaggtggccctgctgagagcccacgccggcgagcacctgctgctgggcgccaccaagagaagcatggtgttcaaggacgtgctgctgctgggcaacgactacatcgtgcccagacactgccccgagctggccgagatgagcagagtgagcatcagaatcctggacgagctggtgctgcccttccaggagctgcagatcgacgacaacgagtacgcctacctgaaggccatcatcttcttcgaccccgacgccagaggcctgagcgaccccggcaagatcaagagactgagaagccaggtgcaggtgagcctggaggactacatcaacgacagacagtacgacagcagaggcagattcggcgagctgctgctgctgctgcccaccctgcagagcatcacctggcagatgatcgagcagatccagttcatcaagctgttcggcatggccaagatcgacaacctgctgcaggagatgctgctgtgaggactagtccctgttcccagagcccacttttttttctttttttgaaataaaatagcctgtctttcagatctaaaaaaaaaaaaaaaaaaaaaaaaaaaaaaaaaaaaaaaaaaaaaaaaaaaaaaaaaaaaaaaaaaaaaaaaaaaaaaaaaaaaaaaaaaaaaaaaaaaa

SEQ ID NO: 4893 - RNA, 1376 nt, synthetic construct
  misc_feature 1..1376: note = mRNA a-1 (A100) (opt4) from Homo sapiens__NP_000448.3__HNF4A(1-375)(K300R_K307R_K309R)
  source 1..1376: mol_type = other RNA
aggagagtcccgcagtcggcgtccagcggctctgcttgttcgtgtgtgtgtcgttgcaggccttattcaagcttaccatgagactgagcaagaccctggtggacatggacatggccgactacagcgccgccctggaccccgcctacaccaccctggagttcgagaacgtgcaggtgctgaccatgggcaacgacaccagccccagcgagggcaccaacctgaacgcccccaacagcctgggcgtgagcgccctgtgcgccatctgcggcgacagagccaccggcaagcactacggcgccagcagctgcgacggctgcaagggcttcttcagaagaagcgtgagaaagaaccacatgtacagctgcagattcagcagacagtgcgtggtggacaaggacaagagaaaccagtgcagatactgcagactgaagaagtgcttcagagccggcatgaagaaggaggccgtgcagaacgagagagacagaatcagcaccagaagaagcagctacgaggacagcagcctgcccagcatcaacgccctgctgcaggccgaggtgctgagcagacagatcaccagccccgtgagcggcatcaacggcgacatcagagccaagaagatcgccagcatcgccgacgtgtgcgagagcatgaaggagcagctgctggtgctggtggagtgggccaagtacatccccgccttctgcgagctgcccctggacgaccaggtggccctgctgagagcccacgccggcgagcacctgctgctgggcgccaccaagagaagcatggtgttcaaggacgtgctgctgctgggcaacgactacatcgtgcccagacactgccccgagctggccgagatgagcagagtgagcatcagaatcctggacgagctggtgctgcccttccaggagctgcagatcgacgacaacgagtacgcctacctgaaggccatcatcttcttcgaccccgacgccagaggcctgagcgaccccggcagaatcagaagactgagaagccaggtgcaggtgagcctggaggactacatcaacgacagacagtacgacagcagaggcagattcggcgagctgctgctgctgctgcccaccctgcagagcatcacctggcagatgatcgagcagatccagttcatcaagctgttcggcatggccaagatcgacaacctgctgcaggagatgctgctgtgaggactagtccctgttcccagagcccacttttttttctttttttgaaataaaatagcctgtctttcagatctaaaaaaaaaaaaaaaaaaaaaaaaaaaaaaaaaaaaaaaaaaaaaaaaaaaaaaaaaaaaaaaaaaaaaaaaaaaaaaaaaaaaaaaaaaaaaaaaaaaa

SEQ ID NO: 4894 - RNA, 1376 nt, synthetic construct; identical to SEQ ID NO: 4875
  misc_feature 1..1376: note = mRNA a-1 (A100) (opt4) from Homo sapiens__NP_000448.3__HNF4A(1-375)(K447R_K470R)
  source 1..1376: mol_type = other RNA

SEQ ID NO: 4895 - RNA, 1376 nt, synthetic construct; identical to SEQ ID NO: 4875
  misc_feature 1..1376: note = mRNA a-1 (A100) (opt4) from Homo sapiens__NP_000448.3__HNF4A(1-375)(K458R)
  source 1..1376: mol_type = other RNA

SEQ ID NO: 4896 - RNA, 1376 nt, synthetic construct
  misc_feature 1..1376: note = mRNA a-1 (A100) (opt4) from Homo sapiens__NP_000448.3__HNF4A(1-375)(K106R_K108R_K126R_K127R)
  source 1..1376: mol_type = other RNA
aggagagtcccgcagtcggcgtccagcggctctgcttgttcgtgtgtgtgtcgttgcaggccttattcaagcttaccatgagactgagcaagaccctggtggacatggacatggccgactacagcgccgccctggaccccgcctacaccaccctggagttcgagaacgtgcaggtgctgaccatgggcaacgacaccagccccagcgagggcaccaacctgaacgcccccaacagcctgggcgtgagcgccctgtgcgccatctgcggcgacagagccaccggcaagcactacggcgccagcagctgcgacggctgcaagggcttcttcagaagaagcgtgagaaagaaccacatgtacagctgcagattcagcagacagtgcgtggtggacagagacagaagaaaccagtgcagatactgcagactgaagaagtgcttcagagccggcatgagaagagaggccgtgcagaacgagagagacagaatcagcaccagaagaagcagctacgaggacagcagcctgcccagcatcaacgccctgctgcaggccgaggtgctgagcagacagatcaccagccccgtgagcggcatcaacggcgacatcagagccaagaagatcgccagcatcgccgacgtgtgcgagagcatgaaggagcagctgctggtgctggtggagtgggccaagtacatccccgccttctgcgagctgcccctggacgaccaggtggccctgctgagagcccacgccggcgagcacctgctgctgggcgccaccaagagaagcatggtgttcaaggacgtgctgctgctgggcaacgactacatcgtgcccagacactgccccgagctggccgagatgagcagagtgagcatcagaatcctggacgagctggtgctgcccttccaggagctgcagatcgacgacaacgagtacgcctacctgaaggccatcatcttcttcgaccccgacgccaagggcctgagcgaccccggcaagatcaagagactgagaagccaggtgcaggtgagcctggaggactacatcaacgacagacagtacgacagcagaggcagattcggcgagctgctgctgctgctgcccaccctgcagagcatcacctggcagatgatcgagcagatccagttcatcaagctgttcggcatggccaagatcgacaacctgctgcaggagatgctgctgtgaggactagtccctgttcccagagcccacttttttttctttttttgaaataaaatagcctgtctttcagatctaaaaaaaaaaaaaaaaaaaaaaaaaaaaaaaaaaaaaaaaaaaaaaaaaaaaaaaaaaaaaaaaaaaaaaaaaaaaaaaaaaaaaaaaaaaaaaaaaaaa

SEQ ID NO: 4897 - RNA, 1376 nt, synthetic construct
  misc_feature 1..1376: note = mRNA a-1 (A100) (opt4) from Homo sapiens__NP_000448.3__HNF4A(1-375)(E285Q)
  source 1..1376: mol_type = other RNA
aggagagtcccgcagtcggcgtccagcggctctgcttgttcgtgtgtgtgtcgttgcaggccttattcaagcttaccatgagactgagcaagaccctggtggacatggacatggccgactacagcgccgccctggaccccgcctacaccaccctggagttcgagaacgtgcaggtgctgaccatgggcaacgacaccagccccagcgagggcaccaacctgaacgcccccaacagcctgggcgtgagcgccctgtgcgccatctgcggcgacagagccaccggcaagcactacggcgccagcagctgcgacggctgcaagggcttcttcagaagaagcgtgagaaagaaccacatgtacagctgcagattcagcagacagtgcgtggtggacaaggacaagagaaaccagtgcagatactgcagactgaagaagtgcttcagagccggcatgaagaaggaggccgtgcagaacgagagagacagaatcagcaccagaagaagcagctacgaggacagcagcctgcccagcatcaacgccctgctgcaggccgaggtgctgagcagacagatcaccagccccgtgagcggcatcaacggcgacatcagagccaagaagatcgccagcatcgccgacgtgtgcgagagcatgaaggagcagctgctggtgctggtggagtgggccaagtacatccccgccttctgcgagctgcccctggacgaccaggtggccctgctgagagcccacgccggcgagcacctgctgctgggcgccaccaagagaagcatggtgttcaaggacgtgctgctgctgggcaacgactacatcgtgcccagacactgccccgagctggccgagatgagcagagtgagcatcagaatcctggacgagctggtgctgcccttccaggagctgcagatcgacgacaaccagtacgcctacctgaaggccatcatcttcttcgaccccgacgccaagggcctgagcgaccccggcaagatcaagagactgagaagccaggtgcaggtgagcctggaggactacatcaacgacagacagtacgacagcagaggcagattcggcgagctgctgctgctgctgcccaccctgcagagcatcacctggcagatgatcgagcagatccagttcatcaagctgttcggcatggccaagatcgacaacctgctgcaggagatgctgctgtgaggactagtccctgttcccagagcccacttttttttctttttttgaaataaaatagcctgtctttcagatctaaaaaaaaaaaaaaaaaaaaaaaaaaaaaaaaaaaaaaaaaaaaaaaaaaaaaaaaaaaaaaaaaaaaaaaaaaaaaaaaaaaaaaaaaaaaaaaaaaaa

SEQ ID NO: 4898 - RNA, 1376 nt, synthetic construct
  misc_feature 1..1376: note = mRNA a-1 (A100) (opt4) from Homo sapiens__NP_000448.3__HNF4A(1-375)(T166E)
  source 1..1376: mol_type = other RNA
aggagagtcccgcagtcggcgtccagcggctctgcttgttcgtgtgtgtgtcgttgcaggccttattcaagcttaccatgagactgagcaagaccctggtggacatggacatggccgactacagcgccgccctggaccccgcctacaccaccctggagttcgagaacgtgcaggtgctgaccatgggcaacgacaccagccccagcgagggcaccaacctgaacgcccccaacagcctgggcgtgagcgccctgtgcgccatctgcggcgacagagccaccggcaagcactacggcgccagcagctgcgacggctgcaagggcttcttcagaagaagcgtgagaaagaaccacatgtacagctgcagattcagcagacagtgcgtggtggacaaggacaagagaaaccagtgcagatactgcagactgaagaagtgcttcagagccggcatgaagaaggaggccgtgcagaacgagagagacagaatcagcaccagaagaagcagctacgaggacagcagcctgcccagcatcaacgccctgctgcaggccgaggtgctgagcagacagatcgagagccccgtgagcggcatcaacggcgacatcagagccaagaagatcgccagcatcgccgacgtgtgcgagagcatgaaggagcagctgctggtgctggtggagtgggccaagtacatccccgccttctgcgagctgcccctggacgaccaggtggccctgctgagagcccacgccggcgagcacctgctgctgggcgccaccaagagaagcatggtgttcaaggacgtgctgctgctgggcaacgactacatcgtgcccagacactgccccgagctggccgagatgagcagagtgagcatcagaatcctggacgagctggtgctgcccttccaggagctgcagatcgacgacaacgagtacgcctacctgaaggccatcatcttcttcgaccccgacgccaagggcctgagcgaccccggcaagatcaagagactgagaagccaggtgcaggtgagcctggaggactacatcaacgacagacagtacgacagcagaggcagattcggcgagctgctgctgctgctgcccaccctgcagagcatcacctggcagatgatcgagcagatccagttcatcaagctgttcggcatggccaagatcgacaacctgctgcaggagatgctgctgtgaggactagtccctgttcccagagcccacttttttttctttttttgaaataaaatagcctgtctttcagatctaaaaaaaaaaaaaaaaaaaaaaaaaaaaaaaaaaaaaaaaaaaaaaaaaaaaaaaaaaaaaaaaaaaaaaaaaaaaaaaaaaaaaaaaaaaaaaaaaaaa

SEQ ID NO: 4899 - RNA, 1376 nt, synthetic construct
  misc_feature 1..1376: note = mRNA a-1 (A100) (opt4) from Homo sapiens__NP_000448.3__HNF4A(1-375)(S148A)
  source 1..1376: mol_type = other RNA
aggagagtcccgcagtcggcgtccagcggctctgcttgttcgtgtgtgtgtcgttgcaggccttattcaagcttaccatgagactgagcaagaccctggtggacatggacatggccgactacagcgccgccctggaccccgcctacaccaccctggagttcgagaacgtgcaggtgctgaccatgggcaacgacaccagccccagcgagggcaccaacctgaacgcccccaacagcctgggcgtgagcgccctgtgcgccatctgcggcgacagagccaccggcaagcactacggcgccagcagctgcgacggctgcaagggcttcttcagaagaagcgtgagaaagaaccacatgtacagctgcagattcagcagacagtgcgtggtggacaaggacaagagaaaccagtgcagatactgcagactgaagaagtgcttcagagccggcatgaagaaggaggccgtgcagaacgagagagacagaatcagcaccagaagaagcagctacgaggacagcgccctgcccagcatcaacgccctgctgcaggccgaggtgctgagcagacagatcaccagccccgtgagcggcatcaacggcgacatcagagccaagaagatcgccagcatcgccgacgtgtgcgagagcatgaaggagcagctgctggtgctggtggagtgggccaagtacatccccgccttctgcgagctgcccctggacgaccaggtggccctgctgagagcccacgccggcgagcacctgctgctgggcgccaccaagagaagcatggtgttcaaggacgtgctgctgctgggcaacgactacatcgtgcccagacactgccccgagctggccgagatgagcagagtgagcatcagaatcctggacgagctggtgctgcccttccaggagctgcagatcgacgacaacgagtacgcctacctgaaggccatcatcttcttcgaccccgacgccaagggcctgagcgaccccggcaagatcaagagactgagaagccaggtgcaggtgagcctggaggactacatcaacgacagacagtacgacagcagaggcagattcggcgagctgctgctgctgctgcccaccctgcagagcatcacctggcagatgatcgagcagatccagttcatcaagctgttcggcatggccaagatcgacaacctgctgcaggagatgctgctgtgaggactagtccctgttcccagagcccacttttttttctttttttgaaataaaatagcctgtctttcagatctaaaaaaaaaaaaaaaaaaaaaaaaaaaaaaaaaaaaaaaaaaaaaaaaaaaaaaaaaaaaaaaaaaaaaaaaaaaaaaaaaaaaaaaaaaaaaaaaaaaa

SEQ ID NO: 4900 - RNA, 1376 nt, synthetic construct
  misc_feature 1..1376: note = mRNA a-1 (A100) (opt4) from Homo sapiens__NP_000448.3__HNF4A(1-375)(S148E)
  source 1..1376: mol_type = other RNA
aggagagtcccgcagtcggcgtccagcggctctgcttgttcgtgtgtgtgtcgttgcaggccttattcaagcttaccatgagactgagcaagaccctggtggacatggacatggccgactacagcgccgccctggaccccgcctacaccaccctggagttcgagaacgtgcaggtgctgaccatgggcaacgacaccagccccagcgagggcaccaacctgaacgcccccaacagcctgggcgtgagcgccctgtgcgccatctgcggcgacagagccaccggcaagcactacggcgccagcagctgcgacggctgcaagggcttcttcagaagaagcgtgagaaagaaccacatgtacagctgcagattcagcagacagtgcgtggtggacaaggacaagagaaaccagtgcagatactgcagactgaagaagtgcttcagagccggcatgaagaaggaggccgtgcagaacgagagagacagaatcagcaccagaagaagcagctacgaggacagcgagctgcccagcatcaacgccctgctgcaggccgaggtgctgagcagacagatcaccagccccgtgagcggcatcaacggcgacatcagagccaagaagatcgccagcatcgccgacgtgtgcgagagcatgaaggagcagctgctggtgctggtggagtgggccaagtacatccccgccttctgcgagctgcccctggacgaccaggtggccctgctgagagcccacgccggcgagcacctgctgctgggcgccaccaagagaagcatggtgttcaaggacgtgctgctgctgggcaacgactacatcgtgcccagacactgccccgagctggccgagatgagcagagtgagcatcagaatcctggacgagctggtgctgcccttccaggagctgcagatcgacgacaacgagtacgcctacctgaaggccatcatcttcttcgaccccgacgccaagggcctgagcgaccccggcaagatcaagagactgagaagccaggtgcaggtgagcctggaggactacatcaacgacagacagtacgacagcagaggcagattcggcgagctgctgctgctgctgcccaccctgcagagcatcacctggcagatgatcgagcagatccagttcatcaagctgttcggcatggccaagatcgacaacctgctgcaggagatgctgctgtgaggactagtccctgttcccagagcccacttttttttctttttttgaaataaaatagcctgtctttcagatctaaaaaaaaaaaaaaaaaaaaaaaaaaaaaaaaaaaaaaaaaaaaaaaaaaaaaaaaaaaaaaaaaaaaaaaaaaaaaaaaaaaaaaaaaaaaaaaaaaaa

SEQ ID NO: 4901 - RNA, 1376 nt, synthetic construct
  misc_feature 1..1376: note = mRNA a-1 (A100) (opt4) from Homo sapiens__NP_000448.3__HNF4A(1-375)(S183A)
  source 1..1376: mol_type = other RNA
aggagagtcccgcagtcggcgtccagcggctctgcttgttcgtgtgtgtgtcgttgcaggccttattcaagcttaccatgagactgagcaagaccctggtggacatggacatggccgactacagcgccgccctggaccccgcctacaccaccctggagttcgagaacgtgcaggtgctgaccatgggcaacgacaccagccccagcgagggcaccaacctgaacgcccccaacagcctgggcgtgagcgccctgtgcgccatctgcggcgacagagccaccggcaagcactacggcgccagcagctgcgacggctgcaagggcttcttcagaagaagcgtgagaaagaaccacatgtacagctgcagattcagcagacagtgcgtggtggacaaggacaagagaaaccagtgcagatactgcagactgaagaagtgcttcagagccggcatgaagaaggaggccgtgcagaacgagagagacagaatcagcaccagaagaagcagctacgaggacagcagcctgcccagcatcaacgccctgctgcaggccgaggtgctgagcagacagatcaccagccccgtgagcggcatcaacggcgacatcagagccaagaagatcgccgccatcgccgacgtgtgcgagagcatgaaggagcagctgctggtgctggtggagtgggccaagtacatccccgccttctgcgagctgcccctggacgaccaggtggccctgctgagagcccacgccggcgagcacctgctgctgggcgccaccaagagaagcatggtgttcaaggacgtgctgctgctgggcaacgactacatcgtgcccagacactgccccgagctggccgagatgagcagagtgagcatcagaatcctggacgagctggtgctgcccttccaggagctgcagatcgacgacaacgagtacgcctacctgaaggccatcatcttcttcgaccccgacgccaagggcctgagcgaccccggcaagatcaagagactgagaagccaggtgcaggtgagcctggaggactacatcaacgacagacagtacgacagcagaggcagattcggcgagctgctgctgctgctgcccaccctgcagagcatcacctggcagatgatcgagcagatccagttcatcaagctgttcggcatggccaagatcgacaacctgctgcaggagatgctgctgtgaggactagtccctgttcccagagcccacttttttttctttttttgaaataaaatagcctgtctttcagatctaaaaaaaaaaaaaaaaaaaaaaaaaaaaaaaaaaaaaaaaaaaaaaaaaaaaaaaaaaaaaaaaaaaaaaaaaaaaaaaaaaaaaaaaaaaaaaaaaaaa

SEQ ID NO: 4902 - RNA, 1376 nt, synthetic construct
  misc_feature 1..1376: note = mRNA a-1 (A100) (opt4) from Homo sapiens__NP_000448.3__HNF4A(1-375)(S183E)
  source 1..1376: mol_type = other RNA
aggagagtcccgcagtcggcgtccagcggctctgcttgttcgtgtgtgtgtcgttgcaggccttattcaagcttaccatgagactgagcaagaccctggtggacatggacatggccgactacagcgccgccctggaccccgcctacaccaccctggagttcgagaacgtgcaggtgctgaccatgggcaacgacaccagccccagcgagggcaccaacctgaacgcccccaacagcctgggcgtgagcgccctgtgcgccatctgcggcgacagagccaccggcaagcactacggcgccagcagctgcgacggctgcaagggcttcttcagaagaagcgtgagaaagaaccacatgtacagctgcagattcagcagacagtgcgtggtggacaaggacaagagaaaccagtgcagatactgcagactgaagaagtgcttcagagccggcatgaagaaggaggccgtgcagaacgagagagacagaatcagcaccagaagaagcagctacgaggacagcagcctgcccagcatcaacgccctgctgcaggccgaggtgctgagcagacagatcaccagccccgtgagcggcatcaacggcgacatcagagccaagaagatcgccgagatcgccgacgtgtgcgagagcatgaaggagcagctgctggtgctggtggagtgggccaagtacatccccgccttctgcgagctgcccctggacgaccaggtggccctgctgagagcccacgccggcgagcacctgctgctgggcgccaccaagagaagcatggtgttcaaggacgtgctgctgctgggcaacgactacatcgtgcccagacactgccccgagctggccgagatgagcagagtgagcatcagaatcctggacgagctggtgctgcccttccaggagctgcagatcgacgacaacgagtacgcctacctgaaggccatcatcttcttcgaccccgacgccaagggcctgagcgaccccggcaagatcaagagactgagaagccaggtgcaggtgagcctggaggactacatcaacgacagacagtacgacagcagaggcagattcggcgagctgctgctgctgctgcccaccctgcagagcatcacctggcagatgatcgagcagatccagttcatcaagctgttcggcatggccaagatcgacaacctgctgcaggagatgctgctgtgaggactagtccctgttcccagagcccacttttttttctttttttgaaataaaatagcctgtctttcagatctaaaaaaaaaaaaaaaaaaaaaaaaaaaaaaaaaaaaaaaaaaaaaaaaaaaaaaaaaaaaaaaaaaaaaaaaaaaaaaaaaaaaaaaaaaaaaaaaaaaa

SEQ ID NO: 4903 - RNA, 1376 nt, synthetic construct; identical to SEQ ID NO: 4875
  misc_feature 1..1376: note = mRNA a-1 (A100) (opt4) from Homo sapiens__NP_000448.3__HNF4A(1-375)(S461A)
  source 1..1376: mol_type = other RNA

SEQ ID NO: 4904 - RNA, 1376 nt, synthetic construct; identical to SEQ ID NO: 4875
  misc_feature 1..1376: note = mRNA a-1 (A100) (opt4) from Homo sapiens__NP_000448.3__HNF4A(1-375)(S461E)
  source 1..1376: mol_type = other RNA

SEQ ID NO: 4905 - RNA, 1376 nt, synthetic construct
  misc_feature 1..1376: note = mRNA a-1 (A100) (opt4) from Homo sapiens__NP_000448.3__HNF4A(1-375)(S142A_S143A_S313A)
  source 1..1376: mol_type = other RNA
aggagagtcccgcagtcggcgtccagcggctctgcttgttcgtgtgtgtgtcgttgcaggccttattcaagcttaccatgagactgagcaagaccctggtggacatggacatggccgactacagcgccgccctggaccccgcctacaccaccctggagttcgagaacgtgcaggtgctgaccatgggcaacgacaccagccccagcgagggcaccaacctgaacgcccccaacagcctgggcgtgagcgccctgtgcgccatctgcggcgacagagccaccggcaagcactacggcgccagcagctgcgacggctgcaagggcttcttcagaagaagcgtgagaaagaaccacatgtacagctgcagattcagcagacagtgcgtggtggacaaggacaagagaaaccagtgcagatactgcagactgaagaagtgcttcagagccggcatgaagaaggaggccgtgcagaacgagagagacagaatcagcaccagaagagccgcctacgaggacagcagcctgcccagcatcaacgccctgctgcaggccgaggtgctgagcagacagatcaccagccccgtgagcggcatcaacggcgacatcagagccaagaagatcgccagcatcgccgacgtgtgcgagagcatgaaggagcagctgctggtgctggtggagtgggccaagtacatccccgccttctgcgagctgcccctggacgaccaggtggccctgctgagagcccacgccggcgagcacctgctgctgggcgccaccaagagaagcatggtgttcaaggacgtgctgctgctgggcaacgactacatcgtgcccagacactgccccgagctggccgagatgagcagagtgagcatcagaatcctggacgagctggtgctgcccttccaggagctgcagatcgacgacaacgagtacgcctacctgaaggccatcatcttcttcgaccccgacgccaagggcctgagcgaccccggcaagatcaagagactgagagcccaggtgcaggtgagcctggaggactacatcaacgacagacagtacgacagcagaggcagattcggcgagctgctgctgctgctgcccaccctgcagagcatcacctggcagatgatcgagcagatccagttcatcaagctgttcggcatggccaagatcgacaacctgctgcaggagatgctgctgtgaggactagtccctgttcccagagcccacttttttttctttttttgaaataaaatagcctgtctttcagatctaaaaaaaaaaaaaaaaaaaaaaaaaaaaaaaaaaaaaaaaaaaaaaaaaaaaaaaaaaaaaaaaaaaaaaaaaaaaaaaaaaaaaaaaaaaaaaaaaaaa

SEQ ID NO: 4906 - RNA, 1376 nt, synthetic construct; identical to SEQ ID NO: 4905
  misc_feature 1..1376: note = mRNA a-1 (A100) (opt4) from Homo sapiens__NP_000448.3__HNF4A(1-375)(S142A_S143A_S313A_K458R)
  source 1..1376: mol_type = other RNA

SEQ ID NO: 4907 - RNA, 1376 nt, synthetic construct
  misc_feature 1..1376: note = mRNA a-1 (A100) (opt4) from Homo sapiens__NP_000448.3__HNF4A(1-375)(S142A_S143A_S167A_S313A_ S378A_T429A_T432A_S436A_K458R)
  source 1..1376: mol_type = other RNA
aggagagtcccgcagtcggcgtccagcggctctgcttgttcgtgtgtgtgtcgttgcaggccttattcaagcttaccatgagactgagcaagaccctggtggacatggacatggccgactacagcgccgccctggaccccgcctacaccaccctggagttcgagaacgtgcaggtgctgaccatgggcaacgacaccagccccagcgagggcaccaacctgaacgcccccaacagcctgggcgtgagcgccctgtgcgccatctgcggcgacagagccaccggcaagcactacggcgccagcagctgcgacggctgcaagggcttcttcagaagaagcgtgagaaagaaccacatgtacagctgcagattcagcagacagtgcgtggtggacaaggacaagagaaaccagtgcagatactgcagactgaagaagtgcttcagagccggcatgaagaaggaggccgtgcagaacgagagagacagaatcagcaccagaagagccgcctacgaggacagcagcctgcccagcatcaacgccctgctgcaggccgaggtgctgagcagacagatcaccgcccccgtgagcggcatcaacggcgacatcagagccaagaagatcgccagcatcgccgacgtgtgcgagagcatgaaggagcagctgctggtgctggtggagtgggccaagtacatccccgccttctgcgagctgcccctggacgaccaggtggccctgctgagagcccacgccggcgagcacctgctgctgggcgccaccaagagaagcatggtgttcaaggacgtgctgctgctgggcaacgactacatcgtgcccagacactgccccgagctggccgagatgagcagagtgagcatcagaatcctggacgagctggtgctgcccttccaggagctgcagatcgacgacaacgagtacgcctacctgaaggccatcatcttcttcgaccccgacgccaagggcctgagcgaccccggcaagatcaagagactgagagcccaggtgcaggtgagcctggaggactacatcaacgacagacagtacgacagcagaggcagattcggcgagctgctgctgctgctgcccaccctgcagagcatcacctggcagatgatcgagcagatccagttcatcaagctgttcggcatggccaagatcgacaacctgctgcaggagatgctgctgtgaggactagtccctgttcccagagcccacttttttttctttttttgaaataaaatagcctgtctttcagatctaaaaaaaaaaaaaaaaaaaaaaaaaaaaaaaaaaaaaaaaaaaaaaaaaaaaaaaaaaaaaaaaaaaaaaaaaaaaaaaaaaaaaaaaaaaaaaaaaaaa

SEQ ID NO: 4908 - RNA, 1376 nt, synthetic construct
  misc_feature 1..1376: note = mRNA a-1 (A100) (opt4) from Homo sapiens__NP_000448.3__HNF4A(1-375)(S142A_S143A_S148A_S167A_ S313A_S378A_T429A_T432A_S436A_K458R)
  source 1..1376: mol_type = other RNA
aggagagtcccgcagtcggcgtccagcggctctgcttgttcgtgtgtgtgtcgttgcaggccttattcaagcttaccatgagactgagcaagaccctggtggacatggacatggccgactacagcgccgccctggaccccgcctacaccaccctggagttcgagaacgtgcaggtgctgaccatgggcaacgacaccagccccagcgagggcaccaacctgaacgcccccaacagcctgggcgtgagcgccctgtgcgccatctgcggcgacagagccaccggcaagcactacggcgccagcagctgcgacggctgcaagggcttcttcagaagaagcgtgagaaagaaccacatgtacagctgcagattcagcagacagtgcgtggtggacaaggacaagagaaaccagtgcagatactgcagactgaagaagtgcttcagagccggcatgaagaaggaggccgtgcagaacgagagagacagaatcagcaccagaagagccgcctacgaggacagcgccctgcccagcatcaacgccctgctgcaggccgaggtgctgagcagacagatcaccgcccccgtgagcggcatcaacggcgacatcagagccaagaagatcgccagcatcgccgacgtgtgcgagagcatgaaggagcagctgctggtgctggtggagtgggccaagtacatccccgccttctgcgagctgcccctggacgaccaggtggccctgctgagagcccacgccggcgagcacctgctgctgggcgccaccaagagaagcatggtgttcaaggacgtgctgctgctgggcaacgactacatcgtgcccagacactgccccgagctggccgagatgagcagagtgagcatcagaatcctggacgagctggtgctgcccttccaggagctgcagatcgacgacaacgagtacgcctacctgaaggccatcatcttcttcgaccccgacgccaagggcctgagcgaccccggcaagatcaagagactgagagcccaggtgcaggtgagcctggaggactacatcaacgacagacagtacgacagcagaggcagattcggcgagctgctgctgctgctgcccaccctgcagagcatcacctggcagatgatcgagcagatccagttcatcaagctgttcggcatggccaagatcgacaacctgctgcaggagatgctgctgtgaggactagtccctgttcccagagcccacttttttttctttttttgaaataaaatagcctgtctttcagatctaaaaaaaaaaaaaaaaaaaaaaaaaaaaaaaaaaaaaaaaaaaaaaaaaaaaaaaaaaaaaaaaaaaaaaaaaaaaaaaaaaaaaaaaaaaaaaaaaaaa

SEQ ID NO: 4909 - RNA, 1376 nt, synthetic construct
  misc_feature 1..1376: note = mRNA a-1 (A100) (opt4) from Homo sapiens__NP_000448.3__HNF4A(1-375)(K106R_K108R_K126R_K127R_ S142A_S143A_S148A_S167A_S313A_S378A_T429A_T432A_S436A_K458R )
  source 1..1376: mol_type = other RNA
aggagagtcccgcagtcggcgtccagcggctctgcttgttcgtgtgtgtgtcgttgcaggccttattcaagcttaccatgagactgagcaagaccctggtggacatggacatggccgactacagcgccgccctggaccccgcctacaccaccctggagttcgagaacgtgcaggtgctgaccatgggcaacgacaccagccccagcgagggcaccaacctgaacgcccccaacagcctgggcgtgagcgccctgtgcgccatctgcggcgacagagccaccggcaagcactacggcgccagcagctgcgacggctgcaagggcttcttcagaagaagcgtgagaaagaaccacatgtacagctgcagattcagcagacagtgcgtggtggacagagacagaagaaaccagtgcagatactgcagactgaagaagtgcttcagagccggcatgagaagagaggccgtgcagaacgagagagacagaatcagcaccagaagagccgcctacgaggacagcgccctgcccagcatcaacgccctgctgcaggccgaggtgctgagcagacagatcaccgcccccgtgagcggcatcaacggcgacatcagagccaagaagatcgccagcatcgccgacgtgtgcgagagcatgaaggagcagctgctggtgctggtggagtgggccaagtacatccccgccttctgcgagctgcccctggacgaccaggtggccctgctgagagcccacgccggcgagcacctgctgctgggcgccaccaagagaagcatggtgttcaaggacgtgctgctgctgggcaacgactacatcgtgcccagacactgccccgagctggccgagatgagcagagtgagcatcagaatcctggacgagctggtgctgcccttccaggagctgcagatcgacgacaacgagtacgcctacctgaaggccatcatcttcttcgaccccgacgccaagggcctgagcgaccccggcaagatcaagagactgagagcccaggtgcaggtgagcctggaggactacatcaacgacagacagtacgacagcagaggcagattcggcgagctgctgctgctgctgcccaccctgcagagcatcacctggcagatgatcgagcagatccagttcatcaagctgttcggcatggccaagatcgacaacctgctgcaggagatgctgctgtgaggactagtccctgttcccagagcccacttttttttctttttttgaaataaaatagcctgtctttcagatctaaaaaaaaaaaaaaaaaaaaaaaaaaaaaaaaaaaaaaaaaaaaaaaaaaaaaaaaaaaaaaaaaaaaaaaaaaaaaaaaaaaaaaaaaaaaaaaaaaaa

SEQ ID NO: 4910 - RNA, 1376 nt, synthetic construct
  misc_feature 1..1376: note = mRNA a-1 (A100) (opt4) from Homo sapiens__NP_000448.3__HNF4A(1-375)(S142A_S143A_S148A_T166A_ S167A_S313A_S378A_T429A_T432A_S436A_K458R)
  source 1..1376: mol_type = other RNA
aggagagtcccgcagtcggcgtccagcggctctgcttgttcgtgtgtgtgtcgttgcaggccttattcaagcttaccatgagactgagcaagaccctggtggacatggacatggccgactacagcgccgccctggaccccgcctacaccaccctggagttcgagaacgtgcaggtgctgaccatgggcaacgacaccagccccagcgagggcaccaacctgaacgcccccaacagcctgggcgtgagcgccctgtgcgccatctgcggcgacagagccaccggcaagcactacggcgccagcagctgcgacggctgcaagggcttcttcagaagaagcgtgagaaagaaccacatgtacagctgcagattcagcagacagtgcgtggtggacaaggacaagagaaaccagtgcagatactgcagactgaagaagtgcttcagagccggcatgaagaaggaggccgtgcagaacgagagagacagaatcagcaccagaagagccgcctacgaggacagcgccctgcccagcatcaacgccctgctgcaggccgaggtgctgagcagacagatcgccgcccccgtgagcggcatcaacggcgacatcagagccaagaagatcgccagcatcgccgacgtgtgcgagagcatgaaggagcagctgctggtgctggtggagtgggccaagtacatccccgccttctgcgagctgcccctggacgaccaggtggccctgctgagagcccacgccggcgagcacctgctgctgggcgccaccaagagaagcatggtgttcaaggacgtgctgctgctgggcaacgactacatcgtgcccagacactgccccgagctggccgagatgagcagagtgagcatcagaatcctggacgagctggtgctgcccttccaggagctgcagatcgacgacaacgagtacgcctacctgaaggccatcatcttcttcgaccccgacgccaagggcctgagcgaccccggcaagatcaagagactgagagcccaggtgcaggtgagcctggaggactacatcaacgacagacagtacgacagcagaggcagattcggcgagctgctgctgctgctgcccaccctgcagagcatcacctggcagatgatcgagcagatccagttcatcaagctgttcggcatggccaagatcgacaacctgctgcaggagatgctgctgtgaggactagtccctgttcccagagcccacttttttttctttttttgaaataaaatagcctgtctttcagatctaaaaaaaaaaaaaaaaaaaaaaaaaaaaaaaaaaaaaaaaaaaaaaaaaaaaaaaaaaaaaaaaaaaaaaaaaaaaaaaaaaaaaaaaaaaaaaaaaaaa

SEQ ID NO: 4911 - RNA, 1376 nt, synthetic construct
  misc_feature 1..1376: note = mRNA a-1 (A100) (opt4) from Homo sapiens__NP_000448.3__HNF4A(1-375)(S87A_S142A_S143A_S148A_T 166A_S167A_S313A_S378A_T429A_T432A_S436A_K458R)
  source 1..1376: mol_type = other RNA
aggagagtcccgcagtcggcgtccagcggctctgcttgttcgtgtgtgtgtcgttgcaggccttattcaagcttaccatgagactgagcaagaccctggtggacatggacatggccgactacagcgccgccctggaccccgcctacaccaccctggagttcgagaacgtgcaggtgctgaccatgggcaacgacaccagccccagcgagggcaccaacctgaacgcccccaacagcctgggcgtgagcgccctgtgcgccatctgcggcgacagagccaccggcaagcactacggcgccagcagctgcgacggctgcaagggcttcttcagaagagccgtgagaaagaaccacatgtacagctgcagattcagcagacagtgcgtggtggacaaggacaagagaaaccagtgcagatactgcagactgaagaagtgcttcagagccggcatgaagaaggaggccgtgcagaacgagagagacagaatcagcaccagaagagccgcctacgaggacagcgccctgcccagcatcaacgccctgctgcaggccgaggtgctgagcagacagatcgccgcccccgtgagcggcatcaacggcgacatcagagccaagaagatcgccagcatcgccgacgtgtgcgagagcatgaaggagcagctgctggtgctggtggagtgggccaagtacatccccgccttctgcgagctgcccctggacgaccaggtggccctgctgagagcccacgccggcgagcacctgctgctgggcgccaccaagagaagcatggtgttcaaggacgtgctgctgctgggcaacgactacatcgtgcccagacactgccccgagctggccgagatgagcagagtgagcatcagaatcctggacgagctggtgctgcccttccaggagctgcagatcgacgacaacgagtacgcctacctgaaggccatcatcttcttcgaccccgacgccaagggcctgagcgaccccggcaagatcaagagactgagagcccaggtgcaggtgagcctggaggactacatcaacgacagacagtacgacagcagaggcagattcggcgagctgctgctgctgctgcccaccctgcagagcatcacctggcagatgatcgagcagatccagttcatcaagctgttcggcatggccaagatcgacaacctgctgcaggagatgctgctgtgaggactagtccctgttcccagagcccacttttttttctttttttgaaataaaatagcctgtctttcagatctaaaaaaaaaaaaaaaaaaaaaaaaaaaaaaaaaaaaaaaaaaaaaaaaaaaaaaaaaaaaaaaaaaaaaaaaaaaaaaaaaaaaaaaaaaaaaaaaaaaa

SEQ ID NO: 4912 - RNA, 1376 nt, synthetic construct
  misc_feature 1..1376: note = mRNA a-1 (A100) (opt4) from Homo sapiens__NP_000448.3__HNF4A(1-375)(S87A_K106R_K108R_K126R_K 127R_S142A_S143A_S148A_T166A_S167A_S313A_S378A_T429A_T432A_ S436A_K458R)
  source 1..1376: mol_type = other RNA
aggagagtcccgcagtcggcgtccagcggctctgcttgttcgtgtgtgtgtcgttgcaggccttattcaagcttaccatgagactgagcaagaccctggtggacatggacatggccgactacagcgccgccctggaccccgcctacaccaccctggagttcgagaacgtgcaggtgctgaccatgggcaacgacaccagccccagcgagggcaccaacctgaacgcccccaacagcctgggcgtgagcgccctgtgcgccatctgcggcgacagagccaccggcaagcactacggcgccagcagctgcgacggctgcaagggcttcttcagaagagccgtgagaaagaaccacatgtacagctgcagattcagcagacagtgcgtggtggacagagacagaagaaaccagtgcagatactgcagactgaagaagtgcttcagagccggcatgagaagagaggccgtgcagaacgagagagacagaatcagcaccagaagagccgcctacgaggacagcgccctgcccagcatcaacgccctgctgcaggccgaggtgctgagcagacagatcgccgcccccgtgagcggcatcaacggcgacatcagagccaagaagatcgccagcatcgccgacgtgtgcgagagcatgaaggagcagctgctggtgctggtggagtgggccaagtacatccccgccttctgcgagctgcccctggacgaccaggtggccctgctgagagcccacgccggcgagcacctgctgctgggcgccaccaagagaagcatggtgttcaaggacgtgctgctgctgggcaacgactacatcgtgcccagacactgccccgagctggccgagatgagcagagtgagcatcagaatcctggacgagctggtgctgcccttccaggagctgcagatcgacgacaacgagtacgcctacctgaaggccatcatcttcttcgaccccgacgccaagggcctgagcgaccccggcaagatcaagagactgagagcccaggtgcaggtgagcctggaggactacatcaacgacagacagtacgacagcagaggcagattcggcgagctgctgctgctgctgcccaccctgcagagcatcacctggcagatgatcgagcagatccagttcatcaagctgttcggcatggccaagatcgacaacctgctgcaggagatgctgctgtgaggactagtccctgttcccagagcccacttttttttctttttttgaaataaaatagcctgtctttcagatctaaaaaaaaaaaaaaaaaaaaaaaaaaaaaaaaaaaaaaaaaaaaaaaaaaaaaaaaaaaaaaaaaaaaaaaaaaaaaaaaaaaaaaaaaaaaaaaaaaaa

SEQ ID NO: 4913 - RNA, 1376 nt, synthetic construct
  misc_feature 1..1376: note = mRNA a-1 (A100) (opt4) from Homo sapiens__NP_000448.3__HNF4A(1-375)(S87A_K106R_K108R_K126R_K 127R)
  source 1..1376: mol_type = other RNA
aggagagtcccgcagtcggcgtccagcggctctgcttgttcgtgtgtgtgtcgttgcaggccttattcaagcttaccatgagactgagcaagaccctggtggacatggacatggccgactacagcgccgccctggaccccgcctacaccaccctggagttcgagaacgtgcaggtgctgaccatgggcaacgacaccagccccagcgagggcaccaacctgaacgcccccaacagcctgggcgtgagcgccctgtgcgccatctgcggcgacagagccaccggcaagcactacggcgccagcagctgcgacggctgcaagggcttcttcagaagagccgtgagaaagaaccacatgtacagctgcagattcagcagacagtgcgtggtggacagagacagaagaaaccagtgcagatactgcagactgaagaagtgcttcagagccggcatgagaagagaggccgtgcagaacgagagagacagaatcagcaccagaagaagcagctacgaggacagcagcctgcccagcatcaacgccctgctgcaggccgaggtgctgagcagacagatcaccagccccgtgagcggcatcaacggcgacatcagagccaagaagatcgccagcatcgccgacgtgtgcgagagcatgaaggagcagctgctggtgctggtggagtgggccaagtacatccccgccttctgcgagctgcccctggacgaccaggtggccctgctgagagcccacgccggcgagcacctgctgctgggcgccaccaagagaagcatggtgttcaaggacgtgctgctgctgggcaacgactacatcgtgcccagacactgccccgagctggccgagatgagcagagtgagcatcagaatcctggacgagctggtgctgcccttccaggagctgcagatcgacgacaacgagtacgcctacctgaaggccatcatcttcttcgaccccgacgccaagggcctgagcgaccccggcaagatcaagagactgagaagccaggtgcaggtgagcctggaggactacatcaacgacagacagtacgacagcagaggcagattcggcgagctgctgctgctgctgcccaccctgcagagcatcacctggcagatgatcgagcagatccagttcatcaagctgttcggcatggccaagatcgacaacctgctgcaggagatgctgctgtgaggactagtccctgttcccagagcccacttttttttctttttttgaaataaaatagcctgtctttcagatctaaaaaaaaaaaaaaaaaaaaaaaaaaaaaaaaaaaaaaaaaaaaaaaaaaaaaaaaaaaaaaaaaaaaaaaaaaaaaaaaaaaaaaaaaaaaaaaaaaaa

SEQ ID NO: 4914 - RNA, 1376 nt, synthetic construct; identical to SEQ ID NO: 4912
  misc_feature 1..1376: note = mRNA a-1 (A100) (opt4) from Homo sapiens__NP_000448.3__HNF4A(1-375)(S87A_K106R_K108R_K126R_K 127R_S142A_S143A_S148A_T166A_S167A_S313A_S378A_T429A_T432A_ S436A_K458R_S461A)
  source 1..1376: mol_type = other RNA

SEQ ID NO: 4915 - RNA, 1376 nt, synthetic construct; identical to SEQ ID NO: 4912
  misc_feature 1..1376: note = mRNA a-1 (A100) (opt4) from Homo sapiens__NP_000448.3__HNF4A(1-375)(S87A_K106R_K108R_K126R_K 127R_S142A_S143A_S148A_T166A_S167A_S313A_S378A_T429A_T432A_ S436A_K458R_S461E)
  source 1..1376: mol_type = other RNA

SEQ ID NO: 4916 - RNA, 1376 nt, synthetic construct
  misc_feature 1..1376: note = mRNA a-1 (A100) (opt4) from Homo sapiens__NP_000448.3__HNF4A(1-375)(S87A_K106R_K108R_K126R_K 127R_S142A_S143A_S148E_T166A_S167E_S313A_S378E_T429E_T432E_ S436E_K458R_S461E)
  source 1..1376: mol_type = other RNA
aggagagtcccgcagtcggcgtccagcggctctgcttgttcgtgtgtgtgtcgttgcaggccttattcaagcttaccatgagactgagcaagaccctggtggacatggacatggccgactacagcgccgccctggaccccgcctacaccaccctggagttcgagaacgtgcaggtgctgaccatgggcaacgacaccagccccagcgagggcaccaacctgaacgcccccaacagcctgggcgtgagcgccctgtgcgccatctgcggcgacagagccaccggcaagcactacggcgccagcagctgcgacggctgcaagggcttcttcagaagagccgtgagaaagaaccacatgtacagctgcagattcagcagacagtgcgtggtggacagagacagaagaaaccagtgcagatactgcagactgaagaagtgcttcagagccggcatgagaagagaggccgtgcagaacgagagagacagaatcagcaccagaagagccgcctacgaggacagcgagctgcccagcatcaacgccctgctgcaggccgaggtgctgagcagacagatcgccgagcccgtgagcggcatcaacggcgacatcagagccaagaagatcgccagcatcgccgacgtgtgcgagagcatgaaggagcagctgctggtgctggtggagtgggccaagtacatccccgccttctgcgagctgcccctggacgaccaggtggccctgctgagagcccacgccggcgagcacctgctgctgggcgccaccaagagaagcatggtgttcaaggacgtgctgctgctgggcaacgactacatcgtgcccagacactgccccgagctggccgagatgagcagagtgagcatcagaatcctggacgagctggtgctgcccttccaggagctgcagatcgacgacaacgagtacgcctacctgaaggccatcatcttcttcgaccccgacgccaagggcctgagcgaccccggcaagatcaagagactgagagcccaggtgcaggtgagcctggaggactacatcaacgacagacagtacgacagcagaggcagattcggcgagctgctgctgctgctgcccaccctgcagagcatcacctggcagatgatcgagcagatccagttcatcaagctgttcggcatggccaagatcgacaacctgctgcaggagatgctgctgtgaggactagtccctgttcccagagcccacttttttttctttttttgaaataaaatagcctgtctttcagatctaaaaaaaaaaaaaaaaaaaaaaaaaaaaaaaaaaaaaaaaaaaaaaaaaaaaaaaaaaaaaaaaaaaaaaaaaaaaaaaaaaaaaaaaaaaaaaaaaaaa

SEQ ID NO: 4917 - RNA, 1376 nt, synthetic construct
  misc_feature 1..1376: note = mRNA a-1 (A100) (opt4) from Homo sapiens__NP_000448.3__HNF4A(1-375)(S87A_K106R_K108R_K126R_K 127R_S142A_S143A_S148A_T166A_S167A_K179R_K180R_S313A_S378A_ T429A_T432A_S436A_K458R_S461E)
  source 1..1376: mol_type = other RNA
aggagagtcccgcagtcggcgtccagcggctctgcttgttcgtgtgtgtgtcgttgcaggccttattcaagcttaccatgagactgagcaagaccctggtggacatggacatggccgactacagcgccgccctggaccccgcctacaccaccctggagttcgagaacgtgcaggtgctgaccatgggcaacgacaccagccccagcgagggcaccaacctgaacgcccccaacagcctgggcgtgagcgccctgtgcgccatctgcggcgacagagccaccggcaagcactacggcgccagcagctgcgacggctgcaagggcttcttcagaagagccgtgagaaagaaccacatgtacagctgcagattcagcagacagtgcgtggtggacagagacagaagaaaccagtgcagatactgcagactgaagaagtgcttcagagccggcatgagaagagaggccgtgcagaacgagagagacagaatcagcaccagaagagccgcctacgaggacagcgccctgcccagcatcaacgccctgctgcaggccgaggtgctgagcagacagatcgccgcccccgtgagcggcatcaacggcgacatcagagccagaagaatcgccagcatcgccgacgtgtgcgagagcatgaaggagcagctgctggtgctggtggagtgggccaagtacatccccgccttctgcgagctgcccctggacgaccaggtggccctgctgagagcccacgccggcgagcacctgctgctgggcgccaccaagagaagcatggtgttcaaggacgtgctgctgctgggcaacgactacatcgtgcccagacactgccccgagctggccgagatgagcagagtgagcatcagaatcctggacgagctggtgctgcccttccaggagctgcagatcgacgacaacgagtacgcctacctgaaggccatcatcttcttcgaccccgacgccaagggcctgagcgaccccggcaagatcaagagactgagagcccaggtgcaggtgagcctggaggactacatcaacgacagacagtacgacagcagaggcagattcggcgagctgctgctgctgctgcccaccctgcagagcatcacctggcagatgatcgagcagatccagttcatcaagctgttcggcatggccaagatcgacaacctgctgcaggagatgctgctgtgaggactagtccctgttcccagagcccacttttttttctttttttgaaataaaatagcctgtctttcagatctaaaaaaaaaaaaaaaaaaaaaaaaaaaaaaaaaaaaaaaaaaaaaaaaaaaaaaaaaaaaaaaaaaaaaaaaaaaaaaaaaaaaaaaaaaaaaaaaaaaa

SEQ ID NO: 4918 - RNA, 1376 nt, synthetic construct
  misc_feature 1..1376: note = mRNA a-1 (A100) (opt4) from Homo sapiens__NP_000448.3__HNF4A(1-375)(S87A_K106R_K108R_K126R_K 127R_S142A_S143A_S148A_T166A_S167A_K300R_K307R_K309R_S313A_ S378A_T429A_T432A_S436A_K458R_S461E)
  source 1..1376: mol_type = other RNA
aggagagtcccgcagtcggcgtccagcggctctgcttgttcgtgtgtgtgtcgttgcaggccttattcaagcttaccatgagactgagcaagaccctggtggacatggacatggccgactacagcgccgccctggaccccgcctacaccaccctggagttcgagaacgtgcaggtgctgaccatgggcaacgacaccagccccagcgagggcaccaacctgaacgcccccaacagcctgggcgtgagcgccctgtgcgccatctgcggcgacagagccaccggcaagcactacggcgccagcagctgcgacggctgcaagggcttcttcagaagagccgtgagaaagaaccacatgtacagctgcagattcagcagacagtgcgtggtggacagagacagaagaaaccagtgcagatactgcagactgaagaagtgcttcagagccggcatgagaagagaggccgtgcagaacgagagagacagaatcagcaccagaagagccgcctacgaggacagcgccctgcccagcatcaacgccctgctgcaggccgaggtgctgagcagacagatcgccgcccccgtgagcggcatcaacggcgacatcagagccaagaagatcgccagcatcgccgacgtgtgcgagagcatgaaggagcagctgctggtgctggtggagtgggccaagtacatccccgccttctgcgagctgcccctggacgaccaggtggccctgctgagagcccacgccggcgagcacctgctgctgggcgccaccaagagaagcatggtgttcaaggacgtgctgctgctgggcaacgactacatcgtgcccagacactgccccgagctggccgagatgagcagagtgagcatcagaatcctggacgagctggtgctgcccttccaggagctgcagatcgacgacaacgagtacgcctacctgaaggccatcatcttcttcgaccccgacgccagaggcctgagcgaccccggcagaatcagaagactgagagcccaggtgcaggtgagcctggaggactacatcaacgacagacagtacgacagcagaggcagattcggcgagctgctgctgctgctgcccaccctgcagagcatcacctggcagatgatcgagcagatccagttcatcaagctgttcggcatggccaagatcgacaacctgctgcaggagatgctgctgtgaggactagtccctgttcccagagcccacttttttttctttttttgaaataaaatagcctgtctttcagatctaaaaaaaaaaaaaaaaaaaaaaaaaaaaaaaaaaaaaaaaaaaaaaaaaaaaaaaaaaaaaaaaaaaaaaaaaaaaaaaaaaaaaaaaaaaaaaaaaaaa

SEQ ID NO: 4919 - RNA, 1376 nt, synthetic construct; identical to SEQ ID NO: 4912
  misc_feature 1..1376: note = mRNA a-1 (A100) (opt4) from Homo sapiens__NP_000448.3__HNF4A(1-375)(S87A_K106R_K108R_K126R_K 127R_S142A_S143A_S148A_T166A_S167A_S313A_S378A_T429A_T432A_ S436A_K447R_K458R_S461E_K470R)
  source 1..1376: mol_type = other RNA

SEQ ID NO: 4920 - RNA, 1376 nt, synthetic construct
  misc_feature 1..1376: note = mRNA a-1 (A100) (opt4) from Homo sapiens__NP_000448.3__HNF4A(1-375)(S87A_K106R_K108R_K126R_K 127R_S142A_S143A_S148A_T166A_S167A_K179R_K180R_K234R_K300R_ K307R_K309R_S313A_S378A_T429A_T432A_S436A_K447R_K458R_S461E _K470R)
  source 1..1376: mol_type = other RNA
aggagagtcccgcagtcggcgtccagcggctctgcttgttcgtgtgtgtgtcgttgcaggccttattcaagcttaccatgagactgagcaagaccctggtggacatggacatggccgactacagcgccgccctggaccccgcctacaccaccctggagttcgagaacgtgcaggtgctgaccatgggcaacgacaccagccccagcgagggcaccaacctgaacgcccccaacagcctgggcgtgagcgccctgtgcgccatctgcggcgacagagccaccggcaagcactacggcgccagcagctgcgacggctgcaagggcttcttcagaagagccgtgagaaagaaccacatgtacagctgcagattcagcagacagtgcgtggtggacagagacagaagaaaccagtgcagatactgcagactgaagaagtgcttcagagccggcatgagaagagaggccgtgcagaacgagagagacagaatcagcaccagaagagccgcctacgaggacagcgccctgcccagcatcaacgccctgctgcaggccgaggtgctgagcagacagatcgccgcccccgtgagcggcatcaacggcgacatcagagccagaagaatcgccagcatcgccgacgtgtgcgagagcatgaaggagcagctgctggtgctggtggagtgggccaagtacatccccgccttctgcgagctgcccctggacgaccaggtggccctgctgagagcccacgccggcgagcacctgctgctgggcgccaccagaagaagcatggtgttcaaggacgtgctgctgctgggcaacgactacatcgtgcccagacactgccccgagctggccgagatgagcagagtgagcatcagaatcctggacgagctggtgctgcccttccaggagctgcagatcgacgacaacgagtacgcctacctgaaggccatcatcttcttcgaccccgacgccagaggcctgagcgaccccggcagaatcagaagactgagagcccaggtgcaggtgagcctggaggactacatcaacgacagacagtacgacagcagaggcagattcggcgagctgctgctgctgctgcccaccctgcagagcatcacctggcagatgatcgagcagatccagttcatcaagctgttcggcatggccaagatcgacaacctgctgcaggagatgctgctgtgaggactagtccctgttcccagagcccacttttttttctttttttgaaataaaatagcctgtctttcagatctaaaaaaaaaaaaaaaaaaaaaaaaaaaaaaaaaaaaaaaaaaaaaaaaaaaaaaaaaaaaaaaaaaaaaaaaaaaaaaaaaaaaaaaaaaaaaaaaaaaa

SEQ ID NO: 4921 - RNA, 1376 nt, synthetic construct
  misc_feature 1..1376: note = mRNA a-1 (A100) (opt4) from Homo sapiens__NP_000448.3__HNF4A(1-375)(S87A_S95A_S99A_K106R_K10 8R_K126R_K127R_S142A_S143A_S148A_T166A_S167A_S313A_S378A_T4 29A_T432A_S436A_K458R_S461E)
  source 1..1376: mol_type = other RNA
aggagagtcccgcagtcggcgtccagcggctctgcttgttcgtgtgtgtgtcgttgcaggccttattcaagcttaccatgagactgagcaagaccctggtggacatggacatggccgactacagcgccgccctggaccccgcctacaccaccctggagttcgagaacgtgcaggtgctgaccatgggcaacgacaccagccccagcgagggcaccaacctgaacgcccccaacagcctgggcgtgagcgccctgtgcgccatctgcggcgacagagccaccggcaagcactacggcgccagcagctgcgacggctgcaagggcttcttcagaagagccgtgagaaagaaccacatgtacgcctgcagattcgccagacagtgcgtggtggacagagacagaagaaaccagtgcagatactgcagactgaagaagtgcttcagagccggcatgagaagagaggccgtgcagaacgagagagacagaatcagcaccagaagagccgcctacgaggacagcgccctgcccagcatcaacgccctgctgcaggccgaggtgctgagcagacagatcgccgcccccgtgagcggcatcaacggcgacatcagagccaagaagatcgccagcatcgccgacgtgtgcgagagcatgaaggagcagctgctggtgctggtggagtgggccaagtacatccccgccttctgcgagctgcccctggacgaccaggtggccctgctgagagcccacgccggcgagcacctgctgctgggcgccaccaagagaagcatggtgttcaaggacgtgctgctgctgggcaacgactacatcgtgcccagacactgccccgagctggccgagatgagcagagtgagcatcagaatcctggacgagctggtgctgcccttccaggagctgcagatcgacgacaacgagtacgcctacctgaaggccatcatcttcttcgaccccgacgccaagggcctgagcgaccccggcaagatcaagagactgagagcccaggtgcaggtgagcctggaggactacatcaacgacagacagtacgacagcagaggcagattcggcgagctgctgctgctgctgcccaccctgcagagcatcacctggcagatgatcgagcagatccagttcatcaagctgttcggcatggccaagatcgacaacctgctgcaggagatgctgctgtgaggactagtccctgttcccagagcccacttttttttctttttttgaaataaaatagcctgtctttcagatctaaaaaaaaaaaaaaaaaaaaaaaaaaaaaaaaaaaaaaaaaaaaaaaaaaaaaaaaaaaaaaaaaaaaaaaaaaaaaaaaaaaaaaaaaaaaaaaaaaaa

SEQ ID NO: 4922 - RNA, 1376 nt, synthetic construct
  misc_feature 1..1376: note = mRNA a-1 (A100) (opt4) from Homo sapiens__NP_000448.3__HNF4A(1-375)(S87A_K106R_K108R_K126R_K 127R_S138A_T139A_S142A_S143A_S148A_T166A_S167A_S313A_S378A_ T429A_T432A_S436A_K458R_S461E)
  source 1..1376: mol_type = other RNA
aggagagtcccgcagtcggcgtccagcggctctgcttgttcgtgtgtgtgtcgttgcaggccttattcaagcttaccatgagactgagcaagaccctggtggacatggacatggccgactacagcgccgccctggaccccgcctacaccaccctggagttcgagaacgtgcaggtgctgaccatgggcaacgacaccagccccagcgagggcaccaacctgaacgcccccaacagcctgggcgtgagcgccctgtgcgccatctgcggcgacagagccaccggcaagcactacggcgccagcagctgcgacggctgcaagggcttcttcagaagagccgtgagaaagaaccacatgtacagctgcagattcagcagacagtgcgtggtggacagagacagaagaaaccagtgcagatactgcagactgaagaagtgcttcagagccggcatgagaagagaggccgtgcagaacgagagagacagaatcgccgccagaagagccgcctacgaggacagcgccctgcccagcatcaacgccctgctgcaggccgaggtgctgagcagacagatcgccgcccccgtgagcggcatcaacggcgacatcagagccaagaagatcgccagcatcgccgacgtgtgcgagagcatgaaggagcagctgctggtgctggtggagtgggccaagtacatccccgccttctgcgagctgcccctggacgaccaggtggccctgctgagagcccacgccggcgagcacctgctgctgggcgccaccaagagaagcatggtgttcaaggacgtgctgctgctgggcaacgactacatcgtgcccagacactgccccgagctggccgagatgagcagagtgagcatcagaatcctggacgagctggtgctgcccttccaggagctgcagatcgacgacaacgagtacgcctacctgaaggccatcatcttcttcgaccccgacgccaagggcctgagcgaccccggcaagatcaagagactgagagcccaggtgcaggtgagcctggaggactacatcaacgacagacagtacgacagcagaggcagattcggcgagctgctgctgctgctgcccaccctgcagagcatcacctggcagatgatcgagcagatccagttcatcaagctgttcggcatggccaagatcgacaacctgctgcaggagatgctgctgtgaggactagtccctgttcccagagcccacttttttttctttttttgaaataaaatagcctgtctttcagatctaaaaaaaaaaaaaaaaaaaaaaaaaaaaaaaaaaaaaaaaaaaaaaaaaaaaaaaaaaaaaaaaaaaaaaaaaaaaaaaaaaaaaaaaaaaaaaaaaaaa

SEQ ID NO: 4923 - RNA, 1376 nt, synthetic construct
  misc_feature 1..1376: note = mRNA a-1 (A100) (opt4) from Homo sapiens__NP_000448.3__HNF4A(1-375)(S87A_S95A_S99A_K106R_K10 8R_K126R_K127R_S138A_T139A_S142A_S143A_S148A_T166A_S167A_S3 13A_S378A_T429A_T432A_S436A_K458R_S461E)
  source 1..1376: mol_type = other RNA
aggagagtcccgcagtcggcgtccagcggctctgcttgttcgtgtgtgtgtcgttgcaggccttattcaagcttaccatgagactgagcaagaccctggtggacatggacatggccgactacagcgccgccctggaccccgcctacaccaccctggagttcgagaacgtgcaggtgctgaccatgggcaacgacaccagccccagcgagggcaccaacctgaacgcccccaacagcctgggcgtgagcgccctgtgcgccatctgcggcgacagagccaccggcaagcactacggcgccagcagctgcgacggctgcaagggcttcttcagaagagccgtgagaaagaaccacatgtacgcctgcagattcgccagacagtgcgtggtggacagagacagaagaaaccagtgcagatactgcagactgaagaagtgcttcagagccggcatgagaagagaggccgtgcagaacgagagagacagaatcgccgccagaagagccgcctacgaggacagcgccctgcccagcatcaacgccctgctgcaggccgaggtgctgagcagacagatcgccgcccccgtgagcggcatcaacggcgacatcagagccaagaagatcgccagcatcgccgacgtgtgcgagagcatgaaggagcagctgctggtgctggtggagtgggccaagtacatccccgccttctgcgagctgcccctggacgaccaggtggccctgctgagagcccacgccggcgagcacctgctgctgggcgccaccaagagaagcatggtgttcaaggacgtgctgctgctgggcaacgactacatcgtgcccagacactgccccgagctggccgagatgagcagagtgagcatcagaatcctggacgagctggtgctgcccttccaggagctgcagatcgacgacaacgagtacgcctacctgaaggccatcatcttcttcgaccccgacgccaagggcctgagcgaccccggcaagatcaagagactgagagcccaggtgcaggtgagcctggaggactacatcaacgacagacagtacgacagcagaggcagattcggcgagctgctgctgctgctgcccaccctgcagagcatcacctggcagatgatcgagcagatccagttcatcaagctgttcggcatggccaagatcgacaacctgctgcaggagatgctgctgtgaggactagtccctgttcccagagcccacttttttttctttttttgaaataaaatagcctgtctttcagatctaaaaaaaaaaaaaaaaaaaaaaaaaaaaaaaaaaaaaaaaaaaaaaaaaaaaaaaaaaaaaaaaaaaaaaaaaaaaaaaaaaaaaaaaaaaaaaaaaaaa

SEQ ID NO: 4924 - RNA, 1376 nt, synthetic construct
  misc_feature 1..1376: note = mRNA a-1 (A100) (opt5) from Homo sapiens__NP_000448.3__HNF4A(1-375)
  source 1..1376: mol_type = other RNA
aggagagtcccgcagtcggcgtccagcggctctgcttgttcgtgtgtgtgtcgttgcaggccttattcaagcttaccatgagactgagcaagaccctcgtggacatggatatggccgactactccgctgccctggatcccgcgtatacaacgcttgagttcgaaaacgtccaggttctgaccatgggcaatgacacatctcctagcgaggggaccaacctcaatgctccgaactccctgggagtgtctgccctttgcgccatctgtggcgatcgggctacagggaaacactacggagccagctcctgcgacggctgtaaggggtttttccgcagatctgtgcggaaaaatcatatgtatagctgccgcttttccagacaatgtgtcgtggataaggacaaacggaaccagtgccgctactgtagactgaagaagtgcttccgggctggaatgaaaaaggaagccgttcagaatgagcgcgatagaattagcacccggcgcagctcctatgaagacagctctctcccctccatcaacgcgctgctgcaggccgaggtgctcagcagacaaattacatctcctgtctccggcatcaatggcgatattcgggctaaaaagatcgccagcatcgctgacgtgtgtgagtccatgaaagaacagctgcttgttctggtggagtgggccaagtacattcccgcgttttgcgaactccctctggatgaccaggtcgcccttctgcgcgctcacgccggggagcatctcctgctgggagctaccaagagatctatggtgttcaaagacgtgctcctgcttggcaacgattatatcgtcccccggcactgtcctgagctggccgaaatgagcagagtttccattcgcatcctcgacgagctggtgcttccgtttcaggaactgcaaattgatgacaatgagtacgcctacctcaaggctatcattttctttgatcccgacgcgaaagggctgagcgatcctggaaagatcaaacggctgagatctcaggtgcaggtctccctcgaagactatatcaacgatcgccagtacgacagccggggcagattcggggagctgcttctgctcctgcccacgcttcaatctattacctggcagatgatcgagcagattcaatttatcaagctgttcggaatggccaaaattgataatctcctgcaggaaatgctgctctgaggactagtccctgttcccagagcccacttttttttctttttttgaaataaaatagcctgtctttcagatctaaaaaaaaaaaaaaaaaaaaaaaaaaaaaaaaaaaaaaaaaaaaaaaaaaaaaaaaaaaaaaaaaaaaaaaaaaaaaaaaaaaaaaaaaaaaaaaaaaaa

SEQ ID NO: 4925 - RNA, 1376 nt, synthetic construct
  misc_feature 1..1376: note = mRNA a-1 (A100) (opt5) from Homo sapiens__NP_000448.3__HNF4A(1-375)(S313A)
  source 1..1376: mol_type = other RNA
aggagagtcccgcagtcggcgtccagcggctctgcttgttcgtgtgtgtgtcgttgcaggccttattcaagcttaccatgagactgagcaagaccctcgtggacatggatatggccgactactccgctgccctggatcccgcgtatacaacgcttgagttcgaaaacgtccaggttctgaccatgggcaatgacacatctcctagcgaggggaccaacctcaatgctccgaactccctgggagtgtctgccctttgcgccatctgtggcgatcgggctacagggaaacactacggagccagctcctgcgacggctgtaaggggtttttccgcagatctgtgcggaaaaatcatatgtatagctgccgcttttccagacaatgtgtcgtggataaggacaaacggaaccagtgccgctactgtagactgaagaagtgcttccgggctggaatgaaaaaggaagccgttcagaatgagcgcgatagaattagcacccggagatcttcctatgaagacagctctctcccctccatcaacgcgctgctgcaggccgaggtgctcagccgccaaattacatctcctgtctccggcatcaatggcgatattcgggctaaaaagatcgccagcatcgctgacgtgtgtgagtccatgaaagaacagctgcttgttctggtggagtgggccaagtacattcccgcgttttgcgaactccctctggatgaccaggtcgcccttctgcgcgctcacgccggggagcatctcctgctgggagctaccaagagatctatggtgttcaaagacgtgctcctgcttggcaacgattatatcgtcccccggcactgtcctgagctggccgaaatgagcagagtttccattcgcatcctcgacgagctggtgcttccgtttcaggaactgcaaattgatgacaatgagtacgcctacctcaaggctatcattttctttgatcccgacgcgaaagggctgagcgatcctggaaagatcaaacggctgagagcccaggtgcaggtctctctcgaagactatatcaacgatcgccagtacgactcccggggcagattcggggagctgcttctgctcctgcccacgcttcaaagcattacctggcagatgatcgagcagattcaatttatcaagctgttcggaatggctaaaattgataatctcctgcaggaaatgctgctctgaggactagtccctgttcccagagcccacttttttttctttttttgaaataaaatagcctgtctttcagatctaaaaaaaaaaaaaaaaaaaaaaaaaaaaaaaaaaaaaaaaaaaaaaaaaaaaaaaaaaaaaaaaaaaaaaaaaaaaaaaaaaaaaaaaaaaaaaaaaaaa

SEQ ID NO: 4926 - RNA, 1376 nt, synthetic construct
  misc_feature 1..1376: note = mRNA a-1 (A100) (opt5) from Homo sapiens__NP_000448.3__HNF4A(1-375)(S313E)
  source 1..1376: mol_type = other RNA
aggagagtcccgcagtcggcgtccagcggctctgcttgttcgtgtgtgtgtcgttgcaggccttattcaagcttaccatgagactgagcaagaccctcgtggacatggatatggccgactactccgctgccctggatcccgcgtatacaacgcttgagttcgaaaacgtccaggttctgaccatgggcaatgacacatctcctagcgaggggaccaacctcaatgctccgaactccctgggagtgtctgccctttgcgccatctgtggcgatcgggctacagggaaacactacggagccagctcctgcgacggctgtaaggggtttttccgcagatctgtgcggaaaaatcatatgtatagctgccgcttttccagacaatgtgtcgtggataaggacaaacggaaccagtgccgctactgtagactgaagaagtgcttccgggctggaatgaaaaaggaagccgttcagaatgagcgcgatagaattagcacccggagatcttcctatgaagacagctctctcccctccatcaacgcgctgctgcaggccgaggtgctcagccgccaaattacatctcctgtctccggcatcaatggcgatattcgggctaaaaagatcgccagcatcgctgacgtgtgtgagtccatgaaagaacagctgcttgttctggtggagtgggccaagtacattcccgcgttttgcgaactccctctggatgaccaggtcgcccttctgcgcgctcacgccggggagcatctcctgctgggagctaccaagagatctatggtgttcaaagacgtgctcctgcttggcaacgattatatcgtcccccggcactgtcctgagctggccgaaatgagcagagtttccattcgcatcctcgacgagctggtgcttccgtttcaggaactgcaaattgatgacaatgagtacgcctacctcaaggctatcattttctttgatcccgacgcgaaagggctgagcgatcctggaaagatcaaacggctgagagaacaggtgcaggtctctctcgaggactatatcaacgatcgccagtacgactcccggggcagattcggggagctgcttctgctcctgcccacgcttcaaagcattacctggcagatgatcgaacagattcaatttatcaagctgttcggaatggccaaaattgataatctcctgcaggagatgctgctctgaggactagtccctgttcccagagcccacttttttttctttttttgaaataaaatagcctgtctttcagatctaaaaaaaaaaaaaaaaaaaaaaaaaaaaaaaaaaaaaaaaaaaaaaaaaaaaaaaaaaaaaaaaaaaaaaaaaaaaaaaaaaaaaaaaaaaaaaaaaaaa

SEQ ID NO: 4927 - RNA, 1376 nt, synthetic construct
  misc_feature 1..1376: note = mRNA a-1 (A100) (opt5) from Homo sapiens__NP_000448.3__HNF4A(1-375)(S142A_S143A)
  source 1..1376: mol_type = other RNA
aggagagtcccgcagtcggcgtccagcggctctgcttgttcgtgtgtgtgtcgttgcaggccttattcaagcttaccatgagactgagcaagaccctcgtggacatggatatggccgactactccgctgccctggatcccgcgtatacaacgcttgagttcgaaaacgtccaggttctgaccatgggcaatgacacatctcctagcgaggggaccaacctcaatgctccgaactccctgggagtgtctgccctttgcgccatctgtggcgatcgggctacagggaaacactacggagccagctcctgcgacggctgtaaggggtttttccgcagatctgtgcggaaaaatcatatgtatagctgccgcttttccagacaatgtgtcgtggataaggacaaacggaaccagtgccgctactgtagactgaagaagtgcttccgggctggaatgaaaaaggaagccgttcagaatgagcgcgatagaattagcacccggcgcgcggcctatgaagactcttccctccccagcatcaacgctctgctgcaggccgaggtgctctctagacaaattacatcccctgtcagcggcatcaatggcgatattcgggctaaaaagatcgcctctatcgcggacgtgtgtgagtccatgaaagaacagctgcttgttctggtggagtgggccaagtacattcccgctttttgcgaactccctctggatgaccaggtcgcccttctgcgcgctcacgccggggagcatctcctgctgggagccaccaagagaagcatggtgttcaaagacgtgctcctgcttggcaacgattatatcgtcccccggcactgtcctgagctggctgaaatgtccagagtttctattcgcatcctcgacgagctggtgcttccgtttcaggaactgcaaattgatgacaatgagtacgcgtacctcaaggccatcattttctttgatcccgacgctaaagggctgagcgatcctggaaagatcaaacggctgagatcccaggtgcaggtcagcctcgaagactatatcaacgatcgccagtacgactctcggggcagattcggggagctgcttctgctcctgcccacgcttcaatccattacctggcagatgatcgagcagattcaatttatcaagctgttcggaatggccaaaattgataatctcctgcaggaaatgctgctctgaggactagtccctgttcccagagcccacttttttttctttttttgaaataaaatagcctgtctttcagatctaaaaaaaaaaaaaaaaaaaaaaaaaaaaaaaaaaaaaaaaaaaaaaaaaaaaaaaaaaaaaaaaaaaaaaaaaaaaaaaaaaaaaaaaaaaaaaaaaaaa

SEQ ID NO: 4928 - RNA, 1376 nt, synthetic construct
  misc_feature 1..1376: note = mRNA a-1 (A100) (opt5) from Homo sapiens__NP_000448.3__HNF4A(1-375)(S142E_S143E)
  source 1..1376: mol_type = other RNA
aggagagtcccgcagtcggcgtccagcggctctgcttgttcgtgtgtgtgtcgttgcaggccttattcaagcttaccatgagactgagcaagaccctcgtggacatggatatggccgactactccgctgccctggatcccgcgtatacaacgcttgagttcgaaaacgtccaggttctgaccatgggcaatgacacatctcctagcgaggggaccaacctcaatgctccgaactccctgggagtgtctgccctttgcgccatctgtggcgatcgggctacagggaaacactacggagccagctcctgcgacggctgtaaggggtttttccgcagatctgtgcggaaaaatcatatgtatagctgccgcttttccagacaatgtgtcgtggataaggacaaacggaaccagtgccgctactgtagactgaagaagtgcttccgggctggaatgaaaaaggaagccgttcagaatgagcgcgatagaattagcacccggcgcgaagagtatgaggactcttccctccccagcatcaacgcgctgctgcaggccgaagtgctctctagacaaattacatcccctgtcagcggcatcaatggcgatattcgggctaaaaagatcgcctctatcgctgacgtgtgtgagtccatgaaagaacagctgcttgttctggtggagtgggccaagtacattcccgcgttttgcgagctccctctggatgaccaggtcgcccttctgcgcgctcacgccggggaacatctcctgctgggagctaccaagagaagcatggtgttcaaagacgtgctcctgcttggcaacgattatatcgtcccccggcactgtcctgagctggccgaaatgtccagagtttctattcgcatcctcgacgagctggtgcttccgtttcaggaactgcaaattgatgacaatgagtacgcctacctcaaggctatcattttctttgatcccgacgcgaaagggctgagcgatcctggaaagatcaaacggctgagatcccaggtgcaggtcagcctcgaggactatatcaacgatcgccagtacgactctcggggcagattcggggaactgcttctgctcctgcccacgcttcaatccattacctggcagatgatcgagcagattcaatttatcaagctgttcggaatggccaaaattgataatctcctgcaggaaatgctgctctgaggactagtccctgttcccagagcccacttttttttctttttttgaaataaaatagcctgtctttcagatctaaaaaaaaaaaaaaaaaaaaaaaaaaaaaaaaaaaaaaaaaaaaaaaaaaaaaaaaaaaaaaaaaaaaaaaaaaaaaaaaaaaaaaaaaaaaaaaaaaaa

SEQ ID NO: 4929 - RNA, 1376 nt, synthetic construct
  misc_feature 1..1376: note = mRNA a-1 (A100) (opt5) from Homo sapiens__NP_000448.3__HNF4A(1-375)(S143A)
  source 1..1376: mol_type = other RNA
aggagagtcccgcagtcggcgtccagcggctctgcttgttcgtgtgtgtgtcgttgcaggccttattcaagcttaccatgagactgagcaagaccctcgtggacatggatatggccgactactccgctgccctggatcccgcgtatacaacgcttgagttcgaaaacgtccaggttctgaccatgggcaatgacacatctcctagcgaggggaccaacctcaatgctccgaactccctgggagtgtctgccctttgcgccatctgtggcgatcgggctacagggaaacactacggagccagctcctgcgacggctgtaaggggtttttccgcagatctgtgcggaaaaatcatatgtatagctgccgcttttccagacaatgtgtcgtggataaggacaaacggaaccagtgccgctactgtagactgaagaagtgcttccgggctggaatgaaaaaggaagccgttcagaatgagcgcgatagaattagcacccggcgctctgcgtatgaagactccagcctcccctctatcaacgccctgctgcaggctgaggtgctctccagacaaattacaagccctgtctctggcatcaatggcgatattcgggccaaaaagatcgcttccatcgccgacgtgtgtgagagcatgaaagaacagctgcttgttctggtggagtgggcgaagtacattcccgccttttgcgaactccctctggatgaccaggtcgcccttctgcgcgcccacgctggggagcatctcctgctgggagccaccaagagatccatggtgttcaaagacgtgctcctgcttggcaacgattatatcgtcccccggcactgtcctgagctggccgaaatgtctagagttagcattcgcatcctcgacgagctggtgcttccgtttcaggaactgcaaattgatgacaatgagtacgcttacctcaaggcgatcattttctttgatcccgacgccaaagggctgtccgatcctggaaagatcaaacggctgagaagccaggtgcaggtctctctcgaagactatatcaacgatcgccagtacgactcccggggcagattcggggagctgcttctgctcctgcccacgcttcaaagcattacctggcagatgatcgagcagattcaatttatcaagctgttcggaatggctaaaattgataatctcctgcaggaaatgctgctctgaggactagtccctgttcccagagcccacttttttttctttttttgaaataaaatagcctgtctttcagatctaaaaaaaaaaaaaaaaaaaaaaaaaaaaaaaaaaaaaaaaaaaaaaaaaaaaaaaaaaaaaaaaaaaaaaaaaaaaaaaaaaaaaaaaaaaaaaaaaaaa

SEQ ID NO: 4930 - RNA, 1376 nt, synthetic construct
  misc_feature 1..1376: note = mRNA a-1 (A100) (opt5) from Homo sapiens__NP_000448.3__HNF4A(1-375)(T166A)
  source 1..1376: mol_type = other RNA
aggagagtcccgcagtcggcgtccagcggctctgcttgttcgtgtgtgtgtcgttgcaggccttattcaagcttaccatgagactgagcaagaccctcgtggacatggatatggccgactactccgctgccctggatcccgcgtatacaacgcttgagttcgaaaacgtccaggttctgaccatgggcaatgacacatctcctagcgaggggaccaacctcaatgctccgaactccctgggagtgtctgccctttgcgccatctgtggcgatcgggctacagggaaacactacggagccagctcctgcgacggctgtaaggggtttttccgcagatctgtgcggaaaaatcatatgtatagctgccgcttttccagacaatgtgtcgtggataaggacaaacggaaccagtgccgctactgtagactgaagaagtgcttccgggctggaatgaaaaaggaagccgttcagaatgagcgcgatagaattagcacccggcgcagctcctatgaagacagctctctcccctccatcaacgcgctgctgcaggccgaggtgctcagcagacaaattgcttctcctgtctccggcatcaatggcgatattcgggccaaaaagatcgctagcatcgccgacgtgtgtgagtccatgaaagaacagctgcttgttctggtggagtgggcgaagtacattcccgccttttgcgaactccctctggatgaccaggtcgcccttctgcgcgcccacgctggggagcatctcctgctgggagccacaaagagatctatggtgttcaaagacgtgctcctgcttggcaacgattatatcgtcccccggcactgtcctgagctggccgaaatgagcagagtttccattcgcatcctcgacgagctggtgcttccgtttcaggaactgcaaattgatgacaatgagtacgcttacctcaaggcgatcattttctttgatcccgacgccaaagggctgagcgatcctggaaagatcaaacggctgagatctcaggtgcaggtctccctcgaagactatatcaacgatcgccagtacgacagccggggcagattcggggagctgcttctgctcctgcccacccttcaatctattacgtggcagatgatcgagcagattcaatttatcaagctgttcggaatggctaaaattgataatctcctgcaggaaatgctgctctgaggactagtccctgttcccagagcccacttttttttctttttttgaaataaaatagcctgtctttcagatctaaaaaaaaaaaaaaaaaaaaaaaaaaaaaaaaaaaaaaaaaaaaaaaaaaaaaaaaaaaaaaaaaaaaaaaaaaaaaaaaaaaaaaaaaaaaaaaaaaaa

SEQ ID NO: 4931 - RNA, 1376 nt, synthetic construct
  misc_feature 1..1376: note = mRNA a-1 (A100) (opt5) from Homo sapiens__NP_000448.3__HNF4A(1-375)(S167E)
  source 1..1376: mol_type = other RNA
aggagagtcccgcagtcggcgtccagcggctctgcttgttcgtgtgtgtgtcgttgcaggccttattcaagcttaccatgagactgagcaagaccctcgtggacatggatatggccgactactccgctgccctggatcccgcgtatacaacgcttgagttcgaaaacgtccaggttctgaccatgggcaatgacacatctcctagcgaggggaccaacctcaatgctccgaactccctgggagtgtctgccctttgcgccatctgtggcgatcgggctacagggaaacactacggagccagctcctgcgacggctgtaaggggtttttccgcagatctgtgcggaaaaatcatatgtatagctgccgcttttccagacaatgtgtcgtggataaggacaaacggaaccagtgccgctactgtagactgaagaagtgcttccgggctggaatgaaaaaggaagccgttcagaatgagcgcgatagaattagcacccggagatcttcctatgaagacagctctctcccctccatcaacgcgctgctgcaggccgaggtgctcagccgccaaattacagagcctgtctctggcatcaatggcgatattcgggctaaaaagatcgcctccatcgctgacgtgtgtgaaagcatgaaagagcagctgcttgttctggtggaatgggccaagtacattcccgcgttttgcgagctccctctggatgaccaggtcgcccttctgcgcgctcacgccggggagcatctcctgctgggagctaccaagagatccatggtgttcaaagacgtgctcctgcttggcaacgattatatcgtcccccggcactgtcctgaactggccgagatgtctagagttagcattcgcatcctcgacgaactggtgcttccgtttcaggagctgcaaattgatgacaatgaatacgcctacctcaaggctatcattttctttgatcccgacgcgaaagggctgtccgatcctggaaagatcaaacggctgagaagccaggtgcaggtctctctcgaggactatatcaacgatcgccagtacgactcccggggcagattcggggagctgcttctgctcctgcccacgcttcaaagcattacctggcagatgatcgaacagattcaatttatcaagctgttcggaatggccaaaattgataatctcctgcaggagatgctgctctgaggactagtccctgttcccagagcccacttttttttctttttttgaaataaaatagcctgtctttcagatctaaaaaaaaaaaaaaaaaaaaaaaaaaaaaaaaaaaaaaaaaaaaaaaaaaaaaaaaaaaaaaaaaaaaaaaaaaaaaaaaaaaaaaaaaaaaaaaaaaaa

SEQ ID NO: 4932 - RNA, 1376 nt, synthetic construct
  misc_feature 1..1376: note = mRNA a-1 (A100) (opt5) from Homo sapiens__NP_000448.3__HNF4A(1-375)(S167A)
  source 1..1376: mol_type = other RNA
aggagagtcccgcagtcggcgtccagcggctctgcttgttcgtgtgtgtgtcgttgcaggccttattcaagcttaccatgagactgagcaagaccctcgtggacatggatatggccgactactccgctgccctggatcccgcgtatacaacgcttgagttcgaaaacgtccaggttctgaccatgggcaatgacacatctcctagcgaggggaccaacctcaatgctccgaactccctgggagtgtctgccctttgcgccatctgtggcgatcgggctacagggaaacactacggagccagctcctgcgacggctgtaaggggtttttccgcagatctgtgcggaaaaatcatatgtatagctgccgcttttccagacaatgtgtcgtggataaggacaaacggaaccagtgccgctactgtagactgaagaagtgcttccgggctggaatgaaaaaggaagccgttcagaatgagcgcgatagaattagcacccggagatcttcctatgaagacagctctctcccctccatcaacgcgctgctgcaggccgaggtgctcagccgccaaattacagctcctgtctctggcatcaatggcgatattcgggccaaaaagatcgcttccatcgccgacgtgtgtgagagcatgaaagaacagctgcttgttctggtggagtgggcgaagtacattcccgccttttgcgaactccctctggatgaccaggtcgcccttctgcgcgcccacgctggggagcatctcctgctgggagccaccaagagatccatggtgttcaaagacgtgctcctgcttggcaacgattatatcgtcccccggcactgtcctgagctggccgaaatgtctagagttagcattcgcatcctcgacgagctggtgcttccgtttcaggaactgcaaattgatgacaatgagtacgcttacctcaaggcgatcattttctttgatcccgacgccaaagggctgtccgatcctggaaagatcaaacggctgagaagccaggtgcaggtctctctcgaagactatatcaacgatcgccagtacgactcccggggcagattcggggagctgcttctgctcctgcccacgcttcaaagcattacctggcagatgatcgagcagattcaatttatcaagctgttcggaatggctaaaattgataatctcctgcaggaaatgctgctctgaggactagtccctgttcccagagcccacttttttttctttttttgaaataaaatagcctgtctttcagatctaaaaaaaaaaaaaaaaaaaaaaaaaaaaaaaaaaaaaaaaaaaaaaaaaaaaaaaaaaaaaaaaaaaaaaaaaaaaaaaaaaaaaaaaaaaaaaaaaaaa

SEQ ID NO: 4933 - RNA, 1376 nt, synthetic construct; identical to SEQ ID NO: 4932
  misc_feature 1..1376: note = mRNA a-1 (A100) (opt5) from Homo sapiens__NP_000448.3__HNF4A(1-375)(S167A_S378A_T429A_T432A_ S436A)
  source 1..1376: mol_type = other RNA

SEQ ID NO: 4934 - RNA, 1376 nt, synthetic construct; identical to SEQ ID NO: 4931
  misc_feature 1..1376: note = mRNA a-1 (A100) (opt5) from Homo sapiens__NP_000448.3__HNF4A(1-375)(S167E_S378E_T429E_T432E_ S436E)
  source 1..1376: mol_type = other RNA

SEQ ID NO: 4935 - RNA, 1376 nt, synthetic construct
  misc_feature 1..1376: note = mRNA a-1 (A100) (opt5) from Homo sapiens__NP_000448.3__HNF4A(1-375)(S87A)
  source 1..1376: mol_type = other RNA
aggagagtcccgcagtcggcgtccagcggctctgcttgttcgtgtgtgtgtcgttgcaggccttattcaagcttaccatgagactgagcaagaccctcgtggacatggatatggccgactactccgctgccctggatcccgcgtatacaacgcttgagttcgaaaacgtccaggttctgaccatgggcaatgacacatctcctagcgaggggaccaacctcaatgctccgaactccctgggagtgtctgccctttgcgccatctgtggcgatcgggctacagggaaacactacggagccagctcctgcgacggctgtaaggggtttttccgcagagctgtgcggaaaaatcatatgtattcttgccgctttagcagacaatgtgtcgtggataaggacaaacggaaccagtgccgctactgtagactgaagaagtgcttccgggccggaatgaaaaaggaagcggttcagaatgagcgcgatagaatttccacccggcgcagctcttatgaagactccagcctcccctctatcaacgccctgctgcaggctgaggtgctctccagacaaattacaagccctgtctctggcatcaatggcgatattcgggccaaaaagatcgcttccatcgccgacgtgtgtgagagcatgaaagaacagctgcttgttctggtggagtgggcgaagtacattcccgccttttgcgaactccctctggatgaccaggtcgcccttctgcgcgcccacgctggggagcatctcctgctgggagccaccaagagatccatggtgttcaaagacgtgctcctgcttggcaacgattatatcgtcccccggcactgtcctgagctggccgaaatgtctagagttagcattcgcatcctcgacgagctggtgcttccgtttcaggaactgcaaattgatgacaatgagtacgcttacctcaaggcgatcattttctttgatcccgacgccaaagggctgtccgatcctggaaagatcaaacggctgagaagccaggtgcaggtctctctcgaagactatatcaacgatcgccagtacgactcccggggcagattcggggagctgcttctgctcctgcccacgcttcaaagcattacctggcagatgatcgagcagattcaatttatcaagctgttcggaatggctaaaattgataatctcctgcaggaaatgctgctctgaggactagtccctgttcccagagcccacttttttttctttttttgaaataaaatagcctgtctttcagatctaaaaaaaaaaaaaaaaaaaaaaaaaaaaaaaaaaaaaaaaaaaaaaaaaaaaaaaaaaaaaaaaaaaaaaaaaaaaaaaaaaaaaaaaaaaaaaaaaaaa

SEQ ID NO: 4936 - RNA, 1376 nt, synthetic construct
  misc_feature 1..1376: note = mRNA a-1 (A100) (opt5) from Homo sapiens__NP_000448.3__HNF4A(1-375)(S87E)
  source 1..1376: mol_type = other RNA
aggagagtcccgcagtcggcgtccagcggctctgcttgttcgtgtgtgtgtcgttgcaggccttattcaagcttaccatgagactgagcaagaccctcgtggacatggatatggccgactactccgctgccctggatcccgcgtatacaacgcttgagttcgaaaacgtccaggttctgaccatgggcaatgacacatctcctagcgaggggaccaacctcaatgctccgaactccctgggagtgtctgccctttgcgccatctgtggcgatcgggctacagggaaacactacggagccagctcctgcgacggctgtaaggggtttttccgcagagaagtgcggaaaaatcatatgtattcttgccgctttagcagacaatgtgtcgtggataaggacaaacggaaccagtgccgctactgtagactgaagaagtgcttccgggctggaatgaaaaaggaggccgttcagaatgaacgcgatagaatttccacccggcgcagctcttatgaggactccagcctcccctctatcaacgcgctgctgcaggccgaggtgctctccagacaaattacaagccctgtctctggcatcaatggcgatattcgggctaaaaagatcgcctccatcgctgacgtgtgtgaaagcatgaaagagcagctgcttgttctggtggaatgggccaagtacattcccgcgttttgcgagctccctctggatgaccaggtcgcccttctgcgcgctcacgccggggagcatctcctgctgggagctaccaagagatccatggtgttcaaagacgtgctcctgcttggcaacgattatatcgtcccccggcactgtcctgaactggccgagatgtctagagttagcattcgcatcctcgacgaactggtgcttccgtttcaggagctgcaaattgatgacaatgaatacgcctacctcaaggctatcattttctttgatcccgacgcgaaagggctgtccgatcctggaaagatcaaacggctgagaagccaggtgcaggtctctctcgaggactatatcaacgatcgccagtacgactcccggggcagattcggggagctgcttctgctcctgcccacgcttcaaagcattacctggcagatgatcgaacagattcaatttatcaagctgttcggaatggccaaaattgataatctcctgcaggagatgctgctctgaggactagtccctgttcccagagcccacttttttttctttttttgaaataaaatagcctgtctttcagatctaaaaaaaaaaaaaaaaaaaaaaaaaaaaaaaaaaaaaaaaaaaaaaaaaaaaaaaaaaaaaaaaaaaaaaaaaaaaaaaaaaaaaaaaaaaaaaaaaaaa

SEQ ID NO: 4937 - RNA, 1376 nt, synthetic construct
  misc_feature 1..1376: note = mRNA a-1 (A100) (opt5) from Homo sapiens__NP_000448.3__HNF4A(1-375)(R2V)
  source 1..1376: mol_type = other RNA
aggagagtcccgcagtcggcgtccagcggctctgcttgttcgtgtgtgtgtcgttgcaggccttattcaagcttaccatggtgctgagcaagaccctcgtcgacatggatatggccgactactccgctgccctggatcccgcgtatacaacgcttgagttcgaaaacgttcaggtgctgaccatgggcaatgacacatctcctagcgaggggaccaacctcaatgctccgaactccctgggagtgtctgccctttgcgccatctgtggcgatagagctacagggaaacactacggagccagctcctgcgacggctgtaaggggtttttccggcgctctgtccggaaaaatcatatgtatagctgcagattttcccgccaatgtgtggttgataaggacaaaagaaaccagtgccggtactgtcgcctgaagaagtgcttcagagctggaatgaaaaaggaagccgtgcagaatgagcgggatcgcattagcaccagacggtcttcctatgaagacagctctctcccctccatcaacgcgctgctgcaggccgaggtcctcagccgccaaattacatctcctgtgtccggcatcaatggcgatattagagctaaaaagatcgccagcatcgctgacgtttgtgagtccatgaaagaacagctgcttgtgctggtcgagtgggccaagtacattcccgcgttttgcgaactccctctggatgaccaggtggcccttctgcgggctcacgccggggagcatctcctgctgggagctaccaagcgctctatggtgttcaaagacgtcctcctgcttggcaacgattatatcgttcccagacactgtcctgagctggccgaaatgagccgggtgtccattagaatcctcgacgagctggtgcttccgtttcaggaactgcaaattgatgacaatgagtacgcctacctcaaggctatcattttctttgatcccgacgcgaaagggctgagcgatcctggaaagatcaaacgcctgcggtctcaggtccaggtgtccctcgaagactatatcaacgatagacagtacgacagccgcggccggttcggggagctgcttctgctcctgcccacgcttcaatctattacctggcagatgatcgagcagattcaatttatcaagctgttcggaatggccaaaattgataatctcctgcaggaaatgctgctctgaggactagtccctgttcccagagcccacttttttttctttttttgaaataaaatagcctgtctttcagatctaaaaaaaaaaaaaaaaaaaaaaaaaaaaaaaaaaaaaaaaaaaaaaaaaaaaaaaaaaaaaaaaaaaaaaaaaaaaaaaaaaaaaaaaaaaaaaaaaaaa

SEQ ID NO: 4938 - RNA, 1376 nt, synthetic construct
  misc_feature 1..1376: note = mRNA a-1 (A100) (opt5) from Homo sapiens__NP_000448.3__HNF4A(1-375)(R2V_K5V)
  source 1..1376: mol_type = other RNA
aggagagtcccgcagtcggcgtccagcggctctgcttgttcgtgtgtgtgtcgttgcaggccttattcaagcttaccatggtgctgagcgtcaccctcgttgacatggatatggccgactactccgctgccctggatcccgcgtatacaacgcttgagttcgaaaacgtccaggtgctgaccatgggcaatgacacatctcctagcgaggggaccaacctcaatgctccgaactccctgggagtgtctgccctttgcgccatctgtggcgatagagctacagggaagcactacggagccagctcctgcgacggctgtaaagggtttttccggcgctctgtgagaaagaatcatatgtatagctgccggttttcccgccaatgtgttgtggataaagacaagagaaaccagtgccggtactgtcgcctgaaaaagtgcttcagagctggaatgaagaaagaagccgtccagaatgagcgggatcgcattagcaccagacggtcttcctatgaagacagctctctcccctccatcaacgcgctgctgcaggccgaggtgctcagccgccaaattacatctcctgtttccggcatcaatggcgatattagagctaagaaaatcgccagcatcgctgacgtgtgtgagtccatgaaggaacagctgcttgtcctggtggagtgggccaaatacattcccgcgttttgcgaactccctctggatgaccaggtggcccttctgcgggctcacgccggggagcatctcctgctgggagctaccaagcgctctatggtcttcaaggacgttctcctgcttggcaacgattatatcgtgcccagacactgtcctgagctggccgaaatgagccgggtgtccattagaatcctcgacgagctggtccttccgtttcaggaactgcaaattgatgacaatgagtacgcctacctcaaagctatcattttctttgatcccgacgcgaaggggctgagcgatcctggaaaaatcaagcgcctgcggtctcaggtgcaggtttccctcgaagactatatcaacgatagacagtacgacagccgcggccggttcggggagctgcttctgctcctgcccacgcttcaatctattacctggcagatgatcgagcagattcaatttatcaaactgttcggaatggccaagattgataatctcctgcaggaaatgctgctctgaggactagtccctgttcccagagcccacttttttttctttttttgaaataaaatagcctgtctttcagatctaaaaaaaaaaaaaaaaaaaaaaaaaaaaaaaaaaaaaaaaaaaaaaaaaaaaaaaaaaaaaaaaaaaaaaaaaaaaaaaaaaaaaaaaaaaaaaaaaaaa

SEQ ID NO: 4939 - RNA, 1376 nt, synthetic construct
  misc_feature 1..1376: note = mRNA a-1 (A100) (opt5) from Homo sapiens__NP_000448.3__HNF4A(1-375)(K179R_K180R)
  source 1..1376: mol_type = other RNA
aggagagtcccgcagtcggcgtccagcggctctgcttgttcgtgtgtgtgtcgttgcaggccttattcaagcttaccatgagactgagcaagaccctcgtggacatggatatggccgactactccgctgccctggatcccgcgtatacaacgcttgagttcgaaaacgtccaggttctgaccatgggcaatgacacatctcctagcgaggggaccaacctcaatgctccgaactccctgggagtgtctgccctttgcgccatctgtggcgatcgggctacagggaaacactacggagccagctcctgcgacggctgtaaggggtttttccgcagatctgtgcggaaaaatcatatgtatagctgccgcttttccagacaatgtgtcgtggataaggacaaacggaaccagtgccgctactgtagactgaagaagtgcttccgggctggaatgaaaaaggaagccgttcagaatgagcgcgatagaattagcacccggcgcagctcctatgaagacagctctctcccctccatcaacgcgctgctgcaggccgaggtgctcagcagacaaattacatctcctgtctccggcatcaatggcgatattcgggctcgcagaatcgccagcatcgctgacgtgtgtgagtccatgaaagaacagctgcttgttctggtggagtgggccaagtacattcccgcgttttgcgaactccctctggatgaccaggtcgcccttctgcgggctcacgccggggagcatctcctgctgggagctaccaaaagatctatggtgttcaaggacgtgctcctgcttggcaacgattatatcgtcccccgccactgtcctgagctggccgaaatgagccgggtttccattagaatcctcgacgagctggtgcttccgtttcaggaactgcaaattgatgacaatgagtacgcctacctcaaggctatcattttctttgatcccgacgcgaaagggctgagcgatcctggaaagatcaaacgcctgcggtctcaggtgcaggtctccctcgaagactatatcaacgatagacagtacgacagccgcggccggttcggggagctgcttctgctcctgcccacgcttcaatctattacctggcagatgatcgagcagattcaatttatcaagctgttcggaatggccaaaattgataatctcctgcaggaaatgctgctctgaggactagtccctgttcccagagcccacttttttttctttttttgaaataaaatagcctgtctttcagatctaaaaaaaaaaaaaaaaaaaaaaaaaaaaaaaaaaaaaaaaaaaaaaaaaaaaaaaaaaaaaaaaaaaaaaaaaaaaaaaaaaaaaaaaaaaaaaaaaaaa

SEQ ID NO: 4940 - RNA, 1376 nt, synthetic construct
  misc_feature 1..1376: note = mRNA a-1 (A100) (opt5) from Homo sapiens__NP_000448.3__HNF4A(1-375)(K234R)
  source 1..1376: mol_type = other RNA
aggagagtcccgcagtcggcgtccagcggctctgcttgttcgtgtgtgtgtcgttgcaggccttattcaagcttaccatgagactgagcaagaccctcgtggacatggatatggccgactactccgctgccctggatcccgcgtatacaacgcttgagttcgaaaacgtccaggttctgaccatgggcaatgacacatctcctagcgaggggaccaacctcaatgctccgaactccctgggagtgtctgccctttgcgccatctgtggcgatcgggctacagggaaacactacggagccagctcctgcgacggctgtaaggggtttttccgcagatctgtgcggaaaaatcatatgtatagctgccgcttttccagacaatgtgtcgtggataaggacaaacggaaccagtgccgctactgtagactgaagaagtgcttccgggctggaatgaaaaaggaagccgttcagaatgagcgcgatagaattagcacccggcgcagctcctatgaagacagctctctcccctccatcaacgcgctgctgcaggccgaggtgctcagcagacaaattacatctcctgtctccggcatcaatggcgatattcgggctaaaaagatcgccagcatcgctgacgtgtgtgagtccatgaaagaacagctgcttgttctggtggagtgggccaagtacattcccgcgttttgcgaactccctctggatgaccaggtcgcccttctgcgcgctcacgccggggagcatctcctgctgggagctaccagacggtctatggtgttcaaggacgtgctcctgcttggcaacgattatatcgtccccagacactgtcctgagctggccgaaatgagccgcgtttccattcggatcctcgacgagctggtgcttccgtttcaggaactgcaaattgatgacaatgagtacgcctacctcaaagctatcattttctttgatcccgacgcgaaggggctgagcgatcctggaaaaatcaagagactgcgctctcaggtgcaggtctccctcgaagactatatcaacgatcggcagtacgacagcagaggccgcttcggggagctgcttctgctcctgcccacgcttcaatctattacctggcagatgatcgagcagattcaatttatcaaactgttcggaatggccaagattgataatctcctgcaggaaatgctgctctgaggactagtccctgttcccagagcccacttttttttctttttttgaaataaaatagcctgtctttcagatctaaaaaaaaaaaaaaaaaaaaaaaaaaaaaaaaaaaaaaaaaaaaaaaaaaaaaaaaaaaaaaaaaaaaaaaaaaaaaaaaaaaaaaaaaaaaaaaaaaaa

SEQ ID NO: 4941 - RNA, 1376 nt, synthetic construct
  misc_feature 1..1376: note = mRNA a-1 (A100) (opt5) from Homo sapiens__NP_000448.3__HNF4A(1-375)(K300R)
  source 1..1376: mol_type = other RNA
aggagagtcccgcagtcggcgtccagcggctctgcttgttcgtgtgtgtgtcgttgcaggccttattcaagcttaccatgagactgagcaagaccctcgtggacatggatatggccgactactccgctgccctggatcccgcgtatacaacgcttgagttcgaaaacgtccaggttctgaccatgggcaatgacacatctcctagcgaggggaccaacctcaatgctccgaactccctgggagtgtctgccctttgcgccatctgtggcgatcgggctacagggaaacactacggagccagctcctgcgacggctgtaaggggtttttccgcagatctgtgcggaaaaatcatatgtatagctgccgcttttccagacaatgtgtcgtggataaggacaaacggaaccagtgccgctactgtagactgaagaagtgcttccgggctggaatgaaaaaggaagccgttcagaatgagcgcgatagaattagcacccggcgcagctcctatgaagacagctctctcccctccatcaacgcgctgctgcaggccgaggtgctcagcagacaaattacatctcctgtctccggcatcaatggcgatattcgggctaaaaagatcgccagcatcgctgacgtgtgtgagtccatgaaagaacagctgcttgttctggtggagtgggccaagtacattcccgcgttttgcgaactccctctggatgaccaggtcgcccttctgcgcgctcacgccggggagcatctcctgctgggagctaccaagagatctatggtgttcaaagacgtgctcctgcttggcaacgattatatcgtcccccggcactgtcctgagctggccgaaatgagcagagtttccattcgcatcctcgacgagctggtgcttccgtttcaggaactgcaaattgatgacaatgagtacgcctacctcaaggctatcattttctttgatcccgacgcgcgggggctgagcgatcctggaaaaatcaagagactgcgctctcaggtgcaggtctccctcgaagactatatcaacgatcggcagtacgacagcagaggccgcttcggggagctgcttctgctcctgcccacgcttcaatctattacctggcagatgatcgagcagattcaatttatcaaactgttcggaatggccaagattgataatctcctgcaggaaatgctgctctgaggactagtccctgttcccagagcccacttttttttctttttttgaaataaaatagcctgtctttcagatctaaaaaaaaaaaaaaaaaaaaaaaaaaaaaaaaaaaaaaaaaaaaaaaaaaaaaaaaaaaaaaaaaaaaaaaaaaaaaaaaaaaaaaaaaaaaaaaaaaaa

SEQ ID NO: 4942 - RNA, 1376 nt, synthetic construct
  misc_feature 1..1376: note = mRNA a-1 (A100) (opt5) from Homo sapiens__NP_000448.3__HNF4A(1-375)(K300R_K307R_K309R)
  source 1..1376: mol_type = other RNA
aggagagtcccgcagtcggcgtccagcggctctgcttgttcgtgtgtgtgtcgttgcaggccttattcaagcttaccatgagactgagcaagaccctcgtggacatggatatggccgactactccgctgccctggatcccgcgtatacaacgcttgagttcgaaaacgtccaggttctgaccatgggcaatgacacatctcctagcgaggggaccaacctcaatgctccgaactccctgggagtgtctgccctttgcgccatctgtggcgatcgggctacagggaaacactacggagccagctcctgcgacggctgtaaggggtttttccgcagatctgtgcggaaaaatcatatgtatagctgccgcttttccagacaatgtgtcgtggataaggacaaacggaaccagtgccgctactgtagactgaagaagtgcttccgggctggaatgaaaaaggaagccgttcagaatgagcgcgatagaattagcacccggcgcagctcctatgaagacagctctctcccctccatcaacgcgctgctgcaggccgaggtgctcagcagacaaattacatctcctgtctccggcatcaatggcgatattcgggctaaaaagatcgccagcatcgctgacgtgtgtgagtccatgaaagaacagctgcttgttctggtggagtgggccaagtacattcccgcgttttgcgaactccctctggatgaccaggtcgcccttctgcgcgctcacgccggggagcatctcctgctgggagctaccaagagatctatggtgttcaaagacgtgctcctgcttggcaacgattatatcgtcccccggcactgtcctgagctggccgaaatgagcagagtttccattcgcatcctcgacgagctggtgcttccgtttcaggaactgcaaattgatgacaatgagtacgcctacctcaaggctatcattttctttgatcccgacgcgcgggggctgagcgatcctggaagaatccgccggctgagatctcaggtgcaggtctccctcgaagactatatcaacgatcgccagtacgacagccggggcagattcggggagctgcttctgctcctgcccacgcttcaatctattacctggcagatgatcgagcagattcaatttatcaaactgttcggaatggccaagattgataatctcctgcaggaaatgctgctctgaggactagtccctgttcccagagcccacttttttttctttttttgaaataaaatagcctgtctttcagatctaaaaaaaaaaaaaaaaaaaaaaaaaaaaaaaaaaaaaaaaaaaaaaaaaaaaaaaaaaaaaaaaaaaaaaaaaaaaaaaaaaaaaaaaaaaaaaaaaaaa

SEQ ID NO: 4943 - RNA, 1376 nt, synthetic construct; identical to SEQ ID NO: 4924
  misc_feature 1..1376: note = mRNA a-1 (A100) (opt5) from Homo sapiens__NP_000448.3__HNF4A(1-375)(K447R_K470R)
  source 1..1376: mol_type = other RNA

SEQ ID NO: 4944 - RNA, 1376 nt, synthetic construct; identical to SEQ ID NO: 4924
  misc_feature 1..1376: note = mRNA a-1 (A100) (opt5) from Homo sapiens__NP_000448.3__HNF4A(1-375)(K458R)
  source 1..1376: mol_type = other RNA

SEQ ID NO: 4945 - RNA, 1376 nt, synthetic construct
  misc_feature 1..1376: note = mRNA a-1 (A100) (opt5) from Homo sapiens__NP_000448.3__HNF4A(1-375)(K106R_K108R_K126R_K127R)
  source 1..1376: mol_type = other RNA
aggagagtcccgcagtcggcgtccagcggctctgcttgttcgtgtgtgtgtcgttgcaggccttattcaagcttaccatgagactgagcaagaccctcgtggacatggatatggccgactactccgctgccctggatcccgcgtatacaacgcttgagttcgaaaacgtccaggttctgaccatgggcaatgacacatctcctagcgaggggaccaacctcaatgctccgaactccctgggagtgtctgccctttgcgccatctgtggcgatcgggctacagggaaacactacggagccagctcctgcgacggctgtaaggggtttttccgcagatctgtgcggaaaaatcatatgtatagctgccgcttttccagacaatgtgtcgtggatcgggaccgcagaaaccagtgccggtactgtcgcctgaagaaatgcttcagagctggaatgcggcgcgaagccgttcagaatgagagagatcggattagcacccgcagatcttcctatgaagacagctctctcccctccatcaacgcgctgctgcaggccgaggtgctcagccggcaaattacatctcctgtctccggcatcaatggcgatattagagctaagaagatcgccagcatcgctgacgtgtgtgagtccatgaaagaacagctgcttgttctggtggagtgggccaagtacattcccgcgttttgcgaactccctctggatgaccaggtcgcccttctgcgcgctcacgccggggagcatctcctgctgggagctaccaaacggtctatggtgttcaaggacgtgctcctgcttggcaacgattatatcgtccccagacactgtcctgagctggccgaaatgagccgcgtttccattcggatcctcgacgagctggtgcttccgtttcaggaactgcaaattgatgacaatgagtacgcctacctcaaagctatcattttctttgatcccgacgcgaaggggctgagcgatcctggaaagatcaaaagactgcgctctcaggtgcaggtctccctcgaagactatatcaacgatcggcagtacgacagcagaggccgcttcggggagctgcttctgctcctgcccacgcttcaatctattacctggcagatgatcgagcagattcaatttatcaagctgttcggaatggccaaaattgataatctcctgcaggaaatgctgctctgaggactagtccctgttcccagagcccacttttttttctttttttgaaataaaatagcctgtctttcagatctaaaaaaaaaaaaaaaaaaaaaaaaaaaaaaaaaaaaaaaaaaaaaaaaaaaaaaaaaaaaaaaaaaaaaaaaaaaaaaaaaaaaaaaaaaaaaaaaaaaa

SEQ ID NO: 4946 - RNA, 1376 nt, synthetic construct
  misc_feature 1..1376: note = mRNA a-1 (A100) (opt5) from Homo sapiens__NP_000448.3__HNF4A(1-375)(E285Q)
  source 1..1376: mol_type = other RNA
aggagagtcccgcagtcggcgtccagcggctctgcttgttcgtgtgtgtgtcgttgcaggccttattcaagcttaccatgagactgagcaagaccctcgtggacatggatatggccgactactccgctgccctggatcccgcgtatacaacgcttgagttcgaaaacgtccaggttctgaccatgggcaatgacacatctcctagcgaggggaccaacctcaatgctccgaactccctgggagtgtctgccctttgcgccatctgtggcgatcgggctacagggaaacactacggagccagctcctgcgacggctgtaaggggtttttccgcagatctgtgcggaaaaatcatatgtatagctgccgcttttccagacaatgtgtcgtggataaggacaaacggaaccagtgccgctactgtagactgaagaagtgcttccgggctggaatgaaaaaggaagccgttcagaatgagcgcgatagaattagcacccggcgcagctcctatgaagacagctctctcccctccatcaacgcgctgctgcaggccgaggtgctcagcagacaaattacatctcctgtctccggcatcaatggcgatattcgggctaaaaagatcgccagcatcgctgacgtgtgtgagtccatgaaagaacagctgcttgttctggtggagtgggccaagtacattcccgcgttttgcgaactccctctggatgaccaggtcgcccttctgcgcgctcacgccggggagcatctcctgctgggagctaccaagagatctatggtgttcaaagacgtgctcctgcttggcaacgattatatcgtcccccggcactgtcctgagctggccgaaatgagcagagtttccattcgcatcctcgacgagctggtgcttccgtttcaggaactgcaaattgatgacaatcagtacgcctacctcaaggctatcattttctttgatcccgacgcgaaagggctgagcgatcctggaaagatcaaacggctgagatctcaggtgcaggtctccctcgaggactatatcaacgatcgccaatacgacagccggggcagattcggggaactgcttctgctcctgcccacgcttcagtctattacctggcagatgatcgagcaaattcagtttatcaagctgttcggaatggccaaaattgataatctcctgcaggagatgctgctctgaggactagtccctgttcccagagcccacttttttttctttttttgaaataaaatagcctgtctttcagatctaaaaaaaaaaaaaaaaaaaaaaaaaaaaaaaaaaaaaaaaaaaaaaaaaaaaaaaaaaaaaaaaaaaaaaaaaaaaaaaaaaaaaaaaaaaaaaaaaaaa

SEQ ID NO: 4947 - RNA, 1376 nt, synthetic construct
  misc_feature 1..1376: note = mRNA a-1 (A100) (opt5) from Homo sapiens__NP_000448.3__HNF4A(1-375)(T166E)
  source 1..1376: mol_type = other RNA
aggagagtcccgcagtcggcgtccagcggctctgcttgttcgtgtgtgtgtcgttgcaggccttattcaagcttaccatgagactgagcaagaccctcgtggacatggatatggccgactactccgctgccctggatcccgcgtatacaacgcttgagttcgaaaacgtccaggttctgaccatgggcaatgacacatctcctagcgaggggaccaacctcaatgctccgaactccctgggagtgtctgccctttgcgccatctgtggcgatcgggctacagggaaacactacggagccagctcctgcgacggctgtaaggggtttttccgcagatctgtgcggaaaaatcatatgtatagctgccgcttttccagacaatgtgtcgtggataaggacaaacggaaccagtgccgctactgtagactgaagaagtgcttccgggctggaatgaaaaaggaagccgttcagaatgagcgcgatagaattagcacccggcgcagctcctatgaagacagctctctcccctccatcaacgcgctgctgcaggccgaggtgctcagcagacaaattgagtctcctgtctccggcatcaatggcgatattcgggctaaaaagatcgccagcatcgctgacgtgtgtgaatccatgaaagagcagctgcttgttctggtggaatgggccaagtacattcccgcgttttgcgagctccctctggatgaccaggtcgcccttctgcgcgctcacgccggggagcatctcctgctgggagctacaaagagatctatggtgttcaaagacgtgctcctgcttggcaacgattatatcgtcccccggcactgtcctgaactggccgagatgagcagagtttccattcgcatcctcgacgaactggtgcttccgtttcaggagctgcaaattgatgacaatgaatacgcctacctcaaggctatcattttctttgatcccgacgcgaaagggctgagcgatcctggaaagatcaaacggctgagatctcaggtgcaggtctccctcgaggactatatcaacgatcgccagtacgacagccggggcagattcggggagctgcttctgctcctgcccacccttcaatctattacgtggcagatgatcgaacagattcaatttatcaagctgttcggaatggccaaaattgataatctcctgcaggagatgctgctctgaggactagtccctgttcccagagcccacttttttttctttttttgaaataaaatagcctgtctttcagatctaaaaaaaaaaaaaaaaaaaaaaaaaaaaaaaaaaaaaaaaaaaaaaaaaaaaaaaaaaaaaaaaaaaaaaaaaaaaaaaaaaaaaaaaaaaaaaaaaaaa

SEQ ID NO: 4948 - RNA, 1376 nt, synthetic construct
  misc_feature 1..1376: note = mRNA a-1 (A100) (opt5) from Homo sapiens__NP_000448.3__HNF4A(1-375)(S148A)
  source 1..1376: mol_type = other RNA
aggagagtcccgcagtcggcgtccagcggctctgcttgttcgtgtgtgtgtcgttgcaggccttattcaagcttaccatgagactgagcaagaccctcgtggacatggatatggccgactactccgctgccctggatcccgcgtatacaacgcttgagttcgaaaacgtccaggttctgaccatgggcaatgacacatctcctagcgaggggaccaacctcaatgctccgaactccctgggagtgtctgccctttgcgccatctgtggcgatcgggctacagggaaacactacggagccagctcctgcgacggctgtaaggggtttttccgcagatctgtgcggaaaaatcatatgtatagctgccgcttttccagacaatgtgtcgtggataaggacaaacggaaccagtgccgctactgtagactgaagaagtgcttccgggctggaatgaaaaaggaagccgttcagaatgagcgcgatagaattagcacccggagatcttcctatgaagacagcgcgctcccctctatcaacgccctgctgcaggctgaggtgctctcccgccaaattacaagccctgtctctggcatcaatggcgatattcgggccaaaaagatcgcttccatcgccgacgtgtgtgagagcatgaaagaacagctgcttgttctggtggagtgggcgaagtacattcccgccttttgcgaactccctctggatgaccaggtcgcccttctgcgcgcccacgctggggagcatctcctgctgggagccaccaagagatccatggtgttcaaagacgtgctcctgcttggcaacgattatatcgtcccccggcactgtcctgagctggccgaaatgtctagagttagcattcgcatcctcgacgagctggtgcttccgtttcaggaactgcaaattgatgacaatgagtacgcttacctcaaggcgatcattttctttgatcccgacgccaaagggctgtccgatcctggaaagatcaaacggctgagaagccaggtgcaggtctctctcgaagactatatcaacgatcgccagtacgactcccggggcagattcggggagctgcttctgctcctgcccacgcttcaaagcattacctggcagatgatcgagcagattcaatttatcaagctgttcggaatggctaaaattgataatctcctgcaggaaatgctgctctgaggactagtccctgttcccagagcccacttttttttctttttttgaaataaaatagcctgtctttcagatctaaaaaaaaaaaaaaaaaaaaaaaaaaaaaaaaaaaaaaaaaaaaaaaaaaaaaaaaaaaaaaaaaaaaaaaaaaaaaaaaaaaaaaaaaaaaaaaaaaaa

SEQ ID NO: 4949 - RNA, 1376 nt, synthetic construct
  misc_feature 1..1376: note = mRNA a-1 (A100) (opt5) from Homo sapiens__NP_000448.3__HNF4A(1-375)(S148E)
  source 1..1376: mol_type = other RNA
aggagagtcccgcagtcggcgtccagcggctctgcttgttcgtgtgtgtgtcgttgcaggccttattcaagcttaccatgagactgagcaagaccctcgtggacatggatatggccgactactccgctgccctggatcccgcgtatacaacgcttgagttcgaaaacgtccaggttctgaccatgggcaatgacacatctcctagcgaggggaccaacctcaatgctccgaactccctgggagtgtctgccctttgcgccatctgtggcgatcgggctacagggaaacactacggagccagctcctgcgacggctgtaaggggtttttccgcagatctgtgcggaaaaatcatatgtatagctgccgcttttccagacaatgtgtcgtggataaggacaaacggaaccagtgccgctactgtagactgaagaagtgcttccgggctggaatgaaaaaggaagccgttcagaatgagcgcgatagaattagcacccggagatcttcctatgaagacagcgagctcccctctatcaacgcgctgctgcaggccgaggtgctctcccgccaaattacaagccctgtctctggcatcaatggcgatattcgggctaaaaagatcgcctccatcgctgacgtgtgtgaaagcatgaaagagcagctgcttgttctggtggaatgggccaagtacattcccgcgttttgcgagctccctctggatgaccaggtcgcccttctgcgcgctcacgccggggagcatctcctgctgggagctaccaagagatccatggtgttcaaagacgtgctcctgcttggcaacgattatatcgtcccccggcactgtcctgaactggccgagatgtctagagttagcattcgcatcctcgacgaactggtgcttccgtttcaggagctgcaaattgatgacaatgaatacgcctacctcaaggctatcattttctttgatcccgacgcgaaagggctgtccgatcctggaaagatcaaacggctgagaagccaggtgcaggtctctctcgaggactatatcaacgatcgccagtacgactcccggggcagattcggggagctgcttctgctcctgcccacgcttcaaagcattacctggcagatgatcgaacagattcaatttatcaagctgttcggaatggccaaaattgataatctcctgcaggagatgctgctctgaggactagtccctgttcccagagcccacttttttttctttttttgaaataaaatagcctgtctttcagatctaaaaaaaaaaaaaaaaaaaaaaaaaaaaaaaaaaaaaaaaaaaaaaaaaaaaaaaaaaaaaaaaaaaaaaaaaaaaaaaaaaaaaaaaaaaaaaaaaaaa

SEQ ID NO: 4950 - RNA, 1376 nt, synthetic construct
  misc_feature 1..1376: note = mRNA a-1 (A100) (opt5) from Homo sapiens__NP_000448.3__HNF4A(1-375)(S183A)
  source 1..1376: mol_type = other RNA
aggagagtcccgcagtcggcgtccagcggctctgcttgttcgtgtgtgtgtcgttgcaggccttattcaagcttaccatgagactgagcaagaccctcgtggacatggatatggccgactactccgctgccctggatcccgcgtatacaacgcttgagttcgaaaacgtccaggttctgaccatgggcaatgacacatctcctagcgaggggaccaacctcaatgctccgaactccctgggagtgtctgccctttgcgccatctgtggcgatcgggctacagggaaacactacggagccagctcctgcgacggctgtaaggggtttttccgcagatctgtgcggaaaaatcatatgtatagctgccgcttttccagacaatgtgtcgtggataaggacaaacggaaccagtgccgctactgtagactgaagaagtgcttccgggctggaatgaaaaaggaagccgttcagaatgagcgcgatagaattagcacccggagatcttcctatgaagacagctctctcccctccatcaacgcgctgctgcaggccgaggtgctcagccgccaaattacatctcctgtctccggcatcaatggcgatattcgggctaaaaagatcgccgctatcgccgacgtgtgtgagagcatgaaagaacagctgcttgttctggtggagtgggcgaagtacattcccgccttttgcgaactccctctggatgaccaggtcgcccttctgcgcgcccacgctggggagcatctcctgctgggagccaccaagagatccatggtgttcaaagacgtgctcctgcttggcaacgattatatcgtcccccggcactgtcctgagctggccgaaatgtctagagttagcattcgcatcctcgacgagctggtgcttccgtttcaggaactgcaaattgatgacaatgagtacgcttacctcaaggcgatcattttctttgatcccgacgccaaagggctgtccgatcctggaaagatcaaacggctgagaagccaggtgcaggtctctctcgaagactatatcaacgatcgccagtacgactcccggggcagattcggggagctgcttctgctcctgcccacgcttcaaagcattacctggcagatgatcgagcagattcaatttatcaagctgttcggaatggctaaaattgataatctcctgcaggaaatgctgctctgaggactagtccctgttcccagagcccacttttttttctttttttgaaataaaatagcctgtctttcagatctaaaaaaaaaaaaaaaaaaaaaaaaaaaaaaaaaaaaaaaaaaaaaaaaaaaaaaaaaaaaaaaaaaaaaaaaaaaaaaaaaaaaaaaaaaaaaaaaaaaa

SEQ ID NO: 4951 - RNA, 1376 nt, synthetic construct
  misc_feature 1..1376: note = mRNA a-1 (A100) (opt5) from Homo sapiens__NP_000448.3__HNF4A(1-375)(S183E)
  source 1..1376: mol_type = other RNA
aggagagtcccgcagtcggcgtccagcggctctgcttgttcgtgtgtgtgtcgttgcaggccttattcaagcttaccatgagactgagcaagaccctcgtggacatggatatggccgactactccgctgccctggatcccgcgtatacaacgcttgagttcgaaaacgtccaggttctgaccatgggcaatgacacatctcctagcgaggggaccaacctcaatgctccgaactccctgggagtgtctgccctttgcgccatctgtggcgatcgggctacagggaaacactacggagccagctcctgcgacggctgtaaggggtttttccgcagatctgtgcggaaaaatcatatgtatagctgccgcttttccagacaatgtgtcgtggataaggacaaacggaaccagtgccgctactgtagactgaagaagtgcttccgggctggaatgaaaaaggaagccgttcagaatgagcgcgatagaattagcacccggagatcttcctatgaagacagctctctcccctccatcaacgcgctgctgcaggccgaggtgctcagccgccaaattacatctcctgtctccggcatcaatggcgatattcgggctaaaaagatcgccgagatcgctgacgtgtgtgaaagcatgaaagagcagctgcttgttctggtggaatgggccaagtacattcccgcgttttgcgagctccctctggatgaccaggtcgcccttctgcgcgctcacgccggggagcatctcctgctgggagctaccaagagatccatggtgttcaaagacgtgctcctgcttggcaacgattatatcgtcccccggcactgtcctgaactggccgagatgtctagagttagcattcgcatcctcgacgaactggtgcttccgtttcaggagctgcaaattgatgacaatgaatacgcctacctcaaggctatcattttctttgatcccgacgcgaaagggctgtccgatcctggaaagatcaaacggctgagaagccaggtgcaggtctctctcgaggactatatcaacgatcgccagtacgactcccggggcagattcggggagctgcttctgctcctgcccacgcttcaaagcattacctggcagatgatcgaacagattcaatttatcaagctgttcggaatggccaaaattgataatctcctgcaggagatgctgctctgaggactagtccctgttcccagagcccacttttttttctttttttgaaataaaatagcctgtctttcagatctaaaaaaaaaaaaaaaaaaaaaaaaaaaaaaaaaaaaaaaaaaaaaaaaaaaaaaaaaaaaaaaaaaaaaaaaaaaaaaaaaaaaaaaaaaaaaaaaaaaa

SEQ ID NO: 4952 - RNA, 1376 nt, synthetic construct; identical to SEQ ID NO: 4924
  misc_feature 1..1376: note = mRNA a-1 (A100) (opt5) from Homo sapiens__NP_000448.3__HNF4A(1-375)(S461A)
  source 1..1376: mol_type = other RNA

SEQ ID NO: 4953 - RNA, 1376 nt, synthetic construct; identical to SEQ ID NO: 4924
  misc_feature 1..1376: note = mRNA a-1 (A100) (opt5) from Homo sapiens__NP_000448.3__HNF4A(1-375)(S461E)
  source 1..1376: mol_type = other RNA

SEQ ID NO: 4954 - RNA, 1376 nt, synthetic construct
  misc_feature 1..1376: note = mRNA a-1 (A100) (opt5) from Homo sapiens__NP_000448.3__HNF4A(1-375)(S142A_S143A_S313A)
  source 1..1376: mol_type = other RNA
aggagagtcccgcagtcggcgtccagcggctctgcttgttcgtgtgtgtgtcgttgcaggccttattcaagcttaccatgagactgagcaagaccctcgtggacatggatatggccgactactccgctgccctggatcccgcgtatacaacgcttgagttcgaaaacgtccaggttctgaccatgggcaatgacacatctcctagcgaggggaccaacctcaatgctccgaactccctgggagtgtctgccctttgcgccatctgtggcgatcgggctacagggaaacactacggagccagctcctgcgacggctgtaaggggtttttccgcagatctgtgcggaaaaatcatatgtatagctgccgcttttccagacaatgtgtcgtggataaggacaaacggaaccagtgccgctactgtagactgaagaagtgcttccgggctggaatgaaaaaggaagccgttcagaatgagcgcgatagaattagcacccggcgcgcggcctatgaagactcttccctccccagcatcaacgctctgctgcaggccgaggtgctctctagacaaattacatcccctgtcagcggcatcaatggcgatattcgggctaaaaagatcgcctctatcgcggacgtgtgtgagtccatgaaagaacagctgcttgttctggtggagtgggccaagtacattcccgctttttgcgaactccctctggatgaccaggtcgcccttctgcgcgctcacgccggggagcatctcctgctgggagccaccaagagaagcatggtgttcaaagacgtgctcctgcttggcaacgattatatcgtcccccggcactgtcctgagctggctgaaatgtccagagtttctattcgcatcctcgacgagctggtgcttccgtttcaggaactgcaaattgatgacaatgagtacgcgtacctcaaggccatcattttctttgatcccgacgctaaagggctgagcgatcctggaaagatcaaacggctgagagcccaggtgcaggtctccctcgaagactatatcaacgatcgccagtacgacagccggggcagattcggggagctgcttctgctcctgcccacgcttcaatctattacctggcagatgatcgagcagattcaatttatcaagctgttcggaatggccaaaattgataatctcctgcaggaaatgctgctctgaggactagtccctgttcccagagcccacttttttttctttttttgaaataaaatagcctgtctttcagatctaaaaaaaaaaaaaaaaaaaaaaaaaaaaaaaaaaaaaaaaaaaaaaaaaaaaaaaaaaaaaaaaaaaaaaaaaaaaaaaaaaaaaaaaaaaaaaaaaaaa

SEQ ID NO: 4955 - RNA, 1376 nt, synthetic construct; identical to SEQ ID NO: 4954
  misc_feature 1..1376: note = mRNA a-1 (A100) (opt5) from Homo sapiens__NP_000448.3__HNF4A(1-375)(S142A_S143A_S313A_K458R)
  source 1..1376: mol_type = other RNA

SEQ ID NO: 4956 - RNA, 1376 nt, synthetic construct
  misc_feature 1..1376: note = mRNA a-1 (A100) (opt5) from Homo sapiens__NP_000448.3__HNF4A(1-375)(S142A_S143A_S167A_S313A_ S378A_T429A_T432A_S436A_K458R)
  source 1..1376: mol_type = other RNA
aggagagtcccgcagtcggcgtccagcggctctgcttgttcgtgtgtgtgtcgttgcaggccttattcaagcttaccatgagactgagcaagaccctcgtggacatggatatggccgactactccgctgccctggatcccgcgtatacaacgcttgagttcgaaaacgtccaggttctgaccatgggcaatgacacatctcctagcgaggggaccaacctcaatgctccgaactccctgggagtgtctgccctttgcgccatctgtggcgatcgggctacagggaaacactacggagccagctcctgcgacggctgtaaggggtttttccgcagatctgtgcggaaaaatcatatgtatagctgccgcttttccagacaatgtgtcgtggataaggacaaacggaaccagtgccgctactgtagactgaagaagtgcttccgggctggaatgaaaaaggaagccgttcagaatgagcgcgatagaattagcacccggcgcgcggcctatgaagactcttccctccccagcatcaacgctctgctgcaggccgaggtgctctctagacaaattacagctcctgtctccggcatcaatggcgatattcgggccaaaaagatcgcgagcatcgccgacgtgtgtgagtctatgaaagaacagctgcttgttctggtggagtgggctaagtacattcccgccttttgcgaactccctctggatgaccaggtcgcccttctgcgcgcccacgccggggagcatctcctgctgggagctaccaagagatccatggtgttcaaagacgtgctcctgcttggcaacgattatatcgtcccccggcactgtcctgagctggcggaaatgagcagagtttccattcgcatcctcgacgagctggtgcttccgtttcaggaactgcaaattgatgacaatgagtacgcctacctcaaggctatcattttctttgatcccgacgccaaagggctgtctgatcctggaaagatcaaacggctgagagcccaggtgcaggtcagcctcgaagactatatcaacgatcgccagtacgactcccggggcagattcggggagctgcttctgctcctgcccacgcttcaaagcattacctggcagatgatcgagcagattcaatttatcaagctgttcggaatggctaaaattgataatctcctgcaggaaatgctgctctgaggactagtccctgttcccagagcccacttttttttctttttttgaaataaaatagcctgtctttcagatctaaaaaaaaaaaaaaaaaaaaaaaaaaaaaaaaaaaaaaaaaaaaaaaaaaaaaaaaaaaaaaaaaaaaaaaaaaaaaaaaaaaaaaaaaaaaaaaaaaaa

SEQ ID NO: 4957 - RNA, 1376 nt, synthetic construct
  misc_feature 1..1376: note = mRNA a-1 (A100) (opt5) from Homo sapiens__NP_000448.3__HNF4A(1-375)(S142A_S143A_S148A_S167A_ S313A_S378A_T429A_T432A_S436A_K458R)
  source 1..1376: mol_type = other RNA
aggagagtcccgcagtcggcgtccagcggctctgcttgttcgtgtgtgtgtcgttgcaggccttattcaagcttaccatgagactgagcaagaccctcgtggacatggatatggccgactactccgctgccctggatcccgcgtatacaacgcttgagttcgaaaacgtccaggttctgaccatgggcaatgacacatctcctagcgaggggaccaacctcaatgctccgaactccctgggagtgtctgccctttgcgccatctgtggcgatcgggctacagggaaacactacggagccagctcctgcgacggctgtaaggggtttttccgcagatctgtgcggaaaaatcatatgtatagctgccgcttttccagacaatgtgtcgtggataaggacaaacggaaccagtgccgctactgtagactgaagaagtgcttccgggctggaatgaaaaaggaagccgttcagaatgagcgcgatagaattagcacccggcgcgcggcctatgaagactctgctctcccctccatcaacgccctgctgcaggctgaggtgctcagcagacaaattacagcccctgtctctggcatcaatggcgatattcgggcgaaaaagatcgcctccatcgctgacgtgtgtgagagcatgaaagaacagctgcttgttctggtggagtgggccaagtacattcccgctttttgcgaactccctctggatgaccaggtcgcccttctgcgcgcccacgctggggagcatctcctgctgggagcgaccaagagatctatggtgttcaaagacgtgctcctgcttggcaacgattatatcgtcccccggcactgtcctgagctggccgaaatgtccagagttagcattcgcatcctcgacgagctggtgcttccgtttcaggaactgcaaattgatgacaatgagtacgcttacctcaaggccatcattttctttgatcccgacgccaaagggctgtccgatcctggaaagatcaaacggctgagagctcaggtgcaggtctctctcgaagactatatcaacgatcgccagtacgacagccggggcagattcggggagctgcttctgctcctgcccacgcttcaatccattacctggcagatgatcgagcagattcaatttatcaagctgttcggaatggccaaaattgataatctcctgcaggaaatgctgctctgaggactagtccctgttcccagagcccacttttttttctttttttgaaataaaatagcctgtctttcagatctaaaaaaaaaaaaaaaaaaaaaaaaaaaaaaaaaaaaaaaaaaaaaaaaaaaaaaaaaaaaaaaaaaaaaaaaaaaaaaaaaaaaaaaaaaaaaaaaaaaa

SEQ ID NO: 4958 - RNA, 1376 nt, synthetic construct
  misc_feature 1..1376: note = mRNA a-1 (A100) (opt5) from Homo sapiens__NP_000448.3__HNF4A(1-375)(K106R_K108R_K126R_K127R_ S142A_S143A_S148A_S167A_S313A_S378A_T429A_T432A_S436A_K458R )
  source 1..1376: mol_type = other RNA
aggagagtcccgcagtcggcgtccagcggctctgcttgttcgtgtgtgtgtcgttgcaggccttattcaagcttaccatgagactgagcaagaccctcgtggacatggatatggccgactactccgctgccctggatcccgcgtatacaacgcttgagttcgaaaacgtccaggttctgaccatgggcaatgacacatctcctagcgaggggaccaacctcaatgctccgaactccctgggagtgtctgccctttgcgccatctgtggcgatcgggctacagggaaacactacggagccagctcctgcgacggctgtaaggggtttttccgcagatctgtgcggaaaaatcatatgtatagctgccgcttttccagacaatgtgtcgtggatcgggaccgcagaaaccagtgccggtactgtcgcctgaagaaatgcttcagagctggaatgcggcgcgaagccgttcagaatgagagagatcggattagcacccgcagagcggcctatgaagactctgctctcccctccatcaacgccctgctgcaggctgaggtgctcagccggcaaattacagcccctgtctctggcatcaatggcgatattagagcgaagaagatcgcctccatcgctgacgtgtgtgagagcatgaaagaacagctgcttgttctggtggagtgggccaagtacattcccgctttttgcgaactccctctggatgaccaggtcgcccttctgcgcgcccacgctggggagcatctcctgctgggagcgaccaaacggtctatggtgttcaaggacgtgctcctgcttggcaacgattatatcgtccccagacactgtcctgagctggccgaaatgtcccgcgttagcattcggatcctcgacgagctggtgcttccgtttcaggaactgcaaattgatgacaatgagtacgcttacctcaaagccatcattttctttgatcccgacgccaaggggctgtccgatcctggaaagatcaaaagactgcgcgctcaggtgcaggtctctctcgaagactatatcaacgatcggcagtacgacagcagaggccgcttcggggagctgcttctgctcctgcccacgcttcaatccattacctggcagatgatcgagcagattcaatttatcaagctgttcggaatggccaaaattgataatctcctgcaggaaatgctgctctgaggactagtccctgttcccagagcccacttttttttctttttttgaaataaaatagcctgtctttcagatctaaaaaaaaaaaaaaaaaaaaaaaaaaaaaaaaaaaaaaaaaaaaaaaaaaaaaaaaaaaaaaaaaaaaaaaaaaaaaaaaaaaaaaaaaaaaaaaaaaaa

SEQ ID NO: 4959 - RNA, 1376 nt, synthetic construct
  misc_feature 1..1376: note = mRNA a-1 (A100) (opt5) from Homo sapiens__NP_000448.3__HNF4A(1-375)(S142A_S143A_S148A_T166A_ S167A_S313A_S378A_T429A_T432A_S436A_K458R)
  source 1..1376: mol_type = other RNA
aggagagtcccgcagtcggcgtccagcggctctgcttgttcgtgtgtgtgtcgttgcaggccttattcaagcttaccatgagactgagcaagaccctcgtggacatggatatggccgactactccgctgccctggatcccgcgtatacaacgcttgagttcgaaaacgtccaggttctgaccatgggcaatgacacatctcctagcgaggggaccaacctcaatgctccgaactccctgggagtgtctgccctttgcgccatctgtggcgatcgggctacagggaaacactacggagccagctcctgcgacggctgtaaggggtttttccgcagatctgtgcggaaaaatcatatgtatagctgccgcttttccagacaatgtgtcgtggataaggacaaacggaaccagtgccgctactgtagactgaagaagtgcttccgggctggaatgaaaaaggaagccgttcagaatgagcgcgatagaattagcacccggcgcgcggcctatgaagactctgctctcccctccatcaacgccctgctgcaggctgaggtgctcagcagacaaattgccgcgcctgtctctggcatcaatggcgatattcgggccaaaaagatcgcttccatcgccgacgtgtgtgagagcatgaaagaacagctgcttgttctggtggagtgggctaagtacattcccgccttttgcgaactccctctggatgaccaggtcgcccttctgcgcgctcacgcgggggagcatctcctgctgggagccacaaagagatctatggtgttcaaagacgtgctcctgcttggcaacgattatatcgtcccccggcactgtcctgagctggctgaaatgtccagagttagcattcgcatcctcgacgagctggtgcttccgtttcaggaactgcaaattgatgacaatgagtacgcctacctcaaggccatcattttctttgatcccgacgctaaagggctgtccgatcctggaaagatcaaacggctgagagcccaggtgcaggtctctctcgaagactatatcaacgatcgccagtacgacagccggggcagattcggggagctgcttctgctcctgcccacccttcaatccattacgtggcagatgatcgagcagattcaatttatcaagctgttcggaatggcgaaaattgataatctcctgcaggaaatgctgctctgaggactagtccctgttcccagagcccacttttttttctttttttgaaataaaatagcctgtctttcagatctaaaaaaaaaaaaaaaaaaaaaaaaaaaaaaaaaaaaaaaaaaaaaaaaaaaaaaaaaaaaaaaaaaaaaaaaaaaaaaaaaaaaaaaaaaaaaaaaaaaa

SEQ ID NO: 4960 - RNA, 1376 nt, synthetic construct
  misc_feature 1..1376: note = mRNA a-1 (A100) (opt5) from Homo sapiens__NP_000448.3__HNF4A(1-375)(S87A_S142A_S143A_S148A_T 166A_S167A_S313A_S378A_T429A_T432A_S436A_K458R)
  source 1..1376: mol_type = other RNA
aggagagtcccgcagtcggcgtccagcggctctgcttgttcgtgtgtgtgtcgttgcaggccttattcaagcttaccatgagactgagcaagaccctcgtggacatggatatggccgactactccgctgccctggatcccgcgtatacaacgcttgagttcgaaaacgtccaggttctgaccatgggcaatgacacatctcctagcgaggggaccaacctcaatgctccgaactccctgggagtgtctgccctttgcgccatctgtggcgatcgggctacagggaaacactacggagccagctcctgcgacggctgtaaggggtttttccgcagagctgtgcggaaaaatcatatgtattcttgccgctttagcagacaatgtgtcgtggataaggacaaacggaaccagtgccgctactgtagactgaagaagtgcttccgggccggaatgaaaaaggaagcggttcagaatgagcgcgatagaatttccacccggcgcgccgcttatgaagacagcgccctcccctctatcaacgctctgctgcaggccgaggtgctctccagacaaattgcggcccctgtcagcggcatcaatggcgatattcgggctaaaaagatcgcctctatcgctgacgtgtgtgagtccatgaaagaacagctgcttgttctggtggagtgggccaagtacattcccgccttttgcgaactccctctggatgaccaggtcgcccttctgcgcgcgcacgccggggagcatctcctgctgggagctacaaagagaagcatggtgttcaaagacgtgctcctgcttggcaacgattatatcgtcccccggcactgtcctgagctggccgaaatgtctagagtttccattcgcatcctcgacgagctggtgcttccgtttcaggaactgcaaattgatgacaatgagtacgcctacctcaaggctatcattttctttgatcccgacgccaaagggctgagcgatcctggaaagatcaaacggctgagagctcaggtgcaggtctccctcgaagactatatcaacgatcgccagtacgactctcggggcagattcggggagctgcttctgctcctgcccacccttcaaagcattacgtggcagatgatcgagcagattcaatttatcaagctgttcggaatggcgaaaattgataatctcctgcaggaaatgctgctctgaggactagtccctgttcccagagcccacttttttttctttttttgaaataaaatagcctgtctttcagatctaaaaaaaaaaaaaaaaaaaaaaaaaaaaaaaaaaaaaaaaaaaaaaaaaaaaaaaaaaaaaaaaaaaaaaaaaaaaaaaaaaaaaaaaaaaaaaaaaaaa

SEQ ID NO: 4961 - RNA, 1376 nt, synthetic construct
  misc_feature 1..1376: note = mRNA a-1 (A100) (opt5) from Homo sapiens__NP_000448.3__HNF4A(1-375)(S87A_K106R_K108R_K126R_K 127R_S142A_S143A_S148A_T166A_S167A_S313A_S378A_T429A_T432A_ S436A_K458R)
  source 1..1376: mol_type = other RNA
aggagagtcccgcagtcggcgtccagcggctctgcttgttcgtgtgtgtgtcgttgcaggccttattcaagcttaccatgagactgagcaagaccctcgtggacatggatatggccgactactccgctgccctggatcccgcgtatacaacgcttgagttcgaaaacgtccaggttctgaccatgggcaatgacacatctcctagcgaggggaccaacctcaatgctccgaactccctgggagtgtctgccctttgcgccatctgtggcgatcgggctacagggaaacactacggagccagctcctgcgacggctgtaaggggtttttccgcagagctgtgcggaaaaatcatatgtattcttgccgctttagcagacaatgtgtcgtggatcgggaccgcagaaaccagtgccggtactgtcgcctgaagaaatgcttcagagccggaatgcggcgcgaagcggttcagaatgagagagatcggatttccacccgcagagccgcttatgaagacagcgccctcccctctatcaacgctctgctgcaggccgaggtgctctcccggcaaattgcggcccctgtcagcggcatcaatggcgatattagagctaagaagatcgcctctatcgctgacgtgtgtgagtccatgaaagaacagctgcttgttctggtggagtgggccaagtacattcccgccttttgcgaactccctctggatgaccaggtcgcccttctgcgcgcgcacgccggggagcatctcctgctgggagctacaaaacggagcatggtgttcaaggacgtgctcctgcttggcaacgattatatcgtccccagacactgtcctgagctggccgaaatgtctcgcgtttccattcggatcctcgacgagctggtgcttccgtttcaggaactgcaaattgatgacaatgagtacgcctacctcaaagctatcattttctttgatcccgacgccaaggggctgagcgatcctggaaagatcaaaagactgcgcgctcaggtgcaggtctccctcgaagactatatcaacgatcggcagtacgactctagaggccgcttcggggagctgcttctgctcctgcccacccttcaaagcattacgtggcagatgatcgagcagattcaatttatcaagctgttcggaatggcgaaaattgataatctcctgcaggaaatgctgctctgaggactagtccctgttcccagagcccacttttttttctttttttgaaataaaatagcctgtctttcagatctaaaaaaaaaaaaaaaaaaaaaaaaaaaaaaaaaaaaaaaaaaaaaaaaaaaaaaaaaaaaaaaaaaaaaaaaaaaaaaaaaaaaaaaaaaaaaaaaaaaa

SEQ ID NO: 4962 - RNA, 1376 nt, synthetic construct
  misc_feature 1..1376: note = mRNA a-1 (A100) (opt5) from Homo sapiens__NP_000448.3__HNF4A(1-375)(S87A_K106R_K108R_K126R_K 127R)
  source 1..1376: mol_type = other RNA
aggagagtcccgcagtcggcgtccagcggctctgcttgttcgtgtgtgtgtcgttgcaggccttattcaagcttaccatgagactgagcaagaccctcgtggacatggatatggccgactactccgctgccctggatcccgcgtatacaacgcttgagttcgaaaacgtccaggttctgaccatgggcaatgacacatctcctagcgaggggaccaacctcaatgctccgaactccctgggagtgtctgccctttgcgccatctgtggcgatcgggctacagggaaacactacggagccagctcctgcgacggctgtaaggggtttttccgcagagctgtgcggaaaaatcatatgtattcttgccgctttagcagacaatgtgtcgtggatcgggaccgcagaaaccagtgccggtactgtcgcctgaagaaatgcttcagagccggaatgcggcgcgaagcggttcagaatgagagagatcggatttccacccgcagaagctcttatgaagactccagcctcccctctatcaacgccctgctgcaggctgaggtgctctcccggcaaattacaagccctgtctctggcatcaatggcgatattagagccaagaagatcgcttccatcgccgacgtgtgtgagagcatgaaagaacagctgcttgttctggtggagtgggcgaagtacattcccgccttttgcgaactccctctggatgaccaggtcgcccttctgcgcgcccacgctggggagcatctcctgctgggagccaccaaacggtccatggtgttcaaggacgtgctcctgcttggcaacgattatatcgtccccagacactgtcctgagctggccgaaatgtctcgcgttagcattcggatcctcgacgagctggtgcttccgtttcaggaactgcaaattgatgacaatgagtacgcttacctcaaagcgatcattttctttgatcccgacgccaaggggctgtccgatcctggaaagatcaaaagactgcgcagccaggtgcaggtctctctcgaagactatatcaacgatcggcagtacgactccagaggccgcttcggggagctgcttctgctcctgcccacgcttcaaagcattacctggcagatgatcgagcagattcaatttatcaagctgttcggaatggctaaaattgataatctcctgcaggaaatgctgctctgaggactagtccctgttcccagagcccacttttttttctttttttgaaataaaatagcctgtctttcagatctaaaaaaaaaaaaaaaaaaaaaaaaaaaaaaaaaaaaaaaaaaaaaaaaaaaaaaaaaaaaaaaaaaaaaaaaaaaaaaaaaaaaaaaaaaaaaaaaaaaa

SEQ ID NO: 4963 - RNA, 1376 nt, synthetic construct; identical to SEQ ID NO: 4961
  misc_feature 1..1376: note = mRNA a-1 (A100) (opt5) from Homo sapiens__NP_000448.3__HNF4A(1-375)(S87A_K106R_K108R_K126R_K 127R_S142A_S143A_S148A_T166A_S167A_S313A_S378A_T429A_T432A_ S436A_K458R_S461A)
  source 1..1376: mol_type = other RNA

SEQ ID NO: 4964 - RNA, 1376 nt, synthetic construct; identical to SEQ ID NO: 4961
  misc_feature 1..1376: note = mRNA a-1 (A100) (opt5) from Homo sapiens__NP_000448.3__HNF4A(1-375)(S87A_K106R_K108R_K126R_K 127R_S142A_S143A_S148A_T166A_S167A_S313A_S378A_T429A_T432A_ S436A_K458R_S461E)
  source 1..1376: mol_type = other RNA

SEQ ID NO: 4965 - RNA, 1376 nt, synthetic construct
  misc_feature 1..1376: note = mRNA a-1 (A100) (opt5) from Homo sapiens__NP_000448.3__HNF4A(1-375)(S87A_K106R_K108R_K126R_K 127R_S142A_S143A_S148E_T166A_S167E_S313A_S378E_T429E_T432E_ S436E_K458R_S461E)
  source 1..1376: mol_type = other RNA
aggagagtcccgcagtcggcgtccagcggctctgcttgttcgtgtgtgtgtcgttgcaggccttattcaagcttaccatgagactgagcaagaccctcgtggacatggatatggccgactactccgctgccctggatcccgcgtatacaacgcttgagttcgaaaacgtccaggttctgaccatgggcaatgacacatctcctagcgaggggaccaacctcaatgctccgaactccctgggagtgtctgccctttgcgccatctgtggcgatcgggctacagggaaacactacggagccagctcctgcgacggctgtaaggggtttttccgcagagctgtgcggaaaaatcatatgtattcttgccgctttagcagacaatgtgtcgtggatcgggaccgcagaaaccagtgccggtactgtcgcctgaagaaatgcttcagagccggaatgcggcgcgaagcggttcagaatgagagagatcggatttccacccgcagagccgcttatgaagacagcgagctcccctctatcaacgccctgctgcaggctgaggtgctctcccggcaaattgccgaacctgtcagcggcatcaatggcgatattagagcgaagaagatcgcctctatcgctgacgtgtgtgagtccatgaaagaacagctgcttgttctggtggagtgggccaagtacattcccgctttttgcgagctccctctggatgaccaggtcgcccttctgcgcgcccacgctggggaacatctcctgctgggagcgacaaaacggagcatggtgttcaaggacgtgctcctgcttggcaacgattatatcgtccccagacactgtcctgagctggccgaaatgtctcgcgtttccattcggatcctcgacgagctggtgcttccgtttcaggaactgcaaattgatgacaatgagtacgcttacctcaaagccatcattttctttgatcccgacgccaaggggctgagcgatcctggaaagatcaaaagactgcgcgctcaggtgcaggtctccctcgaggactatatcaacgatcggcagtacgactctagaggccgcttcggggaactgcttctgctcctgcccacccttcaaagcattacgtggcagatgatcgagcagattcaatttatcaagctgttcggaatggccaaaattgataatctcctgcaggaaatgctgctctgaggactagtccctgttcccagagcccacttttttttctttttttgaaataaaatagcctgtctttcagatctaaaaaaaaaaaaaaaaaaaaaaaaaaaaaaaaaaaaaaaaaaaaaaaaaaaaaaaaaaaaaaaaaaaaaaaaaaaaaaaaaaaaaaaaaaaaaaaaaaaa

SEQ ID NO: 4966 - RNA, 1376 nt, synthetic construct
  misc_feature 1..1376: note = mRNA a-1 (A100) (opt5) from Homo sapiens__NP_000448.3__HNF4A(1-375)(S87A_K106R_K108R_K126R_K 127R_S142A_S143A_S148A_T166A_S167A_K179R_K180R_S313A_S378A_ T429A_T432A_S436A_K458R_S461E)
  source 1..1376: mol_type = other RNA
aggagagtcccgcagtcggcgtccagcggctctgcttgttcgtgtgtgtgtcgttgcaggccttattcaagcttaccatgagactgagcaagaccctcgtggacatggatatggccgactactccgctgccctggatcccgcgtatacaacgcttgagttcgaaaacgtccaggttctgaccatgggcaatgacacatctcctagcgaggggaccaacctcaatgctccgaactccctgggagtgtctgccctttgcgccatctgtggcgatcgggctacagggaaacactacggagccagctcctgcgacggctgtaaggggtttttccgcagagctgtgcggaaaaatcatatgtattcttgccgctttagcagacaatgtgtcgtggatcgggaccgcagaaaccagtgccggtactgtcgcctgaagaaatgcttcagagccggaatgcggcgcgaagcggttcagaatgagagagatcggatttccacccgcagagccgcttatgaagacagcgccctcccctctatcaacgctctgctgcaggccgaggtgctctcccggcaaattgcggcccctgtcagcggcatcaatggcgatattagagctcgccggatcgcctctatcgctgacgtgtgtgagtccatgaaggaacagctgcttgttctggtggagtgggccaagtacattcccgccttttgcgaactccctctggatgaccaggtcgcccttctgagagcgcacgccggggagcatctcctgctgggagctacaaaacgcagcatggtgttcaaggacgtgctcctgcttggcaacgattatatcgtcccccggcactgtcctgagctggccgaaatgtctagagtttccattcgcatcctcgacgagctggtgcttccgtttcaggaactgcaaattgatgacaatgagtacgcctacctcaaagctatcattttctttgatcccgacgccaaggggctgagcgatcctggaaaaatcaagcggctgagagctcaggtgcaggtctccctcgaagactatatcaacgatcgccagtacgactctcggggcagattcggggagctgcttctgctcctgcccacccttcaaagcattacgtggcagatgatcgagcagattcaatttatcaagctgttcggaatggcgaaaattgataatctcctgcaggaaatgctgctctgaggactagtccctgttcccagagcccacttttttttctttttttgaaataaaatagcctgtctttcagatctaaaaaaaaaaaaaaaaaaaaaaaaaaaaaaaaaaaaaaaaaaaaaaaaaaaaaaaaaaaaaaaaaaaaaaaaaaaaaaaaaaaaaaaaaaaaaaaaaaaa

SEQ ID NO: 4967 - RNA, 1376 nt, synthetic construct
  misc_feature 1..1376: note = mRNA a-1 (A100) (opt5) from Homo sapiens__NP_000448.3__HNF4A(1-375)(S87A_K106R_K108R_K126R_K 127R_S142A_S143A_S148A_T166A_S167A_K300R_K307R_K309R_S313A_ S378A_T429A_T432A_S436A_K458R_S461E)
  source 1..1376: mol_type = other RNA
aggagagtcccgcagtcggcgtccagcggctctgcttgttcgtgtgtgtgtcgttgcaggccttattcaagcttaccatgagactgagcaagaccctcgtggacatggatatggccgactactccgctgccctggatcccgcgtatacaacgcttgagttcgaaaacgtccaggttctgaccatgggcaatgacacatctcctagcgaggggaccaacctcaatgctccgaactccctgggagtgtctgccctttgcgccatctgtggcgatcgggctacagggaaacactacggagccagctcctgcgacggctgtaaggggtttttccgcagagctgtgcggaaaaatcatatgtattcttgccgctttagcagacaatgtgtcgtggatcgggaccgcagaaaccagtgccggtactgtcgcctgaagaaatgcttcagagccggaatgcggcgcgaagcggttcagaatgagagagatcggatttccacccgcagagccgcttatgaagacagcgccctcccctctatcaacgctctgctgcaggccgaggtgctctcccggcaaattgcggcccctgtcagcggcatcaatggcgatattagagctaagaagatcgcctctatcgctgacgtgtgtgagtccatgaaagaacagctgcttgttctggtggagtgggccaagtacattcccgccttttgcgaactccctctggatgaccaggtcgcccttctgcgcgcgcacgccggggagcatctcctgctgggagctacaaaacggagcatggtgttcaaggacgtgctcctgcttggcaacgattatatcgtccccagacactgtcctgagctggccgaaatgtctcgcgtttccattcggatcctcgacgagctggtgcttccgtttcaggaactgcaaattgatgacaatgagtacgcctacctcaaagctatcattttctttgatcccgacgccagagggctgagcgatcctggacgcatccggagactgcgcgctcaggtgcaggtctccctcgaagactatatcaacgatcggcagtacgactctagaggccgcttcggggagctgcttctgctcctgcccacccttcaaagcattacgtggcagatgatcgagcagattcaatttatcaagctgttcggaatggcgaagattgataatctcctgcaggaaatgctgctctgaggactagtccctgttcccagagcccacttttttttctttttttgaaataaaatagcctgtctttcagatctaaaaaaaaaaaaaaaaaaaaaaaaaaaaaaaaaaaaaaaaaaaaaaaaaaaaaaaaaaaaaaaaaaaaaaaaaaaaaaaaaaaaaaaaaaaaaaaaaaaa

SEQ ID NO: 4968 - RNA, 1376 nt, synthetic construct; identical to SEQ ID NO: 4961
  misc_feature 1..1376: note = mRNA a-1 (A100) (opt5) from Homo sapiens__NP_000448.3__HNF4A(1-375)(S87A_K106R_K108R_K126R_K 127R_S142A_S143A_S148A_T166A_S167A_S313A_S378A_T429A_T432A_ S436A_K447R_K458R_S461E_K470R)
  source 1..1376: mol_type = other RNA

SEQ ID NO: 4969 - RNA, 1376 nt, synthetic construct
  misc_feature 1..1376: note = mRNA a-1 (A100) (opt5) from Homo sapiens__NP_000448.3__HNF4A(1-375)(S87A_K106R_K108R_K126R_K 127R_S142A_S143A_S148A_T166A_S167A_K179R_K180R_K234R_K300R_ K307R_K309R_S313A_S378A_T429A_T432A_S436A_K447R_K458R_S461E _K470R)
  source 1..1376: mol_type = other RNA
aggagagtcccgcagtcggcgtccagcggctctgcttgttcgtgtgtgtgtcgttgcaggccttattcaagcttaccatgagactgagcaagaccctcgtggacatggatatggccgactactccgctgccctggatcccgcgtatacaacgcttgagttcgaaaacgtccaggttctgaccatgggcaatgacacatctcctagcgaggggaccaacctcaatgctccgaactccctgggagtgtctgccctttgcgccatctgtggcgatcgggctacagggaaacactacggagccagctcctgcgacggctgtaaggggtttttccgcagagctgtgcggaaaaatcatatgtattcttgccgctttagcagacaatgtgtcgtggatcgggaccgcagaaaccagtgccggtactgtcgcctgaagaaatgcttcagagccggaatgcggcgcgaagcggttcagaatgagagagatcggatttccacccgcagagccgcttatgaagacagcgccctcccctctatcaacgctctgctgcaggccgaggtgctctcccggcaaattgcggcccctgtcagcggcatcaatggcgatattagagctcgccggatcgcctctatcgctgacgtgtgtgagtccatgaaggaacagctgcttgttctggtggagtgggccaagtacattcccgccttttgcgaactccctctggatgaccaggtcgcccttctgagagcgcacgccggggagcatctcctgctgggagctacacgccggagcatggtgttcaaagacgtgctcctgcttggcaacgattatatcgtccccagacactgtcctgagctggccgaaatgtctcgcgtttccattcggatcctcgacgagctggtgcttccgtttcaggaactgcaaattgatgacaatgagtacgcctacctcaaggctatcattttctttgatcccgacgccagagggctgagcgatcctggacgcatccggagactgcgcgctcaggtgcaggtctccctcgaagactatatcaacgatcggcagtacgactctagaggccggttcggggagctgcttctgctcctgcccacccttcaaagcattacgtggcagatgatcgagcagattcaatttatcaaactgttcggaatggcgaagattgataatctcctgcaggaaatgctgctctgaggactagtccctgttcccagagcccacttttttttctttttttgaaataaaatagcctgtctttcagatctaaaaaaaaaaaaaaaaaaaaaaaaaaaaaaaaaaaaaaaaaaaaaaaaaaaaaaaaaaaaaaaaaaaaaaaaaaaaaaaaaaaaaaaaaaaaaaaaaaaa

SEQ ID NO: 4970 - RNA, 1376 nt, synthetic construct
  misc_feature 1..1376: note = mRNA a-1 (A100) (opt5) from Homo sapiens__NP_000448.3__HNF4A(1-375)(S87A_S95A_S99A_K106R_K10 8R_K126R_K127R_S142A_S143A_S148A_T166A_S167A_S313A_S378A_T4 29A_T432A_S436A_K458R_S461E)
  source 1..1376: mol_type = other RNA
aggagagtcccgcagtcggcgtccagcggctctgcttgttcgtgtgtgtgtcgttgcaggccttattcaagcttaccatgagactgagcaagaccctcgtggacatggatatggccgactactccgctgccctggatcccgcgtatacaacgcttgagttcgaaaacgtccaggttctgaccatgggcaatgacacatctcctagcgaggggaccaacctcaatgctccgaactccctgggagtgtctgccctttgcgccatctgtggcgatcgggctacagggaaacactacggagccagctcctgcgacggctgtaaggggtttttccgcagagctgtgcggaaaaatcatatgtatgcctgccgctttgcgagacaatgtgtcgtggatcgggaccgcagaaaccagtgccggtactgtcgcctgaagaaatgcttcagagccggaatgcggcgcgaagctgttcagaatgagagagatcggatttctacccgcagagccgcttatgaagacagcgccctcccctccatcaacgcgctgctgcaggccgaggtgctcagccggcaaattgctgcccctgtctctggcatcaatggcgatattagagctaagaagatcgcctccatcgccgacgtgtgtgagagcatgaaagaacagctgcttgttctggtggagtgggctaagtacattcccgcgttttgcgaactccctctggatgaccaggtcgcccttctgcgcgctcacgccggggagcatctcctgctgggagccacaaaacggtctatggtgttcaaggacgtgctcctgcttggcaacgattatatcgtccccagacactgtcctgagctggctgaaatgtcccgcgttagcattcggatcctcgacgagctggtgcttccgtttcaggaactgcaaattgatgacaatgagtacgcctacctcaaagcgatcattttctttgatcccgacgctaaggggctgtctgatcctggaaagatcaaaagactgcgcgcccaggtgcaggtctccctcgaagactatatcaacgatcggcagtacgacagcagaggccgcttcggggagctgcttctgctcctgcccacccttcaatccattacgtggcagatgatcgagcagattcaatttatcaagctgttcggaatggccaaaattgataatctcctgcaggaaatgctgctctgaggactagtccctgttcccagagcccacttttttttctttttttgaaataaaatagcctgtctttcagatctaaaaaaaaaaaaaaaaaaaaaaaaaaaaaaaaaaaaaaaaaaaaaaaaaaaaaaaaaaaaaaaaaaaaaaaaaaaaaaaaaaaaaaaaaaaaaaaaaaaa

SEQ ID NO: 4971 - RNA, 1376 nt, synthetic construct
  misc_feature 1..1376: note = mRNA a-1 (A100) (opt5) from Homo sapiens__NP_000448.3__HNF4A(1-375)(S87A_K106R_K108R_K126R_K 127R_S138A_T139A_S142A_S143A_S148A_T166A_S167A_S313A_S378A_ T429A_T432A_S436A_K458R_S461E)
  source 1..1376: mol_type = other RNA
aggagagtcccgcagtcggcgtccagcggctctgcttgttcgtgtgtgtgtcgttgcaggccttattcaagcttaccatgagactgagcaagaccctcgtggacatggatatggccgactactccgctgccctggatcccgcgtatacaacgcttgagttcgaaaacgtccaggttctgaccatgggcaatgacacatctcctagcgaggggaccaacctcaatgctccgaactccctgggagtgtctgccctttgcgccatctgtggcgatcgggctacagggaaacactacggagccagctcctgcgacggctgtaaggggtttttccgcagagctgtgcggaaaaatcatatgtattcttgccgctttagcagacaatgtgtcgtggatcgggaccgcagaaaccagtgccggtactgtcgcctgaagaaatgcttcagagccggaatgcggcgcgaagcggttcagaatgagagagatcggattgccgctcgcagagccgcttatgaagactccgccctccccagcatcaacgcgctgctgcaggccgaggtgctctctcggcaaattgctgcccctgtctccggcatcaatggcgatattagagctaagaagatcgccagcatcgccgacgtgtgtgagtctatgaaagaacagctgcttgttctggtggagtgggctaagtacattcccgcgttttgcgaactccctctggatgaccaggtcgcccttctgcgcgctcacgccggggagcatctcctgctgggagccaccaaacggtccatggtgttcaaggacgtgctcctgcttggcaacgattatatcgtccccagacactgtcctgagctggctgaaatgagccgcgtttctattcggatcctcgacgagctggtgcttccgtttcaggaactgcaaattgatgacaatgagtacgcctacctcaaagcgatcattttctttgatcccgacgctaaggggctgtccgatcctggaaagatcaaaagactgcgcgcccaggtgcaggtcagcctcgaagactatatcaacgatcggcagtacgactccagaggccgcttcggggagctgcttctgctcctgcccacacttcaatctattacctggcagatgatcgagcagattcaatttatcaagctgttcggaatggccaaaattgataatctcctgcaggaaatgctgctctgaggactagtccctgttcccagagcccacttttttttctttttttgaaataaaatagcctgtctttcagatctaaaaaaaaaaaaaaaaaaaaaaaaaaaaaaaaaaaaaaaaaaaaaaaaaaaaaaaaaaaaaaaaaaaaaaaaaaaaaaaaaaaaaaaaaaaaaaaaaaaa

SEQ ID NO: 4972 - RNA, 1376 nt, synthetic construct
  misc_feature 1..1376: note = mRNA a-1 (A100) (opt5) from Homo sapiens__NP_000448.3__HNF4A(1-375)(S87A_S95A_S99A_K106R_K10 8R_K126R_K127R_S138A_T139A_S142A_S143A_S148A_T166A_S167A_S3 13A_S378A_T429A_T432A_S436A_K458R_S461E)
  source 1..1376: mol_type = other RNA
aggagagtcccgcagtcggcgtccagcggctctgcttgttcgtgtgtgtgtcgttgcaggccttattcaagcttaccatgagactgagcaagaccctcgtggacatggatatggccgactactccgctgccctggatcccgcgtatacaacgcttgagttcgaaaacgtccaggttctgaccatgggcaatgacacatctcctagcgaggggaccaacctcaatgctccgaactccctgggagtgtctgccctttgcgccatctgtggcgatcgggctacagggaaacactacggagccagctcctgcgacggctgtaaggggtttttccgcagagctgtgcggaaaaatcatatgtatgcctgccgctttgcgagacaatgtgtcgtggatcgggaccgcagaaaccagtgccggtactgtcgcctgaagaaatgcttcagagccggaatgcggcgcgaagctgttcagaatgagagagatcggattgccgctcgcagagccgcgtatgaagactctgccctccccagcatcaacgctctgctgcaggccgaggtgctctcccggcaaattgctgcccctgtcagcggcatcaatggcgatattagagccaagaagatcgcttctatcgcggacgtgtgtgagtccatgaaagaacagctgcttgttctggtggagtgggccaagtacattcccgctttttgcgaactccctctggatgaccaggtcgcccttctgcgcgcccacgctggggagcatctcctgctgggagccaccaaacggagcatggtgttcaaggacgtgctcctgcttggcaacgattatatcgtccccagacactgtcctgagctggcggaaatgtctcgcgtttccattcggatcctcgacgagctggtgcttccgtttcaggaactgcaaattgatgacaatgagtacgcttacctcaaagccatcattttctttgatcccgacgccaaggggctgagcgatcctggaaagatcaaaagactgcgcgctcaggtgcaggtctctctcgaagactatatcaacgatcggcagtacgactccagaggccgcttcggggagctgcttctgctcctgcccacacttcaaagcattacctggcagatgatcgagcagattcaatttatcaagctgttcggaatggccaaaattgataatctcctgcaggaaatgctgctctgaggactagtccctgttcccagagcccacttttttttctttttttgaaataaaatagcctgtctttcagatctaaaaaaaaaaaaaaaaaaaaaaaaaaaaaaaaaaaaaaaaaaaaaaaaaaaaaaaaaaaaaaaaaaaaaaaaaaaaaaaaaaaaaaaaaaaaaaaaaaaa

SEQ ID NO: 4973 - RNA, 1376 nt, synthetic construct
  misc_feature 1..1376: note = mRNA a-1 (A100) (opt11) from Homo sapiens__NP_000448.3__HNF4A(1-375)
  source 1..1376: mol_type = other RNA
aggagagtcccgcagtcggcgtccagcggctctgcttgttcgtgtgtgtgtcgttgcaggccttattcaagcttaccatgcgtctttccaaaacactcgtagacatggacatggcagactacagcgccgccctcgacccagcctacaccaccctcgaatttgaaaacgtccaagtcctaactatgggaaacgacacatcaccctcagaaggtacaaacctcaacgcccccaactcgctaggcgtctccgcactatgcgcaatctgcggcgaccgtgccaccggcaaacactacggagcctcatcctgcgacggttgtaaaggcttcttccgacgcagcgtcagaaaaaaccacatgtactcctgccgcttctcccgtcaatgcgtcgtcgacaaagacaaacgcaaccaatgccggtactgccgcctaaaaaaatgcttccgcgcaggcatgaaaaaagaagcagtccaaaacgaacgcgaccgcatatcaacccgtcgatcatcatacgaagactcctccctccccagcatcaacgccctcctccaagcagaagtactaagccggcaaataacatccccagtcagcggcatcaacggagacatacgagccaaaaaaatagcttcaatcgccgacgtctgcgaatccatgaaagagcaactactggtcctcgtcgaatgggctaaatacatcccggccttctgcgaactccccctcgacgatcaagtcgcccttctaagagcccacgccggcgaacacctcctcttaggcgcaaccaaacgcagcatggtattcaaagacgtactgctcctcggcaacgattacatcgtcccacgacattgccccgagctcgcagaaatgtcccgagtctccatccgcatactcgacgaactcgtactccccttccaagaactccaaatagacgacaatgaatacgcatacctcaaagcaatcatcttcttcgaccccgacgccaaaggactcagcgacccaggcaaaatcaaacgcctacgatcacaagtacaagtttcacttgaagactacatcaacgacagacaatacgactcaagaggtcgtttcggagaactactcctactactaccaaccctccaaagcataacctggcaaatgatagaacaaatacaatttataaaactcttcggcatggccaaaatcgacaatctcctacaagaaatgctcctctgaggactagtccctgttcccagagcccacttttttttctttttttgaaataaaatagcctgtctttcagatctaaaaaaaaaaaaaaaaaaaaaaaaaaaaaaaaaaaaaaaaaaaaaaaaaaaaaaaaaaaaaaaaaaaaaaaaaaaaaaaaaaaaaaaaaaaaaaaaaaaa

SEQ ID NO: 4974 - RNA, 1376 nt, synthetic construct
  misc_feature 1..1376: note = mRNA a-1 (A100) (opt11) from Homo sapiens__NP_000448.3__HNF4A(1-375)(S313A)
  source 1..1376: mol_type = other RNA
aggagagtcccgcagtcggcgtccagcggctctgcttgttcgtgtgtgtgtcgttgcaggccttattcaagcttaccatgcgtctctcaaaaaccctagtcgacatggacatggccgactattctgcagccctagacccagcctacaccaccctcgaattcgaaaacgtacaagtactcaccatgggcaacgatacctccccatctgaaggcaccaacctcaacgcacccaactctctcggagtctccgccctatgcgcaatctgcggcgaccgagccactggaaaacactacggcgcctcctcttgcgacggatgcaaaggcttcttccgaagatcagtccgaaaaaaccacatgtactcatgccgcttctcgcgccaatgcgtcgtcgacaaagacaaacgtaaccaatgcagatactgccgactcaaaaaatgcttccgcgccggcatgaaaaaagaagccgtccagaacgaacgcgaccgcatctcaaccagacgctcgagctacgaagactcctccctaccctccatcaacgccctactccaagcagaagtactatcccgccaaataacctcccccgtcagcggcatcaacggcgacatcagagccaaaaaaatcgcctcaatcgccgacgtatgcgagagcatgaaagaacagctccttgtcctagtagaatgggccaaatacatcccagccttctgcgaactccccctcgacgaccaagtcgccctactcagagcccacgccggcgaacacctcctcctcggcgctaccaagcgatctatggtattcaaggatgtacttctactcggaaacgactacatcgtaccacgccactgcccagaactagccgaaatgtcccgcgtatccatccgaatcctcgatgaactcgtactccccttccaagaactacaaattgacgacaatgaatacgcctacttaaaagccatcatattcttcgaccccgacgccaaaggtctgtccgacccaggcaaaatcaaacgactacgggcccaagtccaagtatcactcgaagactacatcaacgaccgccaatacgactcacgcggccgcttcggcgagctcctcctccttctcccaaccctacaatccataacctggcaaatgatcgaacaaatccaattcataaaactcttcggcatggcaaaaattgacaaccttctccaagaaatgctcctgtgaggactagtccctgttcccagagcccacttttttttctttttttgaaataaaatagcctgtctttcagatctaaaaaaaaaaaaaaaaaaaaaaaaaaaaaaaaaaaaaaaaaaaaaaaaaaaaaaaaaaaaaaaaaaaaaaaaaaaaaaaaaaaaaaaaaaaaaaaaaaaa

SEQ ID NO: 4975 - RNA, 1376 nt, synthetic construct
  misc_feature 1..1376: note = mRNA a-1 (A100) (opt11) from Homo sapiens__NP_000448.3__HNF4A(1-375)(S313E)
  source 1..1376: mol_type = other RNA
aggagagtcccgcagtcggcgtccagcggctctgcttgttcgtgtgtgtgtcgttgcaggccttattcaagcttaccatgcgcctgtccaaaaccctcgtcgacatggacatggctgactactccgccgccctcgaccccgcatacaccacactcgaattcgaaaacgtccaggtcctcaccatgggaaacgacacctccccctcagaaggaaccaacctaaacgctcccaactcccttggcgtctccgccctctgcgcaatatgcggagaccgcgccaccggaaaacactacggcgcctcatcctgcgacggttgcaaaggcttcttccgccgatccgtccgcaaaaaccacatgtattcctgccgcttctcgcgacagtgcgtagtcgacaaagataaacgaaaccaatgccgatactgccgccttaaaaaatgcttccgcgccggaatgaaaaaagaagcagtccaaaacgaacgagaccgcatcagcacccgtaggagctcatacgaggactcgagcctcccctcgatcaacgccttactccaagccgaagtactgtcccgccagatcacctcacccgtctccggcatcaacggagacatcagagccaaaaaaatagcatcgatcgccgacgtatgcgagtccatgaaagaacaactcctagtactagtcgaatgggccaaatacatcccagcattctgcgaactacccctagatgatcaagtagccctactacgagcccacgccggcgaacacctcctcctcggggccaccaaacgatcaatggtcttcaaagacgtcctcctcctcggcaacgactacatcgtaccccgccactgcccagaactcgcagaaatgtcacgcgtctcaatccgcatcctggacgaacttgtactcccattccaagaactacaaatagacgacaacgaatacgcatacctgaaagcaatcatctttttcgaccccgacgccaaaggcctatctgaccccggtaaaataaaacgcctccgcgaacaagtacaagtctctctcgaagactacatcaacgaccgccagtacgacagccggggacgcttcggcgaacttctcctcctcctccccactctacaaagcatcacctggcaaatgatcgaacaaatacaattcatcaaactcttcggaatggcaaaaatcgacaacctcctccaagaaatgctcctctgaggactagtccctgttcccagagcccacttttttttctttttttgaaataaaatagcctgtctttcagatctaaaaaaaaaaaaaaaaaaaaaaaaaaaaaaaaaaaaaaaaaaaaaaaaaaaaaaaaaaaaaaaaaaaaaaaaaaaaaaaaaaaaaaaaaaaaaaaaaaaa

SEQ ID NO: 4976 - RNA, 1376 nt, synthetic construct
  misc_feature 1..1376: note = mRNA a-1 (A100) (opt11) from Homo sapiens__NP_000448.3__HNF4A(1-375)(S142A_S143A)
  source 1..1376: mol_type = other RNA
aggagagtcccgcagtcggcgtccagcggctctgcttgttcgtgtgtgtgtcgttgcaggccttattcaagcttaccatgcgcctatcaaaaacactggtcgacatggacatggcagactattctgccgccctggaccccgcctacactacactcgagttcgaaaacgtccaagtactcaccatgggaaacgacacctccccctccgaaggcaccaacttaaacgcccccaactcccttggggtctccgctctctgcgcaatctgcggagacagagccaccggtaaacactacggagcctcctcctgcgacggatgcaaaggcttcttccgccgctcagtacgcaaaaaccacatgtatagttgccgcttctctcgccagtgcgtggtcgacaaagacaaacgcaaccaatgccgatactgccgcctcaaaaagtgcttccgcgccggaatgaagaaagaagctgtccaaaacgaacgcgaccgcatctcaacccgcagagcggcatacgaagacagctcgctaccctccataaacgccctccttcaagccgaagtcctatcccgacagatcacctcccccgtctctggaataaacggcgacatccgcgcaaagaaaatcgcctccatcgccgacgtatgcgaatccatgaaagaacaactcctagtgctagtagaatgggccaaatacatacccgccttctgcgagctccccctagacgaccaagtagccctactccgcgcacacgcaggcgaacacctcctcctcggcgccaccaaacgatcaatggtcttcaaagacgtactactcctcggcaatgactacatcgtcccacgacactgccccgaattagcagaaatgtcgcgagtctccatacgcatcctagacgaactcgtactccctttccaagaactacaaatcgatgacaacgaatacgcatacctcaaagccatcatcttcttcgacccagacgccaaaggcctttccgatcccggcaaaatcaaaagactacgctcacaagtacaagtctccctcgaagattacatcaacgaccgccaatacgactcacgcggccgcttcggagaactcctactactcctcccaaccctacaatccatcacctggcaaatgatcgaacaaatccagttcattaaactcttcggaatggccaaaatcgataacctcctacaagaaatgctcctatgaggactagtccctgttcccagagcccacttttttttctttttttgaaataaaatagcctgtctttcagatctaaaaaaaaaaaaaaaaaaaaaaaaaaaaaaaaaaaaaaaaaaaaaaaaaaaaaaaaaaaaaaaaaaaaaaaaaaaaaaaaaaaaaaaaaaaaaaaaaaaa

SEQ ID NO: 4977 - RNA, 1376 nt, synthetic construct
  misc_feature 1..1376: note = mRNA a-1 (A100) (opt11) from Homo sapiens__NP_000448.3__HNF4A(1-375)(S142E_S143E)
  source 1..1376: mol_type = other RNA
aggagagtcccgcagtcggcgtccagcggctctgcttgttcgtgtgtgtgtcgttgcaggccttattcaagcttaccatgcgcctatccaaaaccctagtcgacatggacatggcagactactccgccgccctcgacccagcatacaccacactcgaattcgaaaacgtccaagtgctaaccatgggcaacgacaccagcccgtccgaaggcacaaacctcaacgcccccaactcccttggtgtctcagccctctgcgcaatctgcggcgaccgtgccaccggtaaacactatggcgcctcatcctgcgacggctgcaaaggcttcttcagacgatcggtacgcaaaaaccacatgtactcatgtcgcttctcccgacaatgtgtagtggacaaagacaaaagaaaccaatgccgctactgccgcctcaaaaaatgcttccgcgcaggcatgaaaaaagaagccgtccagaatgaacgagaccgcataagcacccgccgagaagaatatgaagactcctcacttccctcaatcaacgccctactccaagccgaagtactatcacggcaaatcacaagccccgtctcaggaataaacggagacatccgcgccaaaaaaattgcctccatcgcggacgtatgcgaaagcatgaaagaacaactactcgtactcgtcgaatgggcaaaatacatccccgcattctgcgaactccccctcgacgaccaagtagccctgctcagagcacacgccggagaacaccttctcctcggcgccaccaaacgctccatggtcttcaaagacgtcctcctcctagggaacgactacatagtaccacgacactgcccagaactagccgaaatgtccagagtatcaatccgaatcctcgacgaactcgtcctccccttccaagaactacaaatcgacgacaacgaatacgcctacctaaaagccatcatattcttcgatcccgacgcaaaaggcctctccgaccccggcaaaatcaagcgactacgatcacaagtacaagtctccctggaagactacatcaacgaccgccaatacgacagccgcggaagattcggcgaactcctgctactactccccaccctacaatccatcacctggcaaatgatagaacaaatacaattcatcaaactcttcggcatggctaaaatcgacaacctcctacaagaaatgctactatgaggactagtccctgttcccagagcccacttttttttctttttttgaaataaaatagcctgtctttcagatctaaaaaaaaaaaaaaaaaaaaaaaaaaaaaaaaaaaaaaaaaaaaaaaaaaaaaaaaaaaaaaaaaaaaaaaaaaaaaaaaaaaaaaaaaaaaaaaaaaaa

SEQ ID NO: 4978 - RNA, 1376 nt, synthetic construct
  misc_feature 1..1376: note = mRNA a-1 (A100) (opt11) from Homo sapiens__NP_000448.3__HNF4A(1-375)(S143A)
  source 1..1376: mol_type = other RNA
aggagagtcccgcagtcggcgtccagcggctctgcttgttcgtgtgtgtgtcgttgcaggccttattcaagcttaccatgcgactctccaagaccctcgtagacatggatatggcagactacagcgccgccctagatccagcttacaccaccctcgaattcgaaaacgttcaagtcctaacgatgggcaacgacacctcaccatcagaaggcaccaacctcaacgcccccaactccctcggagtctcagccctctgcgcaatctgcggcgaccgcgccaccggcaaacactacggagcctcgtcctgcgacggatgcaaaggattcttcaggcgctccgtacggaaaaaccacatgtactcttgtcgtttctcccgccaatgcgtagtcgacaaagacaaacgcaaccaatgccgctactgtcgcctcaaaaaatgcttccgcgccggcatgaagaaagaagccgtccaaaacgaacgcgaccgcatctccacccgcaggtccgcctacgaagactccagcctaccctccatcaacgcactactccaagccgaagtcctctcccgccaaatcacgtctcccgtctcaggaatcaacggcgacatccgcgctaagaaaatagcatctatcgccgacgtctgtgaatccatgaaagaacaactactcgtactggtagaatgggccaaatacatccccgccttctgcgaacttcccctcgacgaccaagttgcactcctccgagcccacgccggggaacacctactcctcggagccaccaaacgctcaatggtcttcaaagacgtactcctcctcggcaacgactacatcgtgccacgccactgccccgaactagccgaaatgtcccgggtctccattcgaatcctcgacgaactcgtcctccccttccaagaactccaaatagacgacaacgaatacgcttacctcaaagcaataatcttcttcgacccagatgccaaaggcctcagcgacccgggcaagattaaacgcctccgctctcaagtccaagtctcccttgaagactacatcaacgaccgccaatacgactcccgcggtcgattcggggaactactcctactcctcccaacactacaatccatcacctggcaaatgatcgaacaaatccaattcatcaaactcttcggcatggccaaaatcgacaacctcctacaggaaatgctcctatgaggactagtccctgttcccagagcccacttttttttctttttttgaaataaaatagcctgtctttcagatctaaaaaaaaaaaaaaaaaaaaaaaaaaaaaaaaaaaaaaaaaaaaaaaaaaaaaaaaaaaaaaaaaaaaaaaaaaaaaaaaaaaaaaaaaaaaaaaaaaaa

SEQ ID NO: 4979 - RNA, 1376 nt, synthetic construct
  misc_feature 1..1376: note = mRNA a-1 (A100) (opt11) from Homo sapiens__NP_000448.3__HNF4A(1-375)(T166A)
  source 1..1376: mol_type = other RNA
aggagagtcccgcagtcggcgtccagcggctctgcttgttcgtgtgtgtgtcgttgcaggccttattcaagcttaccatgaggctcagcaaaactctagtcgacatggacatggccgactactcagccgcactcgaccccgcatataccacactagagttcgaaaacgtccaagttctcaccatgggaaacgacacttccccctcagaaggcacaaacctcaacgcacccaactccctaggagtctccgccctatgcgcgatctgtggcgaccgagcaaccggcaagcattacggcgcatcctcctgcgacggatgcaaaggcttcttccgccgatccgtccgaaagaaccacatgtactcctgccgattctcccgccaatgcgtagttgacaaagacaaacgcaatcaatgccgatactgccgcctcaagaaatgcttccgagcaggaatgaagaaagaagccgtccaaaacgaacgcgatcgcatatccacccgccgctcctcctacgaagactcctccctcccctccatcaacgcactcctccaagcggaagtactctcacgccaaatcgcgtccccagtctccggcataaacggagacatccgcgccaagaaaatagcctcaatcgctgacgtctgcgaatctatgaaagaacagctcctcgtcctagtcgaatgggccaaatacatccccgccttctgcgaactcccactagacgaccaagtggcactcctccgcgcccacgccggcgaacacctactactcggagccaccaaacgctccatggtgttcaaagacgtactactcctcggaaatgactacatcgtcccccgacactgccccgaactcgccgaaatgtccagggtctccatccgcatcctcgacgaactggtcctcccattccaagaactccaaatcgacgacaacgaatacgcctacctaaaagccatcatcttcttcgaccccgacgccaaaggcctatccgacccgggcaaaatcaaacgactccgctcccaagtccaagtctcactcgaagactacatcaacgatagacagtacgactcacgcggtagattcggagaactcctactcctactccccacactccaatccataacctggcaaatgatagaacaaatacaattcatcaaactcttcggcatggccaaaatcgacaacctactccaggaaatgctcttatgaggactagtccctgttcccagagcccacttttttttctttttttgaaataaaatagcctgtctttcagatctaaaaaaaaaaaaaaaaaaaaaaaaaaaaaaaaaaaaaaaaaaaaaaaaaaaaaaaaaaaaaaaaaaaaaaaaaaaaaaaaaaaaaaaaaaaaaaaaaaaa

SEQ ID NO: 4980 - RNA, 1376 nt, synthetic construct
  misc_feature 1..1376: note = mRNA a-1 (A100) (opt11) from Homo sapiens__NP_000448.3__HNF4A(1-375)(S167E)
  source 1..1376: mol_type = other RNA
aggagagtcccgcagtcggcgtccagcggctctgcttgttcgtgtgtgtgtcgttgcaggccttattcaagcttaccatgcgcctctccaaaaccctcgtcgacatggacatggcagactactctgcagctctcgaccccgcctataccacgctcgaattcgaaaacgtacaagtcctcaccatgggaaacgacacctccccctctgaaggcaccaacctcaacgcacccaacagccttggcgtcagcgccttatgcgccatttgcggagaccgcgccaccggcaaacactacggagcatcctcatgcgacggctgcaaaggcttcttccgccgatcagtccgaaaaaaccacatgtactcctgccgcttctctcgccagtgcgtagtcgataaagataaaagaaatcaatgccgctactgccgcctcaaaaaatgcttccgcgccggcatgaaaaaagaagcagttcaaaacgaacgcgaccgaatctccacccgccgctcatcctacgaagactcttccctcccctctataaacgccctcctccaagccgaagtactctcacgccaaatcaccgaacctgtctccggcattaacggagacatacgcgccaagaaaatagccagcatcgccgacgtctgcgaatcaatgaaagaacaactcctcgtcctagtcgaatgggccaaatacatccccgcattctgcgaacttcccctcgacgaccaagtcgccctcctccgtgcccatgcaggcgaacacctcctcctcggcgccaccaaacgctccatggtctttaaagacgtcctcctcctgggcaacgactacatcgtcccccgacactgcccagaactcgccgagatgagccgcgtgtccatacgcatactcgacgaactcgtcctccccttccaagaactccagatagacgataacgaatacgcatacctaaaagccataatattcttcgaccccgacgctaaaggtctctcagacccaggaaaaatcaaacgtctcagaagccaagtccaagtctcactcgaagactacatcaacgaccgccaatacgactctcgcggccgcttcggcgaactcctcttattactcccaacactccaatcaatcacctggcaaatgatcgaacaaatacaatttatcaaactcttcggcatggctaaaatcgacaatctcctccaagaaatgctcctctgaggactagtccctgttcccagagcccacttttttttctttttttgaaataaaatagcctgtctttcagatctaaaaaaaaaaaaaaaaaaaaaaaaaaaaaaaaaaaaaaaaaaaaaaaaaaaaaaaaaaaaaaaaaaaaaaaaaaaaaaaaaaaaaaaaaaaaaaaaaaaa

SEQ ID NO: 4981 - RNA, 1376 nt, synthetic construct
  misc_feature 1..1376: note = mRNA a-1 (A100) (opt11) from Homo sapiens__NP_000448.3__HNF4A(1-375)(S167A)
  source 1..1376: mol_type = other RNA
aggagagtcccgcagtcggcgtccagcggctctgcttgttcgtgtgtgtgtcgttgcaggccttattcaagcttaccatgcggctctcaaaaaccctagtcgacatggacatggccgactactcagctgccctagaccccgcatacaccacactagaattcgaaaatgtccaagtactaaccatgggcaacgacacctcaccctccgaaggtaccaacctcaacgcgcccaactccctcggcgtctcagccctctgcgccatctgcggcgaccgcgcgaccggcaaacactacggtgcctcctcatgcgacggatgcaaaggcttcttccgacgctcagtccgcaaaaaccacatgtactcctgccgcttctcacgacaatgcgtcgttgacaaagacaaacgcaaccaatgccgctactgccgcctcaaaaaatgcttccgcgcaggaatgaaaaaagaagcagttcaaaacgaacgcgaccgcatctcaacccgcagatcatcatacgaagactcatccctaccatcaataaacgccctcctacaagccgaagtcctctccagacaaatcaccgcccccgtctcaggcataaacggcgacatccgtgcaaaaaaaatcgcctccatcgctgacgtctgcgaatccatgaaagaacaactccttgtcctcgtcgaatgggccaaatacattcctgccttctgcgaactccccctcgacgaccaagtcgcactactcagagcccacgcaggcgaacacctcctcctcggagcaacaaaacgctccatggtcttcaaagacgtcctcctactcggaaatgactacatcgtccccagacactgccccgaactcgctgaaatgtcaagagtctccatacgaatactagacgaactagtcctacccttccaagaactgcaaatagacgacaacgaatacgcctacctcaaagccatcatattcttcgaccccgacgccaagggactctcagaccccggcaaaatcaaacgcctacgctcccaagtgcaagtcagcctcgaagactacataaacgatcgccagtacgactcacgaggacgattcggagaactcctcctcctcctcccaacactccagtccatcacctggcaaatgatcgaacaaatccaatttatcaaactcttcggcatggccaaaatcgacaacctactacaagaaatgctcctctgaggactagtccctgttcccagagcccacttttttttctttttttgaaataaaatagcctgtctttcagatctaaaaaaaaaaaaaaaaaaaaaaaaaaaaaaaaaaaaaaaaaaaaaaaaaaaaaaaaaaaaaaaaaaaaaaaaaaaaaaaaaaaaaaaaaaaaaaaaaaaa

SEQ ID NO: 4982 - RNA, 1376 nt, synthetic construct
  misc_feature 1..1376: note = mRNA a-1 (A100) (opt11) from Homo sapiens__NP_000448.3__HNF4A(1-375)(S167A_S378A_T429A_T432A_ S436A)
  source 1..1376: mol_type = other RNA
aggagagtcccgcagtcggcgtccagcggctctgcttgttcgtgtgtgtgtcgttgcaggccttattcaagcttaccatgcgcctctccaaaaccctcgttgacatggatatggcggactactccgccgcactcgacccagcctacaccaccctagaatttgaaaacgtccaagtactaaccatgggcaacgacacaagcccctccgaaggcacaaatctcaacgcccccaactcactaggcgtctcagccctatgtgctatctgcggcgaccgcgccaccggcaaacactacggcgcatcatcatgtgacggatgcaaaggattcttccgacgctccgtccgaaagaaccacatgtactcctgccgattcagcagacaatgtgttgtcgacaaagacaaacgcaaccaatgtcgctactgccgcctcaaaaaatgctttagagccggaatgaaaaaagaagccgtccaaaacgaacgcgaccgcatctccacacgccgaagctcatacgaagactcatctctcccctccatcaacgcactcctccaagccgaagtcctatctcgccaaatcaccgcacccgtctccggcatcaacggcgacatacgcgccaaaaaaatagcctccatagcagacgtatgcgaatccatgaaagagcaactcctcgtgctagtcgaatgggccaaatacatccccgccttctgcgagctcccactagacgaccaagtcgccctcctccgcgcccacgccggcgaacacctgctcctaggcgccaccaaaagaagcatggtattcaaagacgtcctactcctcggcaacgactatatagtccctcgccactgtccagaactcgcagaaatgtccagagtcagcatccgaatcctcgacgaactcgtcctacccttccaagaactacaaatcgacgacaacgaatacgcctaccttaaagccatcatcttcttcgaccccgacgccaaaggcctatccgaccccggcaaaatcaaacgcttacgatcccaagtccaggtcagcctcgaagactacataaacgaccgccaatacgactcacgcggccgcttcggcgaactactcctcctcctcccaaccctccaaagcatcacctggcaaatgatagaacaaatacaattcatcaaacttttcggcatggccaaaatcgacaaccttttacaagaaatgctactctgaggactagtccctgttcccagagcccacttttttttctttttttgaaataaaatagcctgtctttcagatctaaaaaaaaaaaaaaaaaaaaaaaaaaaaaaaaaaaaaaaaaaaaaaaaaaaaaaaaaaaaaaaaaaaaaaaaaaaaaaaaaaaaaaaaaaaaaaaaaaaa

SEQ ID NO: 4983 - RNA, 1376 nt, synthetic construct
  misc_feature 1..1376: note = mRNA a-1 (A100) (opt11) from Homo sapiens__NP_000448.3__HNF4A(1-375)(S167E_S378E_T429E_T432E_ S436E)
  source 1..1376: mol_type = other RNA
aggagagtcccgcagtcggcgtccagcggctctgcttgttcgtgtgtgtgtcgttgcaggccttattcaagcttaccatgcgactatctaaaactctcgtagacatggacatggccgactactcggccgccctcgaccccgcatacaccacgctcgagttcgaaaacgttcaagtcctcacaatgggcaacgacacctccccctcagaaggcaccaacctcaacgctccaaactccctaggggtctccgcactctgcgcaatctgcggcgaccgtgccaccggcaaacattacggcgcctcatcctgcgacggctgcaaaggattcttccggcgatccgtccgaaagaaccacatgtacagctgcagattcagccgacaatgcgtcgtggacaaagataaacgcaaccaatgccgctactgccgactcaagaaatgcttccgcgcaggcatgaagaaagaagcagtacaaaacgaacgcgaccgcatctcaacaagacgtagctcctacgaagactcaagcctcccatccatcaacgccctcctccaagccgaagtactctcacgtcaaatcaccgaacccgtgtcaggaatcaacggcgacatccgcgccaagaaaatcgcctccatcgcagacgtctgcgaatccatgaaagaacaactcctcgtcctggtcgaatgggctaaatacatccccgcattctgcgaactccccctagatgaccaagtcgccctactgcgcgcccacgcaggcgaacatctattactcggcgccaccaaacgcagcatggtattcaaagacgtcctcctcctcggcaacgactacatagtcccacgccactgcccagaactggccgaaatgagccgagtctctatccgcatactcgacgagctagtcctccccttccaagaactccaaattgacgacaacgaatacgcctacctcaaagccatcatattcttcgaccccgacgcgaaaggcctatccgaccccggtaaaatcaaaagactacgctcacaagtccaagtctcccttgaagactacatcaacgaccgccagtacgacagccgcggccgcttcggcgaactacttctcctcctccccaccctccaatccatcacctggcaaatgatcgaacaaatccaattcataaaactattcggaatggccaaaatcgacaacctcctgcaagaaatgctcctctgaggactagtccctgttcccagagcccacttttttttctttttttgaaataaaatagcctgtctttcagatctaaaaaaaaaaaaaaaaaaaaaaaaaaaaaaaaaaaaaaaaaaaaaaaaaaaaaaaaaaaaaaaaaaaaaaaaaaaaaaaaaaaaaaaaaaaaaaaaaaaa

SEQ ID NO: 4984 - RNA, 1376 nt, synthetic construct
  misc_feature 1..1376: note = mRNA a-1 (A100) (opt11) from Homo sapiens__NP_000448.3__HNF4A(1-375)(S87A)
  source 1..1376: mol_type = other RNA
aggagagtcccgcagtcggcgtccagcggctctgcttgttcgtgtgtgtgtcgttgcaggccttattcaagcttaccatgcgcctaagcaaaacattagtcgacatggacatggccgactactccgccgcactcgacccagcatacaccacattagagttcgaaaacgtccaagtcctcacaatgggcaacgacacctcaccctcagagggcaccaatctcaacgccccaaactcactcggagtaagtgcactatgcgcgatctgcggcgaccgcgccaccggcaaacactacggcgcatcctcctgcgacggctgcaaaggattcttccgacgcgccgtccgcaaaaaccacatgtactcatgccgcttctcacgccagtgcgtcgtagacaaagacaaacgcaatcaatgccgctactgccgactcaagaaatgcttccgcgccggaatgaagaaagaagcagtacaaaacgaacgcgaccgaatctccacccgccgctcctcctacgaagattcctccctcccctccatcaacgccctactccaagccgaagtactctcccgccaaatcacctctccagtttccggcataaacggcgacatacgagcaaagaaaattgcatctatcgccgacgtctgcgaatcgatgaaagagcaactcctagtactcgtagaatgggccaaatacatccccgcattctgcgaactcccacttgacgaccaagtcgcccttctccgagcacacgccggcgaacatctcctgctcggcgctacaaaaagaagcatggtcttcaaagacgtcctcctactcggcaacgactacatcgtcccccgccactgccccgaactagccgaaatgagccgagtctccatcagaatcctcgacgaactcgtactccccttccaagaactccaaatagacgacaacgaatatgcatacctcaaagcaatcatattcttcgaccccgacgccaaaggactttccgaccccggcaaaataaaacgcctccgatcccaagtacaggtctccctcgaagactacatcaacgacagacaatacgacagccgtggacgattcggagagttactcctactacttcccacccttcagtcaatcacctggcaaatgatagaacaaatccaattcatcaaactgttcggaatggctaaaatcgacaacctgctacaagaaatgctcctctgaggactagtccctgttcccagagcccacttttttttctttttttgaaataaaatagcctgtctttcagatctaaaaaaaaaaaaaaaaaaaaaaaaaaaaaaaaaaaaaaaaaaaaaaaaaaaaaaaaaaaaaaaaaaaaaaaaaaaaaaaaaaaaaaaaaaaaaaaaaaaa

SEQ ID NO: 4985 - RNA, 1376 nt, synthetic construct
  misc_feature 1..1376: note = mRNA a-1 (A100) (opt11) from Homo sapiens__NP_000448.3__HNF4A(1-375)(S87E)
  source 1..1376: mol_type = other RNA
aggagagtcccgcagtcggcgtccagcggctctgcttgttcgtgtgtgtgtcgttgcaggccttattcaagcttaccatgcgcctatccaaaaccctagtcgacatggacatggcagactattcagccgcactagatcccgcctatacaacactcgaattcgaaaacgtgcaggtcctcaccatgggcaacgacacctccccctccgaaggaaccaacctaaacgcaccaaattccctcggcgtctccgccctttgcgccatatgtggggaccgcgcaacaggaaaacactacggcgcctcctcctgcgacggatgcaaaggattcttccgacgcgaagtcagaaaaaaccacatgtactcatgtcgattctcccgccagtgcgtcgtcgacaaagacaaaagaaaccaatgcagatactgtcgcctaaaaaaatgcttccgcgccggaatgaaaaaggaagcagtacagaacgaacgcgaccgcatctccaccagacgctcctcctacgaagactcatccctgccctcgatcaacgcacttctccaagccgaggtcctatcaagacaaatcacttctccagtatccggcatcaatggcgacatccgcgccaaaaaaatcgcctcaatcgccgacgtctgcgagtccatgaaagaacaactactagtccttgtagaatgggctaaatatattcccgccttctgcgaacttcccctagacgaccaagtagcactcctccgcgctcacgccggcgagcacctactactcggcgcaaccaaaagatcaatggtcttcaaagacgtcctcctcctgggcaacgactacatcgtcccccgacactgccccgaactcgcggaaatgtcccgcgtcagcatccgcatcctcgacgaactcgtactccccttccaagaactacaaatcgacgacaacgaatacgcctacctcaaagcgataatcttcttcgacccagacgccaaaggtctatccgacccaggaaaaatcaaacgtctccgctctcaagtacaagtctctctcgaagactacataaacgaccgccaatacgactccagaggccggttcggcgaactcctcctcctactccccacactccaaagcatcacctggcaaatgatcgaacaaatccaattcataaaactattcggcatggccaaaatagacaacctgctacaagaaatgctcctctgaggactagtccctgttcccagagcccacttttttttctttttttgaaataaaatagcctgtctttcagatctaaaaaaaaaaaaaaaaaaaaaaaaaaaaaaaaaaaaaaaaaaaaaaaaaaaaaaaaaaaaaaaaaaaaaaaaaaaaaaaaaaaaaaaaaaaaaaaaaaaa

SEQ ID NO: 4986 - RNA, 1376 nt, synthetic construct
  misc_feature 1..1376: note = mRNA a-1 (A100) (opt11) from Homo sapiens__NP_000448.3__HNF4A(1-375)(R2V)
  source 1..1376: mol_type = other RNA
aggagagtcccgcagtcggcgtccagcggctctgcttgttcgtgtgtgtgtcgttgcaggccttattcaagcttaccatggtactctccaagaccctagtcgacatggacatggccgactactccgccgccctagacccagcctacaccactctagagttcgaaaacgtccaagtcctcacaatgggaaacgacacctccccctccgaaggcacaaacctcaacgcccccaactccctcggcgtctccgccctatgcgccatatgcggagaccgagccaccggcaagcactacggcgcttcctcctgcgacggatgcaaaggcttcttccggagaagcgtccggaaaaaccacatgtattcctgccgattctcacgccaatgcgtagtcgacaaagacaaacgcaaccaatgccgctactgccgccttaagaaatgtttcagagccggaatgaagaaagaagccgtccaaaacgaacgcgaccgcataagcacccgccgctcctcatacgaagacagcagcctcccctccatcaacgccctcctccaagcagaagtgctctcccgacaaatcaccagccccgtaagcggaatcaacggcgacatacgcgccaagaaaatcgcctccatcgccgacgtctgcgaatcaatgaaagaacaactactcgtccttgtagaatgggccaaatacatccccgccttctgcgagctcccactcgacgaccaagtcgccctcctccgcgcacacgccggtgaacatctcctactaggagcaaccaaacgatcaatggtattcaaagacgtcctcctcctcggtaacgactacatagtcccaagacactgccccgaactagccgaaatgtcacgcgtctccatccgcatcctagacgaactcgtccttccctttcaagaactacaaatcgacgacaacgaatacgcctacctcaaagccatcatcttcttcgacccagacgcaaaaggactctcagaccccggcaaaatcaaacgcctccgctcccaagtccaagtcagcctcgaagactacatcaacgacagacaatacgactcacgaggccgcttcggagaactactactcttgctccccacactacaatcgataacctggcaaatgatcgaacaaatccaatttatcaaactattcggaatggcaaaaatagacaaccttctgcaagaaatgctcctttgaggactagtccctgttcccagagcccacttttttttctttttttgaaataaaatagcctgtctttcagatctaaaaaaaaaaaaaaaaaaaaaaaaaaaaaaaaaaaaaaaaaaaaaaaaaaaaaaaaaaaaaaaaaaaaaaaaaaaaaaaaaaaaaaaaaaaaaaaaaaaa

SEQ ID NO: 4987 - RNA, 1376 nt, synthetic construct
  misc_feature 1..1376: note = mRNA a-1 (A100) (opt11) from Homo sapiens__NP_000448.3__HNF4A(1-375)(R2V_K5V)
  source 1..1376: mol_type = other RNA
aggagagtcccgcagtcggcgtccagcggctctgcttgttcgtgtgtgtgtcgttgcaggccttattcaagcttaccatggtcctcagcgtcaccctcgtcgacatggacatggccgactactccgcagccctcgaccccgcctacaccacactagaatttgaaaacgtccaagtcctgaccatgggcaacgacacctccccctcagaaggtaccaacctcaacgcacccaactcgctcggcgtatcagccctttgtgccatctgcggtgatcgcgcaaccggaaaacactacggcgcatcctcatgcgacggctgcaaaggcttcttccgccgatccgtccgtaaaaaccatatgtactcctgtcgattctcccgccaatgtgtcgtagataaagacaaacgcaaccaatgcagatactgccgcctaaaaaaatgcttccgggcaggtatgaagaaagaagcagtccaaaacgaacgcgaccgcatcagcacccgccgctcctcctacgaagactcgtccctcccatccatcaacgccctactccaagccgaagtcttatcccgacaaatcacttcccccgtctccggcataaacggcgacatccgcgcaaaaaaaatcgcctccatagccgacgtctgcgaatcaatgaaagaacaactcctagtccttgtcgaatgggccaaatacatccccgcattctgcgaactcccactcgatgaccaggtagccctcctccgcgcccacgcgggtgaacacctcctcctcggggccaccaaacgctccatggtattcaaagacgtcctcctcctcggaaacgactacatcgtcccacgccattgccccgagctagccgaaatgtctagagtctccatacgcatcctcgacgaactcgtactccccttccaagaactccaaattgatgacaacgaatacgcctacctcaaagcaatcatcttcttcgaccccgacgccaaagggctctccgacccaggaaaaatcaaacgcctcagatcccaagtccaggtatcactcgaagactacatcaacgaccgacaatacgactcccgaggccgtttcggcgaactcctactcctcttaccaaccctacaatccatcacatggcaaatgatcgaacaaattcaattcatcaaactcttcggaatggccaaaatcgacaatctcctacaagaaatgctcctctgaggactagtccctgttcccagagcccacttttttttctttttttgaaataaaatagcctgtctttcagatctaaaaaaaaaaaaaaaaaaaaaaaaaaaaaaaaaaaaaaaaaaaaaaaaaaaaaaaaaaaaaaaaaaaaaaaaaaaaaaaaaaaaaaaaaaaaaaaaaaaa

SEQ ID NO: 4988 - RNA, 1376 nt, synthetic construct
  misc_feature 1..1376: note = mRNA a-1 (A100) (opt11) from Homo sapiens__NP_000448.3__HNF4A(1-375)(K179R_K180R)
  source 1..1376: mol_type = other RNA
aggagagtcccgcagtcggcgtccagcggctctgcttgttcgtgtgtgtgtcgttgcaggccttattcaagcttaccatgcgcctctccaaaacacttgtcgacatggacatggccgactactccgccgcactcgaccccgcctacaccacccttgaattcgaaaacgtccaagtcctcaccatgggaaacgacacctccccctccgaaggaaccaacctaaacgcccccaactccctaggcgtctccgccctctgcgcaatatgcggagaccgcgcaaccggcaaacattacggcgcttcctcctgtgacggttgcaaaggatttttccgccgatccgtccgtaaaaaccacatgtactcctgccgcttcagccgacaatgcgtggtagataaagacaaacgcaaccaatgccgttactgccgactcaaaaaatgcttccgagccggaatgaaaaaagaagcagtccaaaacgaacgcgaccgcatctctacacgcagatcttcatatgaagatagcagcctccccagcatcaacgccctcctccaagccgaagtcctctcccgacaaatcacctccccagtaagcggcataaatggcgacatccgtgcccggcgcatcgcatcaatcgccgacgtatgcgaatcaatgaaagaacaactactagtcctcgtcgaatgggcaaaatacatacccgcattctgcgaactccccctcgacgaccaagtagccctcctacgcgcccacgccggagaacacctactcctcggggccacgaaacgatccatggtcttcaaagacgtcctactcctcggaaatgactacatagtccccaggcactgccccgaactcgccgaaatgtcccgcgtctcaattcgaatcctagacgaactcgtcctacccttccaagaactccaaatagacgacaacgaatacgcttacctcaaagccattatcttcttcgacccagacgccaaaggactctccgacccgggaaaaataaaacgactacgcagccaagtccaagtctccttagaagactacatcaacgaccgccagtacgactcccgcggccgattcggagagcttctcctactcctccccaccctccaatccatcacatggcaaatgatcgaacaaatccaattcataaaactcttcggcatggccaaaatcgataatctactccaagaaatgctcctctgaggactagtccctgttcccagagcccacttttttttctttttttgaaataaaatagcctgtctttcagatctaaaaaaaaaaaaaaaaaaaaaaaaaaaaaaaaaaaaaaaaaaaaaaaaaaaaaaaaaaaaaaaaaaaaaaaaaaaaaaaaaaaaaaaaaaaaaaaaaaaa

SEQ ID NO: 4989 - RNA, 1376 nt, synthetic construct
  misc_feature 1..1376: note = mRNA a-1 (A100) (opt11) from Homo sapiens__NP_000448.3__HNF4A(1-375)(K234R)
  source 1..1376: mol_type = other RNA
aggagagtcccgcagtcggcgtccagcggctctgcttgttcgtgtgtgtgtcgttgcaggccttattcaagcttaccatgcgcctatctaaaacacttgtagacatggacatggccgactactcagccgcactcgaccccgcctacaccaccttagagttcgagaacgtccaagtcctcacgatgggcaatgacacctccccatccgaaggcaccaaccttaacgcacccaactccctcggagtatccgccctctgcgccatctgcggcgaccgcgccacaggcaaacactacggagcctcatcctgcgacggctgcaaaggcttcttccgacgctccgtcagaaaaaaccacatgtactcctgccgattctcccgtcaatgcgtagtcgacaaagacaaacgcaaccaatgccgatactgccgcctcaaaaagtgcttccgagccggcatgaaaaaagaagccgtccagaacgagcgcgaccgaatctccacaagaagatcatcatacgaagactcctccctcccctccatcaacgccctactccaagccgaagtcctctccagacaaatcacaagccccgtatccggtatcaacggcgacataagagccaaaaaaatcgcctccatagccgacgtctgcgaatccatgaaagaacaactcctcgtgctcgtagaatgggccaaatacattcccgccttctgcgaactccctctcgacgaccaggtcgctctactcagggctcacgccggcgaacacctcctcctcggcgcaacccgccgctccatggtattcaaagacgtcctactactcggaaacgactacatcgttccccgccactgcccagagctcgctgaaatgtctcgcgtctccatccgcatcctcgacgaactcgtcctcccattccaagaactccaaatcgacgacaacgaatacgcctacctaaaagccataatcttcttcgaccccgacgcaaaaggactctccgacccagggaaaattaaacgactccgctcccaagtacaggtaagcctcgaagactacatcaacgaccgccaatacgattcccgaggccgcttcggcgaacttctcctactactacccaccctacagtccatcacctggcaaatgatcgaacaaatccaattcatcaaacttttcggaatggccaaaatcgacaacctcctccaagaaatgctcctctgaggactagtccctgttcccagagcccacttttttttctttttttgaaataaaatagcctgtctttcagatctaaaaaaaaaaaaaaaaaaaaaaaaaaaaaaaaaaaaaaaaaaaaaaaaaaaaaaaaaaaaaaaaaaaaaaaaaaaaaaaaaaaaaaaaaaaaaaaaaaaa

SEQ ID NO: 4990 - RNA, 1376 nt, synthetic construct
  misc_feature 1..1376: note = mRNA a-1 (A100) (opt11) from Homo sapiens__NP_000448.3__HNF4A(1-375)(K300R)
  source 1..1376: mol_type = other RNA
aggagagtcccgcagtcggcgtccagcggctctgcttgttcgtgtgtgtgtcgttgcaggccttattcaagcttaccatgcgcctctcaaaaaccctagtagacatggacatggcagactactccgccgccctcgaccccgcatacaccaccctcgagttcgaaaacgtacaagtcctcactatgggaaacgacacctccccctcggaaggcaccaacctcaacgcccccaactcccttggggtcagtgcactatgcgccatctgcggcgatagagccaccggaaagcactacggcgcctcctcatgcgacggctgcaaaggcttcttccgccgatccgtccgcaaaaaccacatgtactcatgcagattcagcagacaatgcgtcgtcgacaaagacaagagaaaccagtgccgatactgccgcctcaagaaatgtttccgcgccggcatgaagaaagaagcagtccaaaacgaacgcgaccgcatctccacccgccgctcatcctacgaagactccagcctaccctccataaatgccctactccaagcagaagtcctctcccgccaaataacctccccagtatccggaatcaacggcgacatccgcgccaagaaaatcgcctcaatagcagacgtctgcgaatccatgaaagaacaactacttgtcttagtagaatgggccaaatacatccccgccttttgcgaactaccccttgacgaccaagtcgccctcctccgcgcacacgccggcgaacacctattactaggcgccactaaacgctccatggtcttcaaagacgtactcctcctcggcaacgactatatcgtcccccgacactgccccgaactcgccgaaatgtcccgcgtctcaatacgaatcctcgacgaactcgtcctccccttccaagaactacagatcgacgacaacgaatacgcctacctcaaagcaatcatcttcttcgaccccgacgcccgcggcctatccgaccctggcaaaatcaaacgcctgcgctcccaagtacaagtgtccctcgaagactacatcaacgaccgacagtacgattcccgaggccgattcggcgaactcctcctcctactcccaacactccaatccatcacctggcaaatgatcgaacaaatccaattcattaaactcttcggcatggcaaaaatcgacaacctcctacaagaaatgctcctctgaggactagtccctgttcccagagcccacttttttttctttttttgaaataaaatagcctgtctttcagatctaaaaaaaaaaaaaaaaaaaaaaaaaaaaaaaaaaaaaaaaaaaaaaaaaaaaaaaaaaaaaaaaaaaaaaaaaaaaaaaaaaaaaaaaaaaaaaaaaaaa

SEQ ID NO: 4991 - RNA, 1376 nt, synthetic construct
  misc_feature 1..1376: note = mRNA a-1 (A100) (opt11) from Homo sapiens__NP_000448.3__HNF4A(1-375)(K300R_K307R_K309R)
  source 1..1376: mol_type = other RNA
aggagagtcccgcagtcggcgtccagcggctctgcttgttcgtgtgtgtgtcgttgcaggccttattcaagcttaccatgcgcctcagcaaaacactcgttgacatggatatggccgactactccgccgcactagatcccgcctataccacactcgaattcgaaaacgttcaagtactcaccatgggcaacgacacctccccatccgaaggcaccaacctcaacgccccaaactccctcggtgtatccgcactctgcgcaatctgcggcgaccgcgctacaggcaaacactacggcgcatcctcctgcgacggatgcaagggcttcttccgccgctcagtccggaaaaaccacatgtactcttgccgcttctcacgtcagtgcgtggtcgacaaagacaaacgcaaccaatgccgctactgccgactcaaaaaatgcttccgcgccggaatgaaaaaagaagcagtacaaaacgaacgagaccgcatcagcacccgtcgctccagctacgaagactcttcacttccctccatcaacgccctcctccaagccgaagtcctctcacgccaaatcacgtcccccgtctccggcataaacggcgacatccgagcaaaaaaaatcgcctccatcgcagacgtatgcgaatccatgaaagaacagctcctagtcctcgtcgaatgggccaaatacatcccagcattctgcgaacttcccctagacgaccaagtcgcccttctcagagcacacgctggggaacacctcctactaggcgcaacaaaacgctccatggtcttcaaagacgtactactcctcggcaacgactacatagtccctcgccactgccccgaactcgcagaaatgtcccgagtctcaatacgaatactagacgaactagtcctccctttccaagaactacaaatcgacgacaacgaatacgcttacctaaaagccatcattttcttcgacccagacgcccgcgggctctccgaccccggccgcatacgacgccttcgctcccaagtccaagtatcattagaagactacatcaacgaccgccaatacgactcccgcggccgcttcggagaactcctactcctcctacccacactccagtccatcacctggcaaatgatcgaacaaatccaattcattaaactattcggcatggccaaaatcgacaacctactccaagaaatgctcctctgaggactagtccctgttcccagagcccacttttttttctttttttgaaataaaatagcctgtctttcagatctaaaaaaaaaaaaaaaaaaaaaaaaaaaaaaaaaaaaaaaaaaaaaaaaaaaaaaaaaaaaaaaaaaaaaaaaaaaaaaaaaaaaaaaaaaaaaaaaaaaa

SEQ ID NO: 4992 - RNA, 1376 nt, synthetic construct
  misc_feature 1..1376: note = mRNA a-1 (A100) (opt11) from Homo sapiens__NP_000448.3__HNF4A(1-375)(K447R_K470R)
  source 1..1376: mol_type = other RNA
aggagagtcccgcagtcggcgtccagcggctctgcttgttcgtgtgtgtgtcgttgcaggccttattcaagcttaccatgcgcctctccaaaaccctcgtcgatatggacatggccgactactccgccgcccttgaccccgcctacaccaccctagaattcgaaaacgtacaagtactcacaatgggcaacgacacctccccatccgaaggaacaaacctcaacgctcccaacagcttaggtgtctccgccctctgcgccatctgcggagatcgcgccaccggcaaacactacggcgcctcatcatgcgacggctgcaaaggcttcttccgacgctcagtccgcaaaaaccacatgtactcctgcagattctcaagacaatgtgtcgttgacaaagacaaacgaaaccaatgccgatactgccgccttaaaaaatgcttccgcgcaggaatgaaaaaagaagcagtccagaacgaacgcgaccgcatatccacccgccgttccagctacgaagacagctcactcccttcaatcaacgccctactacaagccgaagtcctctcccgacaaataacctcacccgtatccggcatcaacggagacatacgcgccaaaaaaatagcctcaatcgccgacgtctgcgaatccatgaaagaacaactcctagtcctagtcgaatgggccaaatacatacccgcattctgcgaactccccctagacgaccaggtagccctcctccgagcccacgccggcgagcacctcttacttggcgcaaccaaacgctccatggtattcaaggacgtcctactcctaggcaatgactacatcgtcccccgccactgccccgaactcgctgaaatgtcccgagtctcaatcagaattctagatgaactagtcctacccttccaagaactccaaatagacgacaacgaatacgcatacctcaaagccatcatattcttcgaccccgatgccaaaggtctaagcgaccccggaaaaataaagcgactacggtcgcaagtacaagtctccctggaagactacataaacgaccgccaatacgacagccgcggacgattcggagaactactcctactcctccccactctccaatccataacatggcaaatgatcgaacaaatccaattcatcaaactattcggcatggccaaaatcgacaatcttttacaggaaatgctactttgaggactagtccctgttcccagagcccacttttttttctttttttgaaataaaatagcctgtctttcagatctaaaaaaaaaaaaaaaaaaaaaaaaaaaaaaaaaaaaaaaaaaaaaaaaaaaaaaaaaaaaaaaaaaaaaaaaaaaaaaaaaaaaaaaaaaaaaaaaaaaa

SEQ ID NO: 4993 - RNA, 1376 nt, synthetic construct
  misc_feature 1..1376: note = mRNA a-1 (A100) (opt11) from Homo sapiens__NP_000448.3__HNF4A(1-375)(K458R)
  source 1..1376: mol_type = other RNA
aggagagtcccgcagtcggcgtccagcggctctgcttgttcgtgtgtgtgtcgttgcaggccttattcaagcttaccatgcgactttccaaaaccctagtcgacatggacatggccgactactctgccgccctcgacccagcttacacaacattagagttcgaaaacgtccaagtcctgaccatgggaaacgacacaagcccatctgaaggaactaacctcaacgcccccaactccctaggagtatccgctctctgcgccatctgcggagaccgcgccaccgggaaacactacggcgcctcctcatgcgacggatgcaaaggcttcttccgccgctcagtccgcaaaaaccacatgtactcctgtcgattctcccgacaatgcgtcgtcgacaaagacaaacgcaaccaatgccgatactgccgcctcaagaaatgcttcagagccggcatgaagaaagaagccgtacaaaacgaacgagaccgcatctccacacgccgtagctcctacgaagactcaagcctcccctcaatcaacgccctacttcaggccgaagtcctctcccgacaaattaccagcccagtctccggcatcaacggcgacatccgagccaagaaaatcgcatcaatagccgatgtctgcgaaagcatgaaagaacaactccttgtcctcgtagaatgggccaaatacatccccgccttctgcgaactacccctcgatgaccaagtagccctactcagagcccacgccggcgaacacctcctcctcggcgccaccaaacgcagcatggtcttcaaagatgtactcctcctcggcaacgactacatcgtcccccgacactgccccgaacttgcagaaatgagcagagtctcaatccgcatcctcgacgaactcgtactaccattccaagaactccagatcgacgacaacgaatacgcctacctgaaagcaattatcttcttcgaccccgacgccaaaggcctctcagaccccggcaaaattaaacgcctcagaagtcaagtccaagtatccctcgaagactatatcaatgaccgccaatacgactcccgcgggcgcttcggcgaactcctcctccttctcccaaccctccaatcaatcacctggcaaatgatcgaacaaatccaattcataaaattattcggaatggccaaaatcgacaacctactccaggaaatgctcctctgaggactagtccctgttcccagagcccacttttttttctttttttgaaataaaatagcctgtctttcagatctaaaaaaaaaaaaaaaaaaaaaaaaaaaaaaaaaaaaaaaaaaaaaaaaaaaaaaaaaaaaaaaaaaaaaaaaaaaaaaaaaaaaaaaaaaaaaaaaaaaa

SEQ ID NO: 4994 - RNA, 1376 nt, synthetic construct
  misc_feature 1..1376: note = mRNA a-1 (A100) (opt11) from Homo sapiens__NP_000448.3__HNF4A(1-375)(K106R_K108R_K126R_K127R)
  source 1..1376: mol_type = other RNA
aggagagtcccgcagtcggcgtccagcggctctgcttgttcgtgtgtgtgtcgttgcaggccttattcaagcttaccatgcgactgtccaaaaccttagtcgacatggacatggcagactactcagccgccctcgacccagcatatacaacactagagttcgaaaacgtccaggtccttaccatgggcaacgacacctcaccctccgaaggcaccaacctcaacgctcccaactccctaggcgtctcagccctctgcgcgatatgcggagaccgagccaccggtaaacactacggcgcttcgagctgcgacggctgcaaaggcttcttccgtcgctcagtccgcaaaaaccacatgtactcatgccgattctcacgccaatgcgtagtagaccgcgaccgccgcaaccagtgccgatactgccgtcttaagaaatgcttccgcgccggcatgcgcagagaagcagtccaaaacgaacgcgaccgcatctcaacccggcgcagctcttacgaagactcaagccttccctcaatcaacgccctactacaagccgaagtcctaagccgccaaatcacttcacccgtatccggaataaacggcgacatccgagccaagaaaatagcctccatcgccgacgtctgcgaaagcatgaaagaacaactcctcgtcttagtcgaatgggccaaatacatccccgcattctgcgaactcccactggacgaccaagtagccctgctccgagcccacgccggcgaacacctcctcctcggcgccacgaaacgaagcatggtcttcaaagacgtccttctccttggcaacgactacatcgtcccacgccactgcccagagctagccgaaatgtcacgagtctcaatccgcatactcgacgagctagtactcccattccaagaactacaaatagacgacaacgaatacgcctatctcaaagcgatcatattcttcgaccccgacgccaaaggcctctccgacccaggcaaaatcaaacgcctccgctcccaagtccaggtgtcccttgaagactacataaacgatcgccaatacgactcacgaggaagattcggcgaactccttcttcttctccccacactccagtcaatcacatggcaaatgatcgaacagatacaattcatcaaacttttcggcatggccaaaatagacaacctcctacaggaaatgctactatgaggactagtccctgttcccagagcccacttttttttctttttttgaaataaaatagcctgtctttcagatctaaaaaaaaaaaaaaaaaaaaaaaaaaaaaaaaaaaaaaaaaaaaaaaaaaaaaaaaaaaaaaaaaaaaaaaaaaaaaaaaaaaaaaaaaaaaaaaaaaaa

SEQ ID NO: 4995 - RNA, 1376 nt, synthetic construct
  misc_feature 1..1376: note = mRNA a-1 (A100) (opt11) from Homo sapiens__NP_000448.3__HNF4A(1-375)(E285Q)
  source 1..1376: mol_type = other RNA
aggagagtcccgcagtcggcgtccagcggctctgcttgttcgtgtgtgtgtcgttgcaggccttattcaagcttaccatgcgactctccaaaacacttgtcgacatggacatggccgactactccgccgccctcgatcccgcatacaccaccctcgagttcgaaaacgtccaagtcctcaccatgggaaatgacacctcgccatccgaaggcacgaacctaaatgcccccaactcccttggcgtctccgcactctgcgccatctgcggcgaccgcgcaaccgggaaacactacggcgcctcatcctgcgacggctgcaaaggattcttccgtcgatctgtacgcaaaaaccacatgtactcttgccgattcagccgacaatgcgtcgttgacaaagacaaacgcaaccaatgccgctactgccgactcaaaaagtgcttccgcgcaggtatgaaaaaggaagcagtacaaaacgaacgagaccgcatttccacccgacgatcatcctatgaagactcctccctcccctcaatcaacgccctacttcaagccgaagtcctctcccgacaaataacctcccccgtcagcggcatcaacggcgacatcagagccaagaaaatcgcaagcatcgcagacgtatgcgagtcaatgaaagaacaactcctcgtcctagtcgaatgggcaaaatacatccccgccttctgcgaactcccactagacgaccaagtagccctcctccgcgcccacgccggagaacacctcctcctaggcgccactaaacgctccatggtcttcaaagacgtcctcctcctaggcaatgattacatcgttccccgacattgccccgaactagccgaaatgtcccgagtatccatccgcatcctcgacgaactcgtcctaccattccaagaactacaaatcgacgacaaccaatatgcatacctaaaagcaatcatcttcttcgaccccgacgccaaaggccttagcgacccaggcaaaatcaagcgactacgcagccaagtacaagtatccctagaagattacatcaacgatcgccaatacgactcccgcggccggttcggcgaactcctcctcctcctccccactctacaatccataacctggcaaatgatagaacaaatccaattcatcaagttattcggcatggccaaaatagacaacctcctccaagaaatgctactctgaggactagtccctgttcccagagcccacttttttttctttttttgaaataaaatagcctgtctttcagatctaaaaaaaaaaaaaaaaaaaaaaaaaaaaaaaaaaaaaaaaaaaaaaaaaaaaaaaaaaaaaaaaaaaaaaaaaaaaaaaaaaaaaaaaaaaaaaaaaaaa

SEQ ID NO: 4996 - RNA, 1376 nt, synthetic construct
  misc_feature 1..1376: note = mRNA a-1 (A100) (opt11) from Homo sapiens__NP_000448.3__HNF4A(1-375)(T166E)
  source 1..1376: mol_type = other RNA
aggagagtcccgcagtcggcgtccagcggctctgcttgttcgtgtgtgtgtcgttgcaggccttattcaagcttaccatgcgcctatccaaaaccctcgtcgacatggacatggccgactactcagccgcactcgaccccgcatataccactctcgagttcgaaaacgtacaagtcctcaccatggggaacgacactagcccctccgaaggcaccaacctcaacgcaccaaactccttaggggtttcagccctatgcgccatatgcggcgatagagcaacaggaaaacactacggcgcctcatcatgcgatggctgcaaaggcttcttccgccgatccgtccgaaagaaccacatgtactcatgccgcttctcacgacaatgcgtcgtcgacaaagacaagcgaaaccaatgccgctactgccgcctaaagaaatgcttccgcgccggcatgaagaaagaagcagtacaaaacgaacgcgatcgcatctccacccgcagatcgtcctacgaagacagcagcctccccagcatcaacgccctcctccaagctgaagtcctctcccgccaaatcgaatcacccgtctcaggcatcaacggtgatatccgcgcaaagaaaatagcctccatcgccgacgtctgcgaatccatgaaagaacaactcctagtcctagtagaatgggccaaatacatcccagcattctgcgagctccccctggacgatcaagtcgctctcctccgcgcccacgccggcgaacacctcctactcggagcaaccaaacgcagtatggtattcaaagacgtcctactactcggtaacgactacatagtaccccgccactgcccagaactcgccgaaatgtcccgtgtctccatacgcatcctagacgaactcgtcctccccttccaagaactacaaatcgacgacaacgaatacgcctacctaaaagccatcatcttcttcgaccccgacgctaaaggcctctccgatccaggcaaaatcaaacgcctacgaagccaagtccaagtttccctcgaagactacatcaacgacagacaatacgactcccgcggccgcttcggcgaactactcctcctacttccaacactccaaagcataacgtggcaaatgatagaacaaatccaattcatcaaactcttcggcatggctaaaatagacaacctcctccaggaaatgctcctttgaggactagtccctgttcccagagcccacttttttttctttttttgaaataaaatagcctgtctttcagatctaaaaaaaaaaaaaaaaaaaaaaaaaaaaaaaaaaaaaaaaaaaaaaaaaaaaaaaaaaaaaaaaaaaaaaaaaaaaaaaaaaaaaaaaaaaaaaaaaaaa

SEQ ID NO: 4997 - RNA, 1376 nt, synthetic construct
  misc_feature 1..1376: note = mRNA a-1 (A100) (opt11) from Homo sapiens__NP_000448.3__HNF4A(1-375)(S148A)
  source 1..1376: mol_type = other RNA
aggagagtcccgcagtcggcgtccagcggctctgcttgttcgtgtgtgtgtcgttgcaggccttattcaagcttaccatgcgactatctaaaacactcgtcgacatggacatggccgactactccgcggccctggaccccgcctacaccacgctagaattcgaaaacgtccaagtattaacaatgggaaacgacacctctccctccgaaggcaccaacctcaacgcacccaactccctcggagtctccgccctctgcgccatctgtggcgaccgagcaaccgggaaacattacggcgcatcctcctgcgacggctgcaaaggcttcttccgccgatccgtcagaaaaaaccacatgtactcgtgccgattctcacgccaatgcgtagttgacaaagacaaacgcaaccaatgccgctactgccgccttaaaaaatgcttccgcgccggaatgaaaaaagaggccgtacaaaatgaacgcgaccgaatcagcacacgccgctcttcatacgaagactccgcactcccatccatcaacgccctactacaagccgaagtcctcagccggcaaatcacatccccagtgtccggtattaacggagacatacgcgccaagaaaatagcctccatagcagacgtctgcgagtcaatgaaagaacaactcctcgtactcgtagaatgggcaaaatacatccccgccttctgcgaacttcccctcgacgaccaagtcgcactcctccgcgcccacgccggcgaacatctcctactaggagccaccaaacgttcaatggtcttcaaagacgtcctgctactcggcaacgactatatcgtccccagacactgccccgaactagcagaaatgtccagagtctcaatacgaatcctagacgaactcgtcctcccattccaagaactacaaatcgacgacaacgaatacgcctacctcaaagccatcatcttctttgaccccgacgccaaagggctctccgaccccggaaaaatcaaacgcctgcgctcacaagtccaagtatccctcgaagactacatcaacgaccgccagtacgacagccgaggacgtttcggcgaactcctactcctcctcccaacactccagtccatcacctggcaaatgatcgaacaaatccaattcataaaactcttcggcatggccaaaatcgacaacctactccaagaaatgctcctctgaggactagtccctgttcccagagcccacttttttttctttttttgaaataaaatagcctgtctttcagatctaaaaaaaaaaaaaaaaaaaaaaaaaaaaaaaaaaaaaaaaaaaaaaaaaaaaaaaaaaaaaaaaaaaaaaaaaaaaaaaaaaaaaaaaaaaaaaaaaaaa

SEQ ID NO: 4998 - RNA, 1376 nt, synthetic construct
  misc_feature 1..1376: note = mRNA a-1 (A100) (opt11) from Homo sapiens__NP_000448.3__HNF4A(1-375)(S148E)
  source 1..1376: mol_type = other RNA
aggagagtcccgcagtcggcgtccagcggctctgcttgttcgtgtgtgtgtcgttgcaggccttattcaagcttaccatgcgcctctccaaaaccctcgtcgacatggacatggccgactactcagcagccctagacccagcctacacaacactcgagttcgaaaacgtacaagtactaaccatgggcaacgacacctcaccctctgaaggaaccaacctcaacgcacccaactccctcggcgtatccgccctgtgcgccatctgcggtgatcgcgccaccggcaaacactacggggcctcaagctgcgacggctgcaaaggcttcttccgccgctctgtcaggaaaaaccacatgtacagctgccgattctcccgccaatgcgtagtcgataaagacaaacggaaccaatgccgatactgtcgcctcaagaaatgcttccgagcaggcatgaaaaaggaagcagtccaaaacgaacgggaccgaatctccactcgccgctcatcctacgaagacagcgaactaccctccattaatgccctcctccaagcagaagtactttcacgacaaataacctcccccgtctcaggcatcaacggcgacatcagagccaagaaaatcgcctccatcgccgacgtatgcgaatccatgaaagaacaactcctggtgctagtcgaatgggcaaaatatatccccgctttctgcgaactccccctagacgaccaagtcgcactcctccgagcccacgccggagagcacctcttactaggcgccaccaaacgaagcatggtcttcaaagacgtcctcctcctcggaaatgactacatcgtccccagacactgccccgaactcgccgaaatgtcacgagtctccatcagaatcctcgacgaactggtcctaccatttcaagaactacaaatcgatgacaacgaatacgcatacctcaaagcgatcatcttcttcgaccccgacgccaaagggctctccgacccaggcaaaatcaaacgcctcagaagccaggtccaagtctccctagaagactacataaacgaccgccagtatgactcccgcggcagattcggcgaactcctccttctacttccgaccctccaatccatcacctggcaaatgatcgaacaaatccaattcatcaaactcttcggcatggccaaaattgacaacctcctacaagaaatgctcctatgaggactagtccctgttcccagagcccacttttttttctttttttgaaataaaatagcctgtctttcagatctaaaaaaaaaaaaaaaaaaaaaaaaaaaaaaaaaaaaaaaaaaaaaaaaaaaaaaaaaaaaaaaaaaaaaaaaaaaaaaaaaaaaaaaaaaaaaaaaaaaa

SEQ ID NO: 4999 - RNA, 1376 nt, synthetic construct
  misc_feature 1..1376: note = mRNA a-1 (A100) (opt11) from Homo sapiens__NP_000448.3__HNF4A(1-375)(S183A)
  source 1..1376: mol_type = other RNA
aggagagtcccgcagtcggcgtccagcggctctgcttgttcgtgtgtgtgtcgttgcaggccttattcaagcttaccatgcgactcagcaaaacactagttgacatggacatggccgactacagcgcagccctggatccagcctacaccaccctcgaattcgaaaacgtacaagtcctcaccatgggtaacgacacctccccctcggagggaacaaacctcaacgcccccaactcactcggcgtcagcgcactctgcgccatatgcggcgaccgcgccaccggaaaacactacggagcctcaagctgcgacggctgcaaaggattcttcagacgcagcgtccggaaaaaccacatgtactcctgccgcttctcccgacaatgcgtcgtcgacaaagacaaacgaaaccaatgccgatactgccgcctaaaaaaatgcttccgcgctggaatgaaaaaagaagcagtacaaaacgaacgcgaccgcatatccaccagaagatcctcctacgaagactccagcctaccctcaatcaacgctctcctccaagcagaagtcctcagccgccaaatcacctcacccgtcagcggcatcaacggggacatccgcgccaaaaaaatcgccgcgattgccgacgtgtgcgaatccatgaaagagcaactcctcgtcctcgtagaatgggccaaatacatccccgccttctgcgaactacccctagacgaccaagtagcccttctacgcgcccacgccggggaacacctcctactcggcgcaaccaaaaggtcaatggtcttcaaagacgtcctcctactcggaaacgactacatcgtgcccaggcactgtccggaactcgccgaaatgtccagagtctcaatccggatactagacgaactcgtactccccttccaagaactacaaatcgacgacaacgaatacgcatacctaaaagccatcatcttcttcgacccagacgctaaaggactaagcgacccaggcaagatcaaacgactacgttcccaagtacaagtatccctggaagactacatcaacgaccgccaatacgactcacgaggtcgcttcggcgaactgctcctactcctacccaccctccaatccatcacatggcaaatgatcgaacaaatccaattcatcaaactcttcggtatggctaaaatcgacaacctactccaagaaatgcttctctgaggactagtccctgttcccagagcccacttttttttctttttttgaaataaaatagcctgtctttcagatctaaaaaaaaaaaaaaaaaaaaaaaaaaaaaaaaaaaaaaaaaaaaaaaaaaaaaaaaaaaaaaaaaaaaaaaaaaaaaaaaaaaaaaaaaaaaaaaaaaaa

SEQ ID NO: 5000 - RNA, 1376 nt, synthetic construct
  misc_feature 1..1376: note = mRNA a-1 (A100) (opt11) from Homo sapiens__NP_000448.3__HNF4A(1-375)(S183E)
  source 1..1376: mol_type = other RNA
aggagagtcccgcagtcggcgtccagcggctctgcttgttcgtgtgtgtgtcgttgcaggccttattcaagcttaccatgcgcctctccaaaaccctcgtcgacatggacatggccgactactccgccgccctcgacccagcctacacaacactagagttcgaaaacgtccaagtcctaaccatgggaaacgatacctccccctcggaagggaccaacctcaacgccccaaattcacttggagtctccgccctatgcgccatatgtggagaccgcgctaccggaaaacactatggcgcgtcatcctgcgacggatgcaaaggcttcttcagacgctcggtccgcaaaaaccacatgtactcctgccgattctcccgccaatgcgtcgtcgacaaagacaaaagaaaccaatgcaggtactgccgtctgaagaaatgcttccgcgccggaatgaagaaagaagccgtccaaaacgaacgcgaccgaatcagcaccagacgcagctcctacgaagactcctcactcccatcaatcaacgccctactccaagccgaagtcctctcccgccaaatcacctccccagtaagcggaatcaacggcgacatccgcgccaagaaaatagccgaaatagccgacgtctgcgaatcaatgaaagaacagctactcgtcctcgtcgaatgggccaaatacatacccgccttctgcgaactccctctcgacgaccaagtcgcactactcagagcccacgccggagaacacctactcctcggagccacgaaacgatccatggtattcaaagacgtactcctccttggtaacgattacatcgtcccaagacactgcccagaactcgccgaaatgtccagagtatcaatccgaatcctcgacgagctagtactcccctttcaggaactacaaatagatgacaacgaatacgcatacctaaaagccatcatcttctttgaccccgacgccaaaggcctctccgacccaggcaaaatcaaacgcctacgctcccaagttcaagtatccctcgaagactacatcaatgaccgccaatacgacagccgaggacgcttcggcgaactactcctgctactccccaccctacaatccatcacttggcaaatgatcgaacaaatccaattcatcaaactcttcggcatggccaaaatcgacaaccttctccaggaaatgctcctctgaggactagtccctgttcccagagcccacttttttttctttttttgaaataaaatagcctgtctttcagatctaaaaaaaaaaaaaaaaaaaaaaaaaaaaaaaaaaaaaaaaaaaaaaaaaaaaaaaaaaaaaaaaaaaaaaaaaaaaaaaaaaaaaaaaaaaaaaaaaaaa

SEQ ID NO: 5001 - RNA, 1376 nt, synthetic construct
  misc_feature 1..1376: note = mRNA a-1 (A100) (opt11) from Homo sapiens__NP_000448.3__HNF4A(1-375)(S461A)
  source 1..1376: mol_type = other RNA
aggagagtcccgcagtcggcgtccagcggctctgcttgttcgtgtgtgtgtcgttgcaggccttattcaagcttaccatgcgactctccaaaaccctcgtcgacatggacatggcagattactccgctgccctcgacccggcctacaccacactagagttcgaaaacgttcaagtattaaccatgggcaacgacacatcccccagcgaaggcaccaatctaaacgcacccaactccctcggggtctcagcactatgcgccatctgcggagatcgcgctactggcaaacactacggagcctcctcctgcgacggctgcaaaggcttcttccgaagatcagtccgcaaaaaccacatgtactcatgccgcttctctcgccaatgcgtcgtcgacaaagacaaacgaaaccagtgccgctactgccgcctaaagaaatgctttcgcgccggcatgaagaaagaagcagtacaaaacgaacgcgaccgcatctccacccgccggtcaagctacgaggactcatcactcccatcaatcaacgctctcctccaagcagaagtccttagccgacaaatcacatcccccgtttccggaatcaacggcgacatccgagcaaagaaaatcgcctctatcgcagacgtatgcgaatccatgaaagaacaactcctagtcctagtcgaatgggcaaaatatatacccgccttctgcgaactgcccctagacgatcaagtcgcactactccgagcccacgccggcgagcacctcctgctcggcgccacaaaacgatccatggtattcaaagacgtactactcctcgggaacgactacatcgtaccccgccactgccccgagctcgccgaaatgtcacgtgtctcaattcgcatactagacgagctagtcctccccttccaagaactacaaatagacgacaacgaatacgcatacctaaaagccatcatcttcttcgaccccgatgccaaaggactatccgaccccggcaaaatcaaacgccttcgttcacaagtgcaagtctcgctcgaagactacatcaacgaccgccaatacgactccagaggccgattcggagaactcctactcctcctccccaccctccaatccatcacatggcaaatgatagaacaaatccaattcataaaactcttcggcatggccaaaatcgacaacctgctccaagaaatgctcctctgaggactagtccctgttcccagagcccacttttttttctttttttgaaataaaatagcctgtctttcagatctaaaaaaaaaaaaaaaaaaaaaaaaaaaaaaaaaaaaaaaaaaaaaaaaaaaaaaaaaaaaaaaaaaaaaaaaaaaaaaaaaaaaaaaaaaaaaaaaaaaa

SEQ ID NO: 5002 - RNA, 1376 nt, synthetic construct
  misc_feature 1..1376: note = mRNA a-1 (A100) (opt11) from Homo sapiens__NP_000448.3__HNF4A(1-375)(S461E)
  source 1..1376: mol_type = other RNA
aggagagtcccgcagtcggcgtccagcggctctgcttgttcgtgtgtgtgtcgttgcaggccttattcaagcttaccatgcgactgtccaaaaccctagtcgacatggacatggcagactacagcgcagcactcgatcccgcctacaccaccctagagttcgaaaacgtacaagtactaacaatgggaaacgacacctctccatccgaaggcacaaacctcaacgcacccaactccctcggcgtctccgcactttgcgcaatctgcggcgaccgagccaccggcaaacattacggagcctccagctgcgacggctgcaagggattcttccgccgcagcgtccgcaaaaaccacatgtactcgtgccgcttctcacgacagtgcgtagtcgacaaagacaaacgcaaccaatgcagatactgcagacttaaaaagtgcttccgcgcgggaatgaagaaagaagccgtccaaaacgaacgagatcgcatctccacccgccggagctcatacgaagactcatcactaccatcaataaacgccctcctacaagccgaagtcctatcccgccaaataacctcccccgtctctggcatcaacggagacatccgcgccaagaaaatcgcaagcatcgccgacgtctgcgaatcaatgaaagagcaactactcgtcctagtagaatgggcaaaatacataccagccttctgcgaactccccctagacgaccaagtcgcgctactccgagcccacgcaggagaacaccttctcctaggcgcaaccaaacgctccatggtatttaaagacgtcctactcctgggcaacgactacatagtcccccgccattgcccagaactcgccgaaatgtcacgcgtatcgatacgcatcctcgacgagctagtcctccccttccaagaactacaaatagacgacaacgaatacgcctacttgaaagccataatcttcttcgacccagacgccaaaggcctctccgacccaggcaaaataaaacgcctacgcagccaggtacaggtcagcctcgaagactatatcaacgaccgtcaatacgactcccgaggccgattcggagaactcctcctactcctaccaaccctccaatcaatcacctggcaaatgatcgaacaaatacaattcatcaaactgttcggcatggcaaaaatagacaacctacttcaagaaatgctcttatgaggactagtccctgttcccagagcccacttttttttctttttttgaaataaaatagcctgtctttcagatctaaaaaaaaaaaaaaaaaaaaaaaaaaaaaaaaaaaaaaaaaaaaaaaaaaaaaaaaaaaaaaaaaaaaaaaaaaaaaaaaaaaaaaaaaaaaaaaaaaaa

SEQ ID NO: 5003 - RNA, 1376 nt, synthetic construct
  misc_feature 1..1376: note = mRNA a-1 (A100) (opt11) from Homo sapiens__NP_000448.3__HNF4A(1-375)(S142A_S143A_S313A)
  source 1..1376: mol_type = other RNA
aggagagtcccgcagtcggcgtccagcggctctgcttgttcgtgtgtgtgtcgttgcaggccttattcaagcttaccatgcgcctctccaaaacccttgtcgacatggacatggcagactactccgccgcacttgacccggcttacacaaccctagaattcgaaaacgtccaagtactcaccatgggaaatgacacctcaccctctgaagggaccaacctaaacgcaccaaactcactcggagtcagcgccctatgcgccatctgcggcgaccgcgcaaccggaaaacactacggcgcctcctcttgcgacggctgcaaaggcttcttccgaagatccgtcagaaaaaaccatatgtacagctgccgcttctcacgacaatgcgtcgtcgacaaagacaaaagaaaccaatgcagatattgccgactcaaaaaatgctttcgagccggcatgaaaaaggaagcagtccaaaacgaacgcgaccgcatttccacccgcagagccgcctacgaagacagctccctccccagcatcaacgcactactccaagctgaagtattatcccgccaaatcacctccccagtctccggcatcaacggcgacatacgggccaaaaaaatcgcctcaatcgccgacgtctgcgaatccatgaaagaacaactcctagtcctagtcgaatgggccaaatacatacccgcattctgcgaactacctttagacgaccaagtcgccctcttacgagcccacgccggcgaacatctactgcttggcgccaccaaacgatccatggttttcaaagacgtactactcctcggaaacgactacatcgtcccacgtcactgcccagaactagccgaaatgtcccgcgtctcaatccgcatcctcgacgaactcgtactcccctttcaagaactacaaatcgacgacaacgagtacgcctacctcaaagccatcatcttcttcgaccccgacgcaaaaggcctctccgaccccggcaaaattaaacgacttagagcacaagtacaagtcagcctagaagactacataaatgaccgccaatacgacagcagaggccgcttcggcgagctcctactcctcctccccaccctacaatcaattacctggcagatgatcgaacaaatacaattcataaaacttttcggaatggccaaaatcgacaacctactccaagaaatgctcctctgaggactagtccctgttcccagagcccacttttttttctttttttgaaataaaatagcctgtctttcagatctaaaaaaaaaaaaaaaaaaaaaaaaaaaaaaaaaaaaaaaaaaaaaaaaaaaaaaaaaaaaaaaaaaaaaaaaaaaaaaaaaaaaaaaaaaaaaaaaaaaa

SEQ ID NO: 5004 - RNA, 1376 nt, synthetic construct
  misc_feature 1..1376: note = mRNA a-1 (A100) (opt11) from Homo sapiens__NP_000448.3__HNF4A(1-375)(S142A_S143A_S313A_K458R)
  source 1..1376: mol_type = other RNA
aggagagtcccgcagtcggcgtccagcggctctgcttgttcgtgtgtgtgtcgttgcaggccttattcaagcttaccatgcgcctcagcaaaacactagtagacatggacatggcagactactccgccgccctagacccagcctacacaaccctcgaattcgaaaacgtccaagtcctaacgatgggcaacgacacatccccctccgagggcaccaacctcaacgcccccaactctctcggcgtctctgccctctgcgccatctgcggcgaccgcgccaccggaaaacactacggagccagctcatgcgacggctgcaaaggattctttcgacgctccgttagaaaaaaccacatgtactcatgccgtttctctcgccaatgcgtcgtcgacaaagacaaacgtaaccagtgccgctactgccgcctaaaaaaatgcttccgcgcaggcatgaaaaaagaagccgtccaaaacgagagagaccgcatatccacccgccgagccgcctacgaagactcttcactaccgtccataaacgccctcctacaagccgaagtcctatcacgacaaataacctcccccgtcagcggcatcaacggcgacatcagagccaagaaaatagcctctatagcagacgtatgcgaatcaatgaaagaacaactcctagtactagtcgaatgggccaaatacattcccgccttctgcgaactgccactcgacgaccaagtggccctactccgtgcccacgccggcgaacatttactcctcggcgccaccaaacgatcaatggtattcaaagacgtactactcctcggcaacgactacatagtcccccgccactgccccgaactcgccgaaatgtcacgtgtctctatccggatcctagacgaactcgtcctccccttccaagaactccaaatcgacgacaacgaatacgcctacctaaaagccatcatattcttcgatcccgacgccaagggtctctccgacccaggaaaaatcaaacgcctacgcgcacaagtacaagtatccctcgaagactacatcaacgaccgacaatacgacagccgcggccgattcggcgaactactccttctcctccccacactacaatcaataacctggcaaatgatcgaacaaatccagttcataaaactctttggcatggccaaaatagacaacctcctccaggaaatgctcctctgaggactagtccctgttcccagagcccacttttttttctttttttgaaataaaatagcctgtctttcagatctaaaaaaaaaaaaaaaaaaaaaaaaaaaaaaaaaaaaaaaaaaaaaaaaaaaaaaaaaaaaaaaaaaaaaaaaaaaaaaaaaaaaaaaaaaaaaaaaaaaa

SEQ ID NO: 5005 - RNA, 1376 nt, synthetic construct
  misc_feature 1..1376: note = mRNA a-1 (A100) (opt11) from Homo sapiens__NP_000448.3__HNF4A(1-375)(S142A_S143A_S167A_S313A_ S378A_T429A_T432A_S436A_K458R)
  source 1..1376: mol_type = other RNA
aggagagtcccgcagtcggcgtccagcggctctgcttgttcgtgtgtgtgtcgttgcaggccttattcaagcttaccatgcgcctaagcaaaaccctagtcgacatggacatggcagactactccgccgccctcgaccccgcctacaccaccctagaattcgaaaacgttcaggtcctcaccatggggaacgacacatcgccaagcgaaggaaccaaccttaacgccccaaactccctgggcgtctccgccctttgcgccatctgcggagaccgcgccacaggcaaacactatggcgcctccagctgcgacggctgcaaaggcttcttccgacgctcagtacggaaaaaccacatgtactcatgccgcttctcacgccaatgcgtcgtcgacaaagacaaacgcaaccaatgccgctactgccgactcaaaaaatgcttccgcgcaggcatgaaaaaggaagccgtccaaaacgaacgcgaccgtatctcaacccgacgtgctgcatacgaagactcatccctcccctccatcaacgccctactccaggccgaagtcctgagtcgacaaatcacagcccccgtctcaggcatcaacggcgacatccgagcaaagaaaatcgcctctatagccgacgtctgcgaatcaatgaaagaacaactcctcgtcctcgtagaatgggccaaatacatccccgcattctgcgaactacccctcgacgaccaagtcgccctactaagagcccacgccggcgaacaccttctgcttggcgccacaaaacgcagcatggtattcaaagacgtactactcctcggcaacgactacatcgtaccccgacactgccccgaactcgccgaaatgtcccgcgtctccatacgcatcctagacgaactggtcctccccttccaggaactccaaatcgacgacaacgaatacgcctacctcaaagccatcatattcttcgacccagacgcaaaaggcctcagcgaccccggcaaaatcaaaagactccgcgcccaagtacaagtcagcctagaagattacataaacgaccgccaatacgatagcagaggccgattcggcgaactcctcctactcctacccacactacaatcaatcacctggcaaatgatagaacaaatccaattcatcaagctattcggcatggcaaaaattgacaacctactacaagaaatgctcctctgaggactagtccctgttcccagagcccacttttttttctttttttgaaataaaatagcctgtctttcagatctaaaaaaaaaaaaaaaaaaaaaaaaaaaaaaaaaaaaaaaaaaaaaaaaaaaaaaaaaaaaaaaaaaaaaaaaaaaaaaaaaaaaaaaaaaaaaaaaaaaa

SEQ ID NO: 5006 - RNA, 1376 nt, synthetic construct
  misc_feature 1..1376: note = mRNA a-1 (A100) (opt11) from Homo sapiens__NP_000448.3__HNF4A(1-375)(S142A_S143A_S148A_S167A_ S313A_S378A_T429A_T432A_S436A_K458R)
  source 1..1376: mol_type = other RNA
aggagagtcccgcagtcggcgtccagcggctctgcttgttcgtgtgtgtgtcgttgcaggccttattcaagcttaccatgcgcctttccaaaaccctagtcgacatggacatggccgactactcagccgcactagaccccgcctatactaccctagagttcgaaaacgtccaagtcctcaccatgggcaatgacacctccccatccgaaggcaccaacctcaacgcccccaactcactaggagtctccgccctttgcgccatctgcggcgaccgcgccacaggaaaacactacggcgcgtcaagctgcgatggatgcaaaggtttcttccgtcgttccgtccgcaaaaaccacatgtattcctgccgattctcgcgccaatgcgtcgtcgacaaagacaaacgaaaccaatgccgatactgccgcctcaaaaagtgcttccgcgccggcatgaagaaagaagccgtccaaaacgaacgcgacagaatatcaacccgacgagccgcctacgaagactcagccctcccctcaataaatgccctcctccaagcagaggtcctttccagacagatcaccgcccccgtctccggcatcaacggcgacatcagagccaagaaaatcgcctccatcgccgacgtctgcgaatccatgaaagaacaacttctagttctcgtcgaatgggccaaatacatccccgccttctgcgaactaccccttgacgaccaagtcgctctcctgcgcgcccacgccggcgaacacctccttctcggagcaactaaacgctccatggtgttcaaagacgtcctcctcctcggcaacgactacatcgtcccccgacactgccccgaactagctgaaatgtcacgcgtcagcatcagaatcctcgacgaactcgtcctccccttccaagaactccaaatcgatgacaacgagtacgcctatcttaaagccatcatattcttcgacccagacgcaaaaggtctctccgaccccggcaaaataaaacgactccgcgcccaagtccaagtttccctcgaagactacatcaacgaccgacaatacgattcccgcggccgattcggcgaactcctcctactccttcccaccctccagtccataacatggcaaatgatcgaacaaatccaattcataaaactcttcggcatggccaaaatagacaacctcctccaagagatgctactctgaggactagtccctgttcccagagcccacttttttttctttttttgaaataaaatagcctgtctttcagatctaaaaaaaaaaaaaaaaaaaaaaaaaaaaaaaaaaaaaaaaaaaaaaaaaaaaaaaaaaaaaaaaaaaaaaaaaaaaaaaaaaaaaaaaaaaaaaaaaaaa

SEQ ID NO: 5007 - RNA, 1376 nt, synthetic construct
  misc_feature 1..1376: note = mRNA a-1 (A100) (opt11) from Homo sapiens__NP_000448.3__HNF4A(1-375)(K106R_K108R_K126R_K127R_ S142A_S143A_S148A_S167A_S313A_S378A_T429A_T432A_S436A_K458R )
  source 1..1376: mol_type = other RNA
aggagagtcccgcagtcggcgtccagcggctctgcttgttcgtgtgtgtgtcgttgcaggccttattcaagcttaccatgcgcctctccaagaccctcgtcgacatggacatggcagactacagcgcagccctagaccccgcctacaccacccttgagttcgaaaacgtccaagtcctaacaatgggaaacgacacctcaccatccgaaggcacaaacctaaacgcccccaactcacttggcgtttcggccctctgcgccatatgcggagaccgcgccaccggcaaacactacggagcatcctcctgcgacggctgtaaaggcttcttcagacgatccgtacgcaaaaaccacatgtactcctgccgcttcagcagacaatgcgtcgtcgaccgcgaccgccgcaaccaatgccgctactgccgcctaaagaaatgcttccgcgcaggcatgcgccgagaagcagtccaaaacgaacgagaccgaataagcacccgcagagccgcgtacgaagactccgccctcccatcaatcaacgcacttctacaagccgaagtactctcccgccaaataaccgccccagtatccggaatcaacggcgacatccgcgccaagaaaatcgcttccatagcagacgtctgtgaatccatgaaagagcaactcctcgtcctcgtcgagtgggccaaatacatccccgccttctgcgagctacccctcgacgaccaagtcgccctcctccgagcccacgctggcgaacacctcctactcggcgccaccaaaagatccatggttttcaaagacgtactccttctgggaaacgactacatcgtacccaggcactgccccgagctagccgaaatgtccagagtctcaatccgcatactcgacgagctcgtccttccctttcaagaacttcaaatagacgacaacgaatacgcatacctgaaagccatcatcttcttcgaccccgacgccaaaggactatccgacccaggcaaaatcaaacgcctacgagcacaagtacaagtctccctagaagactacataaacgaccgccaatacgactcgagaggccgcttcggcgaactactccttctcctccctaccctacaaagcatcacctggcaaatgatcgaacaaatccaattcataaaactcttcggaatggccaaaatcgacaatttactccaggaaatgttactctgaggactagtccctgttcccagagcccacttttttttctttttttgaaataaaatagcctgtctttcagatctaaaaaaaaaaaaaaaaaaaaaaaaaaaaaaaaaaaaaaaaaaaaaaaaaaaaaaaaaaaaaaaaaaaaaaaaaaaaaaaaaaaaaaaaaaaaaaaaaaaa

SEQ ID NO: 5008 - RNA, 1376 nt, synthetic construct
  misc_feature 1..1376: note = mRNA a-1 (A100) (opt11) from Homo sapiens__NP_000448.3__HNF4A(1-375)(S142A_S143A_S148A_T166A_ S167A_S313A_S378A_T429A_T432A_S436A_K458R)
  source 1..1376: mol_type = other RNA
aggagagtcccgcagtcggcgtccagcggctctgcttgttcgtgtgtgtgtcgttgcaggccttattcaagcttaccatgcgcctctccaaaacactcgtcgatatggacatggccgactacagcgctgcccttgaccccgcgtacaccaccctagaattcgaaaacgtccaagttctcaccatgggcaacgacacctccccctcagaaggaaccaacctaaatgcccccaactctctcggcgtctccgctctctgcgccatctgcggcgaccgagccaccggaaaacactacggagcctcctcctgcgacgggtgcaaaggcttcttcagaagatccgtccgcaaaaaccacatgtactcatgccggttctcccgacaatgcgtagtcgacaaagacaaacgcaaccaatgccgctactgccgcctcaaaaaatgctttcgcgccggcatgaagaaagaagcagtacaaaacgaaagagacagaatctcaactcgcagagccgcctacgaagactcggcgctcccctctatcaacgccctgcttcaagccgaagtcctctcacgccaaatcgccgcacccgtatccggaatcaacggcgatatccgcgcaaaaaaaatcgcatccatcgccgacgtctgcgaatccatgaaggaacaactgctagtcctcgtagaatgggccaaatacatccctgccttctgtgaactccccctagacgatcaagtcgccctcctacgcgcccacgccggcgagcacctactacttggagccaccaaacgttctatggtcttcaaagacgtactcttactcggcaacgactacatagtcccccgccactgcccagaactggccgaaatgagccgcgtctcaatacgaatcctagacgaactcgtgctaccattccaagaactacaaatcgacgacaacgaatacgcatacctaaaagctattatcttcttcgaccccgacgccaaaggcctatccgaccccggcaaaataaaacgcctgcgagcccaagtacaagtaagcctcgaagactacatcaacgaccgacagtacgactcccgaggccgcttcggcgaactcctacttctcctccccaccctacaatccatcacctggcaaatgatagaacaaatccaattcatcaaactcttcggaatggcaaaaatcgataacctgctccaagaaatgctcctctgaggactagtccctgttcccagagcccacttttttttctttttttgaaataaaatagcctgtctttcagatctaaaaaaaaaaaaaaaaaaaaaaaaaaaaaaaaaaaaaaaaaaaaaaaaaaaaaaaaaaaaaaaaaaaaaaaaaaaaaaaaaaaaaaaaaaaaaaaaaaaa

SEQ ID NO: 5009 - RNA, 1376 nt, synthetic construct
  misc_feature 1..1376: note = mRNA a-1 (A100) (opt11) from Homo sapiens__NP_000448.3__HNF4A(1-375)(S87A_S142A_S143A_S148A_T 166A_S167A_S313A_S378A_T429A_T432A_S436A_K458R)
  source 1..1376: mol_type = other RNA
aggagagtcccgcagtcggcgtccagcggctctgcttgttcgtgtgtgtgtcgttgcaggccttattcaagcttaccatgcgcctctccaaaaccctcgtcgacatggacatggcagactactctgccgccctcgaccccgcctacacaaccctcgagttcgaaaacgtacaagtcttaaccatgggaaacgacacctcaccatcagaaggtacaaacctcaacgcccctaactcactcggcgtatctgcactatgcgcaatatgcggagaccgtgccactggcaaacactacggagcctcatcatgtgacggctgcaaaggcttcttccgacgtgcagtccgcaaaaaccatatgtactcctgccgattctcccgacaatgcgtcgtagacaaagacaaacgaaaccaatgccggtactgccgcctaaagaaatgcttccgcgccgggatgaagaaagaagccgtacaaaacgaacgagatcgcatctccacacgccgagccgcctacgaagactccgccctcccctccatcaacgccctactccaggccgaagtactgtcgcgccaaatcgccgcgccagtttccggaataaacggcgacatccgcgccaagaaaatcgcctcaatcgcagacgtatgcgaatccatgaaagaacaactcctcgtcctcgtagaatgggccaaatacatccccgcattctgcgaactacccctagatgaccaagtagcactattacgcgctcacgccggagaacacctcctcctcggagccactaaacgctccatggtcttcaaagacgtcctcctcctcggcaacgactacatcgtaccccgccactgccccgaactcgcagaaatgtcaagggtctccataagaatcctagacgagctagtcctaccgttccaagaactccaaatcgacgacaatgaatacgcatacctcaaagccataatcttcttcgacccagacgccaaaggcctctcagaccccggcaaaatcaaacgactacgcgcccaggtccaagtctccctagaagactacatcaacgacagacaatacgacagccgagggagattcggcgaactcctcctactcctccccaccctccaatcaataacatggcaaatgatcgaacaaatccagttcatcaaactcttcggcatggccaaaatcgacaacctactccaagaaatgctcctctgaggactagtccctgttcccagagcccacttttttttctttttttgaaataaaatagcctgtctttcagatctaaaaaaaaaaaaaaaaaaaaaaaaaaaaaaaaaaaaaaaaaaaaaaaaaaaaaaaaaaaaaaaaaaaaaaaaaaaaaaaaaaaaaaaaaaaaaaaaaaaa

SEQ ID NO: 5010 - RNA, 1376 nt, synthetic construct
  misc_feature 1..1376: note = mRNA a-1 (A100) (opt11) from Homo sapiens__NP_000448.3__HNF4A(1-375)(S87A_K106R_K108R_K126R_K 127R_S142A_S143A_S148A_T166A_S167A_S313A_S378A_T429A_T432A_ S436A_K458R)
  source 1..1376: mol_type = other RNA
aggagagtcccgcagtcggcgtccagcggctctgcttgttcgtgtgtgtgtcgttgcaggccttattcaagcttaccatgcgcctcagcaagacactcgtagacatggacatggccgactactccgccgcacttgaccccgcctataccaccctcgaattcgaaaacgtacaagtactcacaatgggaaacgacacctccccatccgaaggtaccaacttaaacgcccccaactccttaggcgtctccgccctctgcgcaatctgcggcgaccgagctacaggtaaacactacggcgcatcaagctgtgacggctgcaaaggcttcttccgacgagccgtccgcaaaaaccacatgtactcatgcagattctcccgacaatgcgtcgtggacagagaccgacgaaaccaatgccgctactgccgcctcaaaaaatgcttccgcgccggcatgcgacgtgaagcagtccaaaacgaacgtgatcgcataagcactagacgcgccgcctacgaagactccgccctgccctccatcaacgccctactacaagccgaagtccttagcagacaaatagccgccccagtctccggaataaacggagacatacgtgccaaaaaaatagcatccatcgccgacgtatgcgaaagcatgaaagaacaactccttgtcctagtagaatgggctaaatacatccccgcattctgcgaactccccctagacgaccaagtagccctcctccgagcacacgccggcgaacacctcctactcggcgccacaaaaagaagcatggtcttcaaagacgtcctacttctaggaaacgactacatcgtccctcgccactgccccgaactcgccgagatgagtagagtctctatcagaatcctcgacgaactcgtactcccattccaagaactacaaatagacgacaacgaatacgcctacctcaaagcgatcatcttcttcgaccccgacgccaaaggcctatcagaccccggcaaaatcaaaagactccgcgcccaagtacaagtctccctagaagactacatcaacgaccgccagtacgacagccgaggccgattcggcgaactacttctactcctcccaacactacaatcaatcacctggcagatgatcgaacaaatccaattcatcaaactattcggcatggccaaaatagacaaccttctacaagaaatgctcctatgaggactagtccctgttcccagagcccacttttttttctttttttgaaataaaatagcctgtctttcagatctaaaaaaaaaaaaaaaaaaaaaaaaaaaaaaaaaaaaaaaaaaaaaaaaaaaaaaaaaaaaaaaaaaaaaaaaaaaaaaaaaaaaaaaaaaaaaaaaaaaa

SEQ ID NO: 5011 - RNA, 1376 nt, synthetic construct
  misc_feature 1..1376: note = mRNA a-1 (A100) (opt11) from Homo sapiens__NP_000448.3__HNF4A(1-375)(S87A_K106R_K108R_K126R_K 127R)
  source 1..1376: mol_type = other RNA
aggagagtcccgcagtcggcgtccagcggctctgcttgttcgtgtgtgtgtcgttgcaggccttattcaagcttaccatgcgcctctccaaaacactcgtcgacatggacatggccgactactcagcagccctagaccccgcttacaccaccctcgagttcgaaaacgtacaagtcctcaccatgggcaacgacaccagcccatctgaaggtaccaacctcaacgcaccaaactccctcggcgtttcagctctatgcgccatatgcggagaccgcgccaccggcaaacactacggagcctcctcttgcgacggctgcaaaggcttcttccgcagagccgtacgcaaaaaccacatgtacagctgtagattttcccgccaatgcgtcgtcgaccgcgaccgccgcaaccagtgcagatattgccgactcaagaaatgcttccgcgcaggaatgcgccgcgaagccgtacaaaacgaacgcgaccgcatctccacacgccgctcatcttacgaagactcctccctaccaagcatcaacgcactacttcaagcagaagtcctatcccgacaaatcacctcccccgtctcaggcataaacggcgacataagggcaaagaaaatcgcctccatagccgacgtatgcgaatcaatgaaagaacaactcctagtcctcgtcgaatgggccaaatacatccccgccttctgcgaactgcccctcgacgaccaagtagcacttctccgcgcccacgccggcgaacacctcctactcggcgccaccaaacgttccatggtcttcaaagacgtcctcctacttggtaacgactacatcgtaccccgccactgccctgaactcgcagaaatgtcccgcgtctcaataagaatcctcgacgagctagttctccccttccaagaactacaaatcgacgacaacgaatacgcctacctcaaagccatcatatttttcgaccccgacgccaaaggcctttccgaccccggcaaaataaaacgcctccgctctcaagtccaggtcagcctcgaagactacatcaacgaccgccaatacgactctcgtggccgcttcggagaactactactactcctccccacactacaatccatcacctggcaaatgatcgaacaaatccaattcatcaaactcttcggcatggccaaaattgacaacctactccaagaaatgctcctatgaggactagtccctgttcccagagcccacttttttttctttttttgaaataaaatagcctgtctttcagatctaaaaaaaaaaaaaaaaaaaaaaaaaaaaaaaaaaaaaaaaaaaaaaaaaaaaaaaaaaaaaaaaaaaaaaaaaaaaaaaaaaaaaaaaaaaaaaaaaaaa

SEQ ID NO: 5012 - RNA, 1376 nt, synthetic construct
  misc_feature 1..1376: note = mRNA a-1 (A100) (opt11) from Homo sapiens__NP_000448.3__HNF4A(1-375)(S87A_K106R_K108R_K126R_K 127R_S142A_S143A_S148A_T166A_S167A_S313A_S378A_T429A_T432A_ S436A_K458R_S461A)
  source 1..1376: mol_type = other RNA
aggagagtcccgcagtcggcgtccagcggctctgcttgttcgtgtgtgtgtcgttgcaggccttattcaagcttaccatgcgcctaagcaaaaccctagtagacatggacatggcagactactcagcagcactagaccccgcctacaccaccctcgaatttgaaaacgttcaagtcctaacaatgggcaacgacacctctcccagcgaaggcacaaacctcaacgcccccaactcactcggggtctccgccctctgcgccatatgcggtgaccgtgcaaccggcaaacactacggcgcctcatcctgcgacggctgcaaaggattcttccgacgcgccgtacgcaaaaaccacatgtactcctgcagattctcacgccaatgcgtcgtggaccgagaccgccgcaaccaatgccgttactgccgcctcaagaaatgcttccgagccggaatgcgaagagaagccgtacaaaacgaacgcgaccgcatctccacacgacgagcagcctacgaagactccgccctaccctccataaacgcactcctccaagccgaagtactctcccgacaaatagccgcaccagtctccggcataaacggagacatccgagcaaagaaaatagcctcaatcgccgacgtatgcgaatcaatgaaagaacaacttctcgtcctcgtcgaatgggccaaatatatacccgccttctgcgaactccccctagacgaccaagtggcccttcttcgcgcccacgccggcgaacacctcctactcggagccaccaaacgctccatggtcttcaaagacgtactactcctcggtaacgactacatcgtcccacgacactgccccgaactagccgaaatgtcacgcgtctccatccgcatcctagacgaactcgtactcccattccaagaactccaaatcgacgacaacgaatacgcatacctcaaagccatcatcttcttcgacccagacgccaaaggcctatccgacccaggaaaaataaaacgcttacgcgcacaagtccaagtctccctcgaagactacatcaacgaccgtcagtacgacagccgggggagattcggcgaactgctactactacttcccaccctccaatccatcacctggcaaatgatagaacaaatacaattcatcaaactattcggcatggccaaaatcgacaacctcctacaagaaatgctactctgaggactagtccctgttcccagagcccacttttttttctttttttgaaataaaatagcctgtctttcagatctaaaaaaaaaaaaaaaaaaaaaaaaaaaaaaaaaaaaaaaaaaaaaaaaaaaaaaaaaaaaaaaaaaaaaaaaaaaaaaaaaaaaaaaaaaaaaaaaaaaa

SEQ ID NO: 5013 - RNA, 1376 nt, synthetic construct
  misc_feature 1..1376: note = mRNA a-1 (A100) (opt11) from Homo sapiens__NP_000448.3__HNF4A(1-375)(S87A_K106R_K108R_K126R_K 127R_S142A_S143A_S148A_T166A_S167A_S313A_S378A_T429A_T432A_ S436A_K458R_S461E)
  source 1..1376: mol_type = other RNA
aggagagtcccgcagtcggcgtccagcggctctgcttgttcgtgtgtgtgtcgttgcaggccttattcaagcttaccatgcgcctctccaaaaccctcgtcgacatggacatggcagactacagcgccgccctcgaccccgcatacaccaccctagagttcgaaaacgtccaagtcctaacgatgggaaacgacacctcaccatccgaaggcacaaacctcaacgccccgaactccctaggagtctcagccctctgcgccatatgcggcgaccgagccacaggcaaacactacggcgcctcatcgtgcgacggatgcaaaggattcttccgacgagctgtccgcaaaaaccacatgtactcctgccgcttctcccgccaatgcgtcgttgaccgcgaccggcgcaaccaatgcagatactgccgactcaagaaatgcttccgcgcaggcatgcgacgagaagccgtccaaaacgaacgcgaccgcatctcaaccagacgcgccgcctacgaagactctgcactccccagcatcaacgccctcctgcaagccgaagtattatcccgacagatcgccgcccccgtatccggcatcaacggcgacatccgcgccaagaaaatcgcctccatcgcagatgtctgcgaaagcatgaaagaacaattactcgtactcgtcgaatgggcaaaatacatccccgcattctgcgaactccccctcgacgaccaagtcgccctattacgcgcccacgcaggagaacaccttctcttaggcgcaacgaaacgcagcatggtcttcaaagacgtcctactcctcggcaacgactacatcgtcccccgtcactgccccgaactcgccgaaatgtcccgcgtatccatccgcatcctcgacgaactcgtcctaccattccaagaactccaaatcgacgacaacgaatacgcctacctcaaagcaatcatcttcttcgaccccgacgcaaaaggactatccgaccccggcaaaatcaaacgcctccgcgcacaagtccaagtctccctcgaagactacataaacgacagacaatacgacagccgaggcagattcggagaacttctcctcctcctccccacactacaatccatcacatggcaaatgatcgaacaaatacaattcatcaaactcttcggcatggcaaaaatcgacaacctgctccaagaaatgctactttgaggactagtccctgttcccagagcccacttttttttctttttttgaaataaaatagcctgtctttcagatctaaaaaaaaaaaaaaaaaaaaaaaaaaaaaaaaaaaaaaaaaaaaaaaaaaaaaaaaaaaaaaaaaaaaaaaaaaaaaaaaaaaaaaaaaaaaaaaaaaaa

SEQ ID NO: 5014 - RNA, 1376 nt, synthetic construct
  misc_feature 1..1376: note = mRNA a-1 (A100) (opt11) from Homo sapiens__NP_000448.3__HNF4A(1-375)(S87A_K106R_K108R_K126R_K 127R_S142A_S143A_S148E_T166A_S167E_S313A_S378E_T429E_T432E_ S436E_K458R_S461E)
  source 1..1376: mol_type = other RNA
aggagagtcccgcagtcggcgtccagcggctctgcttgttcgtgtgtgtgtcgttgcaggccttattcaagcttaccatgcgactaagcaagaccctagtagacatggacatggccgactactccgccgccctggatcccgcctacaccacactagaatttgaaaacgtacaagtcctcaccatgggcaacgacacaagccccagcgaagggaccaacctcaacgcgccaaacagcctaggcgtctcagccctatgtgccatctgcggagacagagccaccggcaaacactacggagcctcatcctgcgacggatgcaaaggcttcttccgacgcgccgtccgcaaaaaccacatgtactcctgccgtttctcccgacaatgcgtcgtagaccgcgaccgccgcaaccaatgccgctattgccgcctaaagaaatgcttccgcgccggcatgcgacgcgaagccgtccagaacgagcgcgaccgaatctccacacgtcgcgctgcctacgaagactctgaactcccctcgataaacgcactgctccaagccgaagttctatcacgccaaatagccgaacccgtcagcggcatcaacggcgacatccgcgccaagaaaatcgcatcaatcgcagatgtatgcgaatccatgaaagaacagctcctcgtcctcgtagaatgggctaaatacatccccgccttctgtgagctccccctcgacgaccaggtagccctgctaagagcccatgccggcgaacacctcctccttggcgccactaaacgatcaatggtattcaaagacgtcctcctactaggaaacgactacatagtccccagacactgccccgaacttgcagaaatgagccgagtctccatccgcatcttagacgaactcgtcctcccattccaagaactccagatcgacgacaacgaatacgcataccttaaagcaataatcttcttcgaccccgacgccaaaggactatcagaccccgggaaaattaaaagactccgagcacaagtccaagtctcactcgaagactacatcaacgatcgccaatacgactcacgcggacgatttggcgaactcctcctgttactccccaccctacaaagcatcacctggcaaatgatcgaacaaatccagttcataaaactcttcggaatggccaaaatcgacaacctgctccaagaaatgctcctctgaggactagtccctgttcccagagcccacttttttttctttttttgaaataaaatagcctgtctttcagatctaaaaaaaaaaaaaaaaaaaaaaaaaaaaaaaaaaaaaaaaaaaaaaaaaaaaaaaaaaaaaaaaaaaaaaaaaaaaaaaaaaaaaaaaaaaaaaaaaaaa

SEQ ID NO: 5015 - RNA, 1376 nt, synthetic construct
  misc_feature 1..1376: note = mRNA a-1 (A100) (opt11) from Homo sapiens__NP_000448.3__HNF4A(1-375)(S87A_K106R_K108R_K126R_K 127R_S142A_S143A_S148A_T166A_S167A_K179R_K180R_S313A_S378A_ T429A_T432A_S436A_K458R_S461E)
  source 1..1376: mol_type = other RNA
aggagagtcccgcagtcggcgtccagcggctctgcttgttcgtgtgtgtgtcgttgcaggccttattcaagcttaccatgcggctctccaaaactctcgtcgacatggacatggcagactacagcgccgccctcgacccagcctacacaaccctcgaattcgaaaacgttcaagtcctcaccatgggtaacgacacatccccctcagaaggaaccaacctcaacgcacccaactccctcggagtttccgccctatgcgcaatctgcggcgatcgagccaccggcaaacactacggcgcctcgtcttgcgacggctgcaaaggcttcttccgccgcgccgtcagaaaaaaccacatgtactcatgccggttctccagacaatgcgtcgtcgaccgagaccgccgaaaccaatgcaggtactgccgcctgaaaaaatgcttccgcgcaggcatgcgccgcgaagccgtccaaaacgagcgagaccgaatctcaacgcgacgcgccgcctacgaagactcagccctcccatccatcaacgcactactacaagccgaagtactatcccgacaaatagccgcaccagtctcaggaatcaacggagacatacgcgccagacgaatagcctccattgccgacgtatgcgaaagcatgaaagaacaactactcgttctcgtcgagtgggccaaatacattcccgctttctgcgaattacccctagacgaccaagtcgccctcctcagagcccacgcaggcgaacacctcctactcggagccaccaaacgatccatggtcttcaaagacgtcttactcctcggcaacgactacatcgtccccagacactgtcccgaactcgccgaaatgtcccgcgtctccatccgaatcctcgacgaactcgtactccccttccaggaactccaaatcgacgacaacgaatacgcctacctaaaagccatcatttttttcgaccctgatgccaaaggcctctctgaccccggcaaaatcaaacgactacgcgcccaagtccaagtctcactcgaagactacatcaacgatcgccagtacgactcccgaggccgcttcggtgaactcctcctcctcctgcccaccctacaatcaataacttggcaaatgatcgaacaaatacaattcatcaaactcttcggcatggccaaaattgacaacctcctacaagaaatgcttctctgaggactagtccctgttcccagagcccacttttttttctttttttgaaataaaatagcctgtctttcagatctaaaaaaaaaaaaaaaaaaaaaaaaaaaaaaaaaaaaaaaaaaaaaaaaaaaaaaaaaaaaaaaaaaaaaaaaaaaaaaaaaaaaaaaaaaaaaaaaaaaa

SEQ ID NO: 5016 - RNA, 1376 nt, synthetic construct
  misc_feature 1..1376: note = mRNA a-1 (A100) (opt11) from Homo sapiens__NP_000448.3__HNF4A(1-375)(S87A_K106R_K108R_K126R_K 127R_S142A_S143A_S148A_T166A_S167A_K300R_K307R_K309R_S313A_ S378A_T429A_T432A_S436A_K458R_S461E)
  source 1..1376: mol_type = other RNA
aggagagtcccgcagtcggcgtccagcggctctgcttgttcgtgtgtgtgtcgttgcaggccttattcaagcttaccatgcgcctatccaaaacactcgttgacatggacatggcagactactccgcagccctcgaccccgcctacaccaccctcgaattcgaaaacgtccaagtcctaacaatgggaaacgacacatccccatcagaagggaccaacctaaacgcccccaactccctcggcgtctccgcactctgcgcaatctgcggcgacagagccaccggaaaacactacggcgcctcctcatgcgacggatgcaaaggattcttccgaagagccgtccgaaaaaaccacatgtactcatgccgattctcgcgccaatgcgtcgtcgatcgcgacagacgcaaccaatgccgatactgcagacttaaaaaatgcttccgtgctggcatgcgacgcgaagctgtccaaaatgagcgcgaccgcatatctacccgaagagccgcctacgaagactcagcactaccctcaatcaacgccctactccaggccgaagtcctatcccgacaaatcgcagcccccgtgtccggcataaacggtgacatccgcgccaaaaaaatcgcctcaatagccgacgtctgtgaaagcatgaaagaacaactactagttctcgtcgaatgggcaaaatacatacccgcattctgcgaactcccactagacgaccaagtggccctcctccgagcccatgcaggagaacacctcctcctcggggccacaaaacgctccatggtgttcaaagacgtactactcctaggaaacgactacatcgtaccccgccactgccccgaactagctgaaatgtcacgcgtctcgatccgcatcctcgacgaactcgtcctaccattccaagaactgcaaatcgacgacaacgagtacgcgtacctaaaagcaataatattcttcgaccccgacgcccgcggcctctccgaccccggaagaatcaggcgactccgcgcccaagtccaagtaagcctcgaagactacatcaacgaccgccaatacgactcacgaggcagattcggcgaactactcctcctcctcccaacacttcaatcaatcacctggcaaatgatcgaacaaatccaattcatcaagctattcggcatggccaaaatcgacaacctcctacaagaaatgctactgtgaggactagtccctgttcccagagcccacttttttttctttttttgaaataaaatagcctgtctttcagatctaaaaaaaaaaaaaaaaaaaaaaaaaaaaaaaaaaaaaaaaaaaaaaaaaaaaaaaaaaaaaaaaaaaaaaaaaaaaaaaaaaaaaaaaaaaaaaaaaaaa

SEQ ID NO: 5017 - RNA, 1376 nt, synthetic construct
  misc_feature 1..1376: note = mRNA a-1 (A100) (opt11) from Homo sapiens__NP_000448.3__HNF4A(1-375)(S87A_K106R_K108R_K126R_K 127R_S142A_S143A_S148A_T166A_S167A_S313A_S378A_T429A_T432A_ S436A_K447R_K458R_S461E_K470R)
  source 1..1376: mol_type = other RNA
aggagagtcccgcagtcggcgtccagcggctctgcttgttcgtgtgtgtgtcgttgcaggccttattcaagcttaccatgagactatcaaaaaccctggtggacatggacatggccgactacagcgctgccctcgaccccgcctataccacactagagttcgaaaacgtccaagtcctaaccatgggcaacgacacatccccctccgaaggaacaaacctaaacgcccccaactccctcggtgtgtccgccttatgcgccatctgcggagaccgcgccacaggcaaacactacggcgcatcaagctgcgacggctgtaaaggattcttccgccgcgccgtgcgcaaaaaccacatgtactcatgccgcttctcccgccagtgcgtcgtcgaccgcgaccgccgcaaccaatgccgatactgccgcctcaagaaatgcttccgagccggcatgcgacgagaagcagtccaaaacgaacgcgatcgcatctccacaagacgcgcagcatatgaagactcggccctcccatcaatcaacgccctcctacaagccgaagtactatcccgccaaatcgccgcccccgtctccggcatcaacggcgacatacgcgctaagaaaatcgcctcaatagcagacgtctgcgaatcaatgaaagaacaactgctcgtactcgtggaatgggccaaatacatcccagcgttctgcgaactccccctcgacgaccaagtagcattactacgcgcccacgccggcgaacaccttctactaggagcaaccaaacgatccatggtcttcaaagacgtcctgctcctaggaaatgactacatcgtcccccgccattgccctgaactagcagaaatgtcgcgcgtctcaatccgaatcctcgacgaactcgttctaccattccaagaactacaaatcgacgacaacgaatacgcctaccttaaagcaataatcttcttcgacccagatgcaaaaggcctctccgaccccggcaaaatcaaacgcctacgagcacaagtccaagtctctctcgaagactacatcaacgaccgccaatacgactcacgtggccgcttcggcgaactcctcctcctcctacccacccttcaatcaatcacatggcaaatgatcgaacaaatacaattcataaaactattcggcatggccaaaatcgacaacctcctccaagaaatgctactctgaggactagtccctgttcccagagcccacttttttttctttttttgaaataaaatagcctgtctttcagatctaaaaaaaaaaaaaaaaaaaaaaaaaaaaaaaaaaaaaaaaaaaaaaaaaaaaaaaaaaaaaaaaaaaaaaaaaaaaaaaaaaaaaaaaaaaaaaaaaaaa

SEQ ID NO: 5018 - RNA, 1376 nt, synthetic construct
  misc_feature 1..1376: note = mRNA a-1 (A100) (opt11) from Homo sapiens__NP_000448.3__HNF4A(1-375)(S87A_K106R_K108R_K126R_K 127R_S142A_S143A_S148A_T166A_S167A_K179R_K180R_K234R_K300R_ K307R_K309R_S313A_S378A_T429A_T432A_S436A_K447R_K458R_S461E _K470R)
  source 1..1376: mol_type = other RNA
aggagagtcccgcagtcggcgtccagcggctctgcttgttcgtgtgtgtgtcgttgcaggccttattcaagcttaccatgcgcctttccaaaaccctagtcgacatggacatggccgactactccgcagccctagacccagcgtacaccaccctcgagttcgaaaacgtccaagtactcacaatgggcaacgacacctccccctcggaaggcaccaacctcaacgcccctaactcactcggcgtttccgctctctgcgccatctgcggagaccgagcgacaggaaaacactacggagcctcctcatgcgatggctgcaaaggcttcttccgccgcgcagtacgcaaaaaccacatgtactcatgcagattctcaagacaatgcgtcgtcgaccgcgaccgacgcaaccaatgccgatactgccgcctcaagaaatgcttccgcgccggcatgcgccgagaagcagtccaaaacgaacgcgacagaataagtactcgccgagccgcatacgaagacagcgccctaccatccatcaacgcactcctccaagccgaagtcctatcacgacaaatcgcagctcccgtttccggcatcaacggcgatatccgcgcaagacgaatagcaagcattgcagacgtctgcgaatcaatgaaagaacaactcctcgtcctcgtcgaatgggccaaatacatccccgcattctgcgaactccccctcgacgaccaagtcgccctactaagagcccacgccggcgaacacctcctcctaggcgctacccgacgctccatggtattcaaagacgtcctactcctaggtaacgactacatcgtaccccgccactgccccgaactcgcagaaatgagcagagtttcaatccgcatcctagacgagctagttctccccttccaagaacttcaaatcgacgataacgaatacgcctacctaaaagccatcatcttcttcgacccagacgcccgaggcctctccgacccaggacgaataagaagactacgcgcccaagtacaagtttccctcgaagattacatcaacgacagacagtacgactccagaggccgattcggtgaactcctcctgctactccccaccctccaaagcataacatggcaaatgatcgaacaaatccaattcatcaaactcttcggcatggccaaaatcgacaacctcctacaagaaatgctactgtgaggactagtccctgttcccagagcccacttttttttctttttttgaaataaaatagcctgtctttcagatctaaaaaaaaaaaaaaaaaaaaaaaaaaaaaaaaaaaaaaaaaaaaaaaaaaaaaaaaaaaaaaaaaaaaaaaaaaaaaaaaaaaaaaaaaaaaaaaaaaaa

SEQ ID NO: 5019 - RNA, 1376 nt, synthetic construct
  misc_feature 1..1376: note = mRNA a-1 (A100) (opt11) from Homo sapiens__NP_000448.3__HNF4A(1-375)(S87A_S95A_S99A_K106R_K10 8R_K126R_K127R_S142A_S143A_S148A_T166A_S167A_S313A_S378A_T4 29A_T432A_S436A_K458R_S461E)
  source 1..1376: mol_type = other RNA
aggagagtcccgcagtcggcgtccagcggctctgcttgttcgtgtgtgtgtcgttgcaggccttattcaagcttaccatgagactaagcaaaaccctcgtcgacatggacatggccgactacagcgccgccctcgaccccgcatacaccaccctcgaatttgaaaacgtacaagtcctcaccatgggtaacgatacctccccatccgaaggaaccaacctcaacgccccaaactcactaggcgtctccgccctctgcgccatctgcggcgaccgcgccaccggcaaacactacggcgcctcttcctgtgacggatgcaaaggctttttccggcgcgcagtccgcaaaaaccacatgtacgcctgccgtttcgcccgacagtgcgtagtcgaccgcgaccgtcgaaaccaatgcagatactgccgactaaagaaatgcttccgcgccggcatgcgcagagaagcagtacaaaacgaacgagaccgcatctcaacccgccgtgcggcatatgaagactcggccctaccatccatcaacgccctgctccaagccgaagtattatcccgccaaatcgcagcccccgttagtggaatcaacggcgacatccgagccaagaaaatcgcctccatagccgacgtctgcgagagcatgaaagaacaactcctcgtactcgtagaatgggcaaaatacatacccgccttctgcgaactccccctagacgaccaagtagccctactccgagcccacgccggtgaacatctactcctcggagccaccaaaagatccatggtattcaaagacgtcctcctcctaggcaacgactacatcgtcccccgccactgccccgaactcgccgaaatgtcccgcgtctcaatccgcatactggacgagctcgtactccccttccaagaactacaaatcgacgacaacgaatacgcttacctaaaagcaatcatcttcttcgacccagacgcgaaaggcctatcagatcccggcaaaatcaaacgcctacgcgcacaagtacaagtatcccttgaagactacataaacgaccgacaatacgacagccggggccgtttcggagaacttctcctcctcctacccacactccaatccattacctggcaaatgatagaacaaatccaattcatcaaactcttcggaatggccaagatcgacaacctcctccaagaaatgctactctgaggactagtccctgttcccagagcccacttttttttctttttttgaaataaaatagcctgtctttcagatctaaaaaaaaaaaaaaaaaaaaaaaaaaaaaaaaaaaaaaaaaaaaaaaaaaaaaaaaaaaaaaaaaaaaaaaaaaaaaaaaaaaaaaaaaaaaaaaaaaaa

SEQ ID NO: 5020 - RNA, 1376 nt, synthetic construct
  misc_feature 1..1376: note = mRNA a-1 (A100) (opt11) from Homo sapiens__NP_000448.3__HNF4A(1-375)(S87A_K106R_K108R_K126R_K 127R_S138A_T139A_S142A_S143A_S148A_T166A_S167A_S313A_S378A_ T429A_T432A_S436A_K458R_S461E)
  source 1..1376: mol_type = other RNA
aggagagtcccgcagtcggcgtccagcggctctgcttgttcgtgtgtgtgtcgttgcaggccttattcaagcttaccatgcgcctctccaaaaccctagtagatatggacatggcagactatagcgcagcactcgaccccgcctacactacccttgaattcgaaaacgtccaagtcctcacaatgggaaacgacacctctccttccgaaggcaccaacctcaacgccccaaactccctcggcgtctccgccttgtgcgccatctgcggcgaccgagccacaggaaaacactacggagcctcctcctgcgatggctgcaaaggcttcttccgccgcgcagtaagaaaaaaccacatgtactcatgccgcttctcccgccagtgcgtcgtagaccgcgaccgccgcaaccaatgccgctactgccgcctcaaaaaatgcttccgagccggaatgcgaagagaagccgtccaaaacgaacgcgaccgcatcgccgcccgacgggccgcatacgaggatagcgccctcccaagcatcaatgctcttctccaagccgaggtcctttcccgtcaaatcgcagcccccgtatccggaatcaacggagacatacgcgccaaaaaaatcgcaagcatcgccgacgtctgcgaaagcatgaaagaacaactcctcgtactcgtcgaatgggccaaatacataccagccttctgcgaactacccctcgacgatcaagtagccctcctacgagcccacgccggagaacacctcctacttggcgccacaaaacgaagcatggttttcaaggacgtcctcctcctcggcaacgactacatagtaccccgccactgccccgaactagcagaaatgtcccgggtatcgatccgcatactagacgaactagtcctcccctttcaagaactccaaatcgatgacaacgaatacgcttacctgaaagcaataatcttcttcgaccctgacgccaaaggcctctccgacccaggaaaaataaaacgcctccgcgcccaagtacaagtctccctagaagactacataaacgaccgacaatacgactcccgaggacgattcggcgaactactattattactacctacactacaatccatcacctggcaaatgatcgaacaaatccaattcatcaaactattcggcatggccaaaatcgacaacctactccaagaaatgctcctatgaggactagtccctgttcccagagcccacttttttttctttttttgaaataaaatagcctgtctttcagatctaaaaaaaaaaaaaaaaaaaaaaaaaaaaaaaaaaaaaaaaaaaaaaaaaaaaaaaaaaaaaaaaaaaaaaaaaaaaaaaaaaaaaaaaaaaaaaaaaaaa

SEQ ID NO: 5021 - RNA, 1376 nt, synthetic construct
  misc_feature 1..1376: note = mRNA a-1 (A100) (opt11) from Homo sapiens__NP_000448.3__HNF4A(1-375)(S87A_S95A_S99A_K106R_K10 8R_K126R_K127R_S138A_T139A_S142A_S143A_S148A_T166A_S167A_S3 13A_S378A_T429A_T432A_S436A_K458R_S461E)
  source 1..1376: mol_type = other RNA
aggagagtcccgcagtcggcgtccagcggctctgcttgttcgtgtgtgtgtcgttgcaggccttattcaagcttaccatgcgactaagcaaaaccctagtcgacatggacatggcagactatagcgccgcactcgacccagcctacacaacgctcgagttcgaaaacgttcaagtccttaccatgggcaacgacacctcccccagcgaaggcaccaacctaaacgcccctaactcactcggagtgtccgcactatgcgcaatctgcggggaccgcgccaccggcaaacactacggcgcctccagctgcgacggctgcaaaggcttcttccgccgagccgtccgcaagaaccacatgtacgcctgccgcttcgctcgccaatgcgtcgtagaccgagaccgcagaaaccaatgcagatactgcagactcaagaaatgcttccgcgccggcatgcgacgcgaagccgtacaaaacgaacgcgaccgcatcgccgctcgtcgagcagcctatgaagactcagcccttccctcaataaacgcactactccaagccgaagtcctcagccgacaaatcgccgccccagtctcaggcatcaacggcgacatccgcgccaagaaaatagcctccatcgcggacgtctgcgagtccatgaaagaacaactcctagttctggtcgaatgggctaaatacatccccgcattctgcgaactcccactcgacgaccaagtagccctactccgagcccacgcaggagaacacctactcctaggagccacaaaacgttccatggtatttaaagacgtcctcctactaggcaacgactacatcgtcccccgccactgccccgaactcgccgaaatgtcccgcgtctccatccgcatcctagacgagctcgtactcccattccaagaactccaaatagacgacaacgaatacgcctacctaaaagccatcatcttcttcgatccagacgcaaaaggcctctcagacccaggcaaaatcaaaagacttagagcccaagtccaagtatcactcgaagactacatcaacgaccgacaatacgactcccgcggaaggttcggcgaactcctcctcctcctccccacactacaatccatcacctggcaaatgatagaacaaattcaattcataaaactattcggcatggccaagatagacaacctcctccaagaaatgctcctctgaggactagtccctgttcccagagcccacttttttttctttttttgaaataaaatagcctgtctttcagatctaaaaaaaaaaaaaaaaaaaaaaaaaaaaaaaaaaaaaaaaaaaaaaaaaaaaaaaaaaaaaaaaaaaaaaaaaaaaaaaaaaaaaaaaaaaaaaaaaaaa

SEQ ID NO: 5022 - RNA, 1376 nt, synthetic construct
  misc_feature 1..1376: note = mRNA a-1 (A100) (opt28) from Homo sapiens__NP_000448.3__HNF4A(1-375)
  source 1..1376: mol_type = other RNA
aggagagtcccgcagtcggcgtccagcggctctgcttgttcgtgtgtgtgtcgttgcaggccttattcaagcttaccatgcggctgagcaagaccctggtggacatggatatggcagactactccgccgctctggatccagcatatacaactctggagttcgaaaacgtccaggtgctgaccatgggaaatgacacatctcccagtgagggcactaacctgaatgcccctaactcactgggggtgagcgctctgtgcgcaatctgcggagacagggccaccggcaaacactacggggcttcctcttgtgatggatgcaagggctttttcagacgcagcgtccggaaaaatcatatgtacagttgccgattttcaaggcagtgcgtggtggacaaggacaagagaaaccagtgccgctattgtcggctgaaaaagtgcttcagggcaggaatgaaaaaggaagccgtccagaatgagagagatcgaatttccacacggcgcagctcttacgaagacagctccctgccaagtatcaacgctctgctgcaggcagaggtgctgtcaaggcagatcactagccccgtgtctgggattaacggcgatatcagagccaagaaaattgcttccatcgcagacgtctgcgaaagcatgaaggagcagctgctggtgctggtggagtgggccaaatacatccctgcattttgcgaactgccactggacgatcaggtcgctctgctgcgggcccacgcaggagagcatctgctgctgggcgctaccaagcgaagtatggtgttcaaggacgtgctgctgctggggaatgactatattgtccccaggcactgccctgaactggccgagatgtcaagagtgtctatccgcatcctggatgaactggtgctgccattccaggagctgcagattgacgataacgaatacgcatacctgaaagctatcatctttttcgaccccgacgccaagggactgtccgatcctggcaaaattaagcggctgaggagccaggtccaggtgagtctggaggactatatcaatgacagacagtacgatagccgagggcggtttggagaactgctgctgctgctgccaacactgcagtccattacctggcagatgatcgagcagatccagttcattaaactgttcggcatggcaaagatcgacaacctgctgcaggagatgctgctgtgaggactagtccctgttcccagagcccacttttttttctttttttgaaataaaatagcctgtctttcagatctaaaaaaaaaaaaaaaaaaaaaaaaaaaaaaaaaaaaaaaaaaaaaaaaaaaaaaaaaaaaaaaaaaaaaaaaaaaaaaaaaaaaaaaaaaaaaaaaaaaa

SEQ ID NO: 5023 - RNA, 1376 nt, synthetic construct
  misc_feature 1..1376: note = mRNA a-1 (A100) (opt28) from Homo sapiens__NP_000448.3__HNF4A(1-375)(S313A)
  source 1..1376: mol_type = other RNA
aggagagtcccgcagtcggcgtccagcggctctgcttgttcgtgtgtgtgtcgttgcaggccttattcaagcttaccatgcggctgagcaagaccctggtggacatggatatggcagactactccgccgctctggatccagcatatacaactctggagttcgaaaacgtccaggtgctgaccatgggaaatgacacatctccctcagagggcactaacctgaatgcccctaacagtctgggggtgagcgctctgtgcgcaatctgcggagacagggccaccggcaaacactacggggcttcctcttgtgatggatgcaagggctttttcagacgcagcgtccggaaaaatcatatgtactcatgccgatttagtaggcagtgcgtggtggacaaggacaagagaaaccagtgccgctattgtcggctgaaaaagtgcttcagggcaggaatgaaaaaggaagccgtccagaatgagagagatcgaatttccacacggcgcagctcttacgaagacagctccctgccatcaatcaacgctctgctgcaggcagaggtgctgagtaggcagatcactagccccgtgtctgggattaacggcgatatcagagccaagaaaattgcatccatcgctgacgtctgcgaaagcatgaaggagcagctgctggtgctggtggagtgggccaaatacatccctgcattttgcgaactgccactggacgatcaggtcgctctgctgcgggcccacgcaggagagcatctgctgctgggcgctaccaagcgatcaatggtgttcaaggacgtgctgctgctggggaatgactatattgtccccaggcactgccctgaactggccgagatgagtagagtgtctatccgcatcctggatgaactggtgctgccattccaggagctgcagattgacgataacgaatacgcatacctgaaagctatcatctttttcgaccccgacgccaagggactgtccgatcctggcaaaattaagcggctgagggcacaggtccaggtgagcctggaggactatatcaatgacagacagtacgatagccgagggcggtttggagaactgctgctgctgctgccaacactgcagtccattacctggcagatgatcgagcagatccagttcattaaactgttcggcatggccaagatcgacaacctgctgcaggagatgctgctgtgaggactagtccctgttcccagagcccacttttttttctttttttgaaataaaatagcctgtctttcagatctaaaaaaaaaaaaaaaaaaaaaaaaaaaaaaaaaaaaaaaaaaaaaaaaaaaaaaaaaaaaaaaaaaaaaaaaaaaaaaaaaaaaaaaaaaaaaaaaaaaa

SEQ ID NO: 5024 - RNA, 1376 nt, synthetic construct
  misc_feature 1..1376: note = mRNA a-1 (A100) (opt28) from Homo sapiens__NP_000448.3__HNF4A(1-375)(S313E)
  source 1..1376: mol_type = other RNA
aggagagtcccgcagtcggcgtccagcggctctgcttgttcgtgtgtgtgtcgttgcaggccttattcaagcttaccatgcggctgagcaagaccctggtggacatggatatggcagactactccgccgctctggatccagcatatacaactctggagttcgaaaacgtccaggtgctgaccatgggaaatgacacatctccctcagagggcactaacctgaatgcccctaacagtctgggggtgagcgctctgtgcgcaatctgcggagacagggccaccggcaaacactacggggcttcctcttgtgatggatgcaagggctttttcagacgcagcgtccggaaaaatcatatgtactcatgccgatttagtaggcagtgcgtggtggacaaggacaagagaaaccagtgccgctattgtcggctgaaaaagtgcttcagggcaggaatgaaaaaggaagccgtccagaatgagagagatcgaatttccacacggcgcagctcttacgaagacagctccctgccatcaatcaacgctctgctgcaggcagaggtgctgagtaggcagatcactagccccgtgtctgggattaacggcgatatcagagccaagaaaattgcatccatcgctgacgtctgcgaaagcatgaaggagcagctgctggtgctggtggagtgggccaaatacatccctgcattttgcgaactgccactggacgatcaggtcgctctgctgcgggcccacgcaggagagcatctgctgctgggcgctaccaagcgatcaatggtgttcaaggacgtgctgctgctggggaatgactatattgtccccaggcactgccctgaactggccgagatgagtagagtgtctatccgcatcctggatgaactggtgctgccattccaggagctgcagattgacgataacgaatacgcatacctgaaagctatcatctttttcgaccccgacgccaagggactgtccgatcctggcaaaattaagcggctgagggagcaggtccaggtgagcctggaagactatatcaatgacagacagtacgatagccgagggcggtttggagagctgctgctgctgctgccaacactgcagtccattacctggcagatgatcgagcagatccagttcattaaactgttcggcatggcaaagatcgacaacctgctgcaggaaatgctgctgtgaggactagtccctgttcccagagcccacttttttttctttttttgaaataaaatagcctgtctttcagatctaaaaaaaaaaaaaaaaaaaaaaaaaaaaaaaaaaaaaaaaaaaaaaaaaaaaaaaaaaaaaaaaaaaaaaaaaaaaaaaaaaaaaaaaaaaaaaaaaaaa

SEQ ID NO: 5025 - RNA, 1376 nt, synthetic construct
  misc_feature 1..1376: note = mRNA a-1 (A100) (opt28) from Homo sapiens__NP_000448.3__HNF4A(1-375)(S142A_S143A)
  source 1..1376: mol_type = other RNA
aggagagtcccgcagtcggcgtccagcggctctgcttgttcgtgtgtgtgtcgttgcaggccttattcaagcttaccatgcggctgagcaagaccctggtggacatggatatggcagactactccgccgctctggatccagcatatacaactctggagttcgaaaacgtccaggtgctgaccatgggaaatgacacatctccctcagagggcactaacctgaatgcccctaacagtctgggggtgagcgctctgtgcgcaatctgcggagacagggccaccggcaaacactacggggcttcctcttgtgatggatgcaagggctttttcagacgcagcgtccggaaaaatcatatgtactcatgccgatttagtaggcagtgcgtggtggacaaggacaagagaaaccagtgccgctattgtcggctgaaaaagtgcttcagggcaggaatgaaaaaggaagccgtccagaatgagagagatcgaatttccacacggcgcgctgcatacgaagacagctctctgccaagcatcaacgccctgctgcaggcagaggtgctgtccaggcagatcacttcacccgtgagtgggattaacggcgatatcagagctaagaaaattgccagcatcgcagacgtctgcgaatctatgaaggagcagctgctggtgctggtggagtgggctaaatacatccctgccttttgcgaactgccactggacgatcaggtcgcactgctgcgggctcacgccggagagcatctgctgctgggcgcaaccaagcgatccatggtgttcaaggacgtgctgctgctggggaatgactatattgtccccaggcactgccctgaactggctgagatgagcagagtgtcaatccgcatcctggatgaactggtgctgccattccaggagctgcagattgacgataacgaatacgcctacctgaaagcaatcatctttttcgaccccgacgccaagggactgagtgatcctggcaaaattaagcggctgaggtctcaggtccaggtgtccctggaggactatatcaatgacagacagtacgatagccgagggcggtttggagaactgctgctgctgctgccaacactgcagagcattacctggcagatgatcgagcagatccagttcattaaactgttcggcatggctaagatcgacaacctgctgcaggagatgctgctgtgaggactagtccctgttcccagagcccacttttttttctttttttgaaataaaatagcctgtctttcagatctaaaaaaaaaaaaaaaaaaaaaaaaaaaaaaaaaaaaaaaaaaaaaaaaaaaaaaaaaaaaaaaaaaaaaaaaaaaaaaaaaaaaaaaaaaaaaaaaaaaa

SEQ ID NO: 5026 - RNA, 1376 nt, synthetic construct
  misc_feature 1..1376: note = mRNA a-1 (A100) (opt28) from Homo sapiens__NP_000448.3__HNF4A(1-375)(S142E_S143E)
  source 1..1376: mol_type = other RNA
aggagagtcccgcagtcggcgtccagcggctctgcttgttcgtgtgtgtgtcgttgcaggccttattcaagcttaccatgcggctgagcaagaccctggtggacatggatatggcagactactccgccgctctggatccagcatatacaactctggagttcgaaaacgtccaggtgctgaccatgggaaatgacacatctccctcagagggcactaacctgaatgcccctaacagtctgggggtgagcgctctgtgcgcaatctgcggagacagggccaccggcaaacactacggggcttcctcttgtgatggatgcaagggctttttcagacgcagcgtccggaaaaatcatatgtactcatgccgatttagtaggcagtgcgtggtggacaaggacaagagaaaccagtgccgctattgtcggctgaaaaagtgcttcagggcaggaatgaaaaaggaagccgtccagaatgagagagatcgaatttccacacggcgcgaagagtacgaagacagctctctgccaagcatcaacgctctgctgcaggcagaggtgctgtccaggcagatcacttcacccgtgagtgggattaacggcgatatcagagccaagaaaattgcaagcatcgctgacgtctgcgagtctatgaaggaacagctgctggtgctggtggagtgggccaaatacatccctgcattttgcgaactgccactggacgatcaggtcgctctgctgcgggcccacgcaggagagcatctgctgctgggcgctaccaagcgatccatggtgttcaaggacgtgctgctgctggggaatgactatattgtccccaggcactgccctgaactggccgagatgagcagagtgtcaatccgcatcctggatgaactggtgctgccattccaggagctgcagattgacgataacgaatacgcatacctgaaagctatcatctttttcgaccccgacgccaagggactgagtgatcctggcaaaattaagcggctgaggtctcaggtccaggtgtccctggaggactatatcaatgacagacagtacgatagccgagggcggtttggagagctgctgctgctgctgccaacactgcagagcattacctggcagatgatcgaacagatccagttcattaaactgttcggcatggcaaagatcgacaacctgctgcaggagatgctgctgtgaggactagtccctgttcccagagcccacttttttttctttttttgaaataaaatagcctgtctttcagatctaaaaaaaaaaaaaaaaaaaaaaaaaaaaaaaaaaaaaaaaaaaaaaaaaaaaaaaaaaaaaaaaaaaaaaaaaaaaaaaaaaaaaaaaaaaaaaaaaaaa

SEQ ID NO: 5027 - RNA, 1376 nt, synthetic construct
  misc_feature 1..1376: note = mRNA a-1 (A100) (opt28) from Homo sapiens__NP_000448.3__HNF4A(1-375)(S143A)
  source 1..1376: mol_type = other RNA
aggagagtcccgcagtcggcgtccagcggctctgcttgttcgtgtgtgtgtcgttgcaggccttattcaagcttaccatgcggctgagcaagaccctggtggacatggatatggcagactactccgccgctctggatccagcatatacaactctggagttcgaaaacgtccaggtgctgaccatgggaaatgacacatctccctcagagggcactaacctgaatgcccctaacagtctgggggtgagcgctctgtgcgcaatctgcggagacagggccaccggcaaacactacggggcttcctcttgtgatggatgcaagggctttttcagacgcagcgtccggaaaaatcatatgtactcatgccgatttagtaggcagtgcgtggtggacaaggacaagagaaaccagtgccgctattgtcggctgaaaaagtgcttcagggcaggaatgaaaaaggaagccgtccagaatgagagagatcgaatttccacacggcgcagcgcttacgaagactctagcctgccatccatcaacgcactgctgcaggccgaggtgctgtcaaggcagatcaccagtcccgtgagcgggattaacggcgatatcagagcaaagaaaattgcttctatcgccgacgtctgcgaatccatgaaggagcagctgctggtgctggtggagtgggcaaaatacatccctgctttttgcgaactgccactggacgatcaggtcgccctgctgcgggcacacgctggagagcatctgctgctgggcgccactaagcgaagcatggtgttcaaggacgtgctgctgctggggaatgactatattgtccccaggcactgccctgaactggcagagatgtcaagagtgagtatccgcatcctggatgaactggtgctgccattccaggagctgcagattgacgataacgaatacgcttacctgaaagccatcatctttttcgaccccgacgcaaagggactgtctgatcctggcaaaattaagcggctgaggtcccaggtccaggtgagcctggaggactatatcaatgacagacagtacgatagccgagggcggtttggagaactgctgctgctgctgccaacactgcagtccattacctggcagatgatcgagcagatccagttcattaaactgttcggcatggccaagatcgacaacctgctgcaggagatgctgctgtgaggactagtccctgttcccagagcccacttttttttctttttttgaaataaaatagcctgtctttcagatctaaaaaaaaaaaaaaaaaaaaaaaaaaaaaaaaaaaaaaaaaaaaaaaaaaaaaaaaaaaaaaaaaaaaaaaaaaaaaaaaaaaaaaaaaaaaaaaaaaaa

SEQ ID NO: 5028 - RNA, 1376 nt, synthetic construct
  misc_feature 1..1376: note = mRNA a-1 (A100) (opt28) from Homo sapiens__NP_000448.3__HNF4A(1-375)(T166A)
  source 1..1376: mol_type = other RNA
aggagagtcccgcagtcggcgtccagcggctctgcttgttcgtgtgtgtgtcgttgcaggccttattcaagcttaccatgcggctgagcaagaccctggtggacatggatatggcagactactccgccgctctggatccagcatatacaactctggagttcgaaaacgtccaggtgctgaccatgggaaatgacacatctccctcagagggcactaacctgaatgcccctaacagtctgggggtgagcgctctgtgcgcaatctgcggagacagggccaccggcaaacactacggggcttcctcttgtgatggatgcaagggctttttcagacgcagcgtccggaaaaatcatatgtactcatgccgatttagtaggcagtgcgtggtggacaaggacaagagaaaccagtgccgctattgtcggctgaaaaagtgcttcagggcaggaatgaaaaaggaagccgtccagaatgagagagatcgaatttccacacggcgcagctcttacgaagacagctccctgccatcaatcaacgctctgctgcaggcagaggtgctgagtaggcagatcgccagccccgtgtctgggattaacggcgatatcagagcaaagaaaattgcttccatcgccgacgtctgcgaaagcatgaaggagcagctgctggtgctggtggagtgggcaaaatacatccctgctttttgcgaactgccactggacgatcaggtcgccctgctgcgggcacacgctggagagcatctgctgctgggcgccactaagcgatcaatggtgttcaaggacgtgctgctgctggggaatgactatattgtccccaggcactgccctgaactggcagagatgagtagagtgtctatccgcatcctggatgaactggtgctgccattccaggagctgcagattgacgataacgaatacgcttacctgaaagccatcatctttttcgaccccgacgcaaagggactgtccgatcctggcaaaattaagcggctgaggagccaggtccaggtgagcctggaggactatatcaatgacagacagtacgattcccgagggcggtttggagaactgctgctgctgctgccaaccctgcagtcaattacatggcagatgatcgagcagatccagttcattaaactgttcggcatggccaagatcgacaacctgctgcaggagatgctgctgtgaggactagtccctgttcccagagcccacttttttttctttttttgaaataaaatagcctgtctttcagatctaaaaaaaaaaaaaaaaaaaaaaaaaaaaaaaaaaaaaaaaaaaaaaaaaaaaaaaaaaaaaaaaaaaaaaaaaaaaaaaaaaaaaaaaaaaaaaaaaaaa

SEQ ID NO: 5029 - RNA, 1376 nt, synthetic construct
  misc_feature 1..1376: note = mRNA a-1 (A100) (opt28) from Homo sapiens__NP_000448.3__HNF4A(1-375)(S167E)
  source 1..1376: mol_type = other RNA
aggagagtcccgcagtcggcgtccagcggctctgcttgttcgtgtgtgtgtcgttgcaggccttattcaagcttaccatgcggctgagcaagaccctggtggacatggatatggcagactactccgccgctctggatccagcatatacaactctggagttcgaaaacgtccaggtgctgaccatgggaaatgacacatctccctcagagggcactaacctgaatgcccctaacagtctgggggtgagcgctctgtgcgcaatctgcggagacagggccaccggcaaacactacggggcttcctcttgtgatggatgcaagggctttttcagacgcagcgtccggaaaaatcatatgtactcatgccgatttagtaggcagtgcgtggtggacaaggacaagagaaaccagtgccgctattgtcggctgaaaaagtgcttcagggcaggaatgaaaaaggaagccgtccagaatgagagagatcgaatttccacacggcgcagctcttacgaagacagctccctgccatcaatcaacgctctgctgcaggcagaggtgctgagtaggcagatcactgaacccgtgagcgggattaacggcgatatcagagccaagaaaattgcatctatcgctgacgtctgcgagtccatgaaggagcagctgctggtgctggtggaatgggccaaatacatccctgcattttgcgagctgccactggacgatcaggtcgctctgctgcgggcccacgcaggagaacatctgctgctgggcgctaccaagcgaagcatggtgttcaaggacgtgctgctgctggggaatgactatattgtccccaggcactgccctgagctggccgaaatgtcaagagtgagtatccgcatcctggatgagctggtgctgccattccaggaactgcagattgacgataacgagtacgcatacctgaaagctatcatctttttcgaccccgacgccaagggactgtctgatcctggcaaaattaagcggctgaggtcccaggtccaggtgagcctggaagactatatcaatgacagacagtacgatagccgagggcggtttggagagctgctgctgctgctgccaacactgcagtccattacctggcagatgatcgagcagatccagttcattaaactgttcggcatggcaaagatcgacaacctgctgcaggaaatgctgctgtgaggactagtccctgttcccagagcccacttttttttctttttttgaaataaaatagcctgtctttcagatctaaaaaaaaaaaaaaaaaaaaaaaaaaaaaaaaaaaaaaaaaaaaaaaaaaaaaaaaaaaaaaaaaaaaaaaaaaaaaaaaaaaaaaaaaaaaaaaaaaaa

SEQ ID NO: 5030 - RNA, 1376 nt, synthetic construct
  misc_feature 1..1376: note = mRNA a-1 (A100) (opt28) from Homo sapiens__NP_000448.3__HNF4A(1-375)(S167A)
  source 1..1376: mol_type = other RNA
aggagagtcccgcagtcggcgtccagcggctctgcttgttcgtgtgtgtgtcgttgcaggccttattcaagcttaccatgcggctgagcaagaccctggtggacatggatatggcagactactccgccgctctggatccagcatatacaactctggagttcgaaaacgtccaggtgctgaccatgggaaatgacacatctccctcagagggcactaacctgaatgcccctaacagtctgggggtgagcgctctgtgcgcaatctgcggagacagggccaccggcaaacactacggggcttcctcttgtgatggatgcaagggctttttcagacgcagcgtccggaaaaatcatatgtactcatgccgatttagtaggcagtgcgtggtggacaaggacaagagaaaccagtgccgctattgtcggctgaaaaagtgcttcagggcaggaatgaaaaaggaagccgtccagaatgagagagatcgaatttccacacggcgcagctcttacgaagacagctccctgccatcaatcaacgctctgctgcaggcagaggtgctgagtaggcagatcactgcccccgtgagcgggattaacggcgatatcagagcaaagaaaattgcttctatcgccgacgtctgcgaatccatgaaggagcagctgctggtgctggtggagtgggcaaaatacatccctgctttttgcgaactgccactggacgatcaggtcgccctgctgcgggcacacgctggagagcatctgctgctgggcgccaccaagcgaagcatggtgttcaaggacgtgctgctgctggggaatgactatattgtccccaggcactgccctgaactggcagagatgtcaagagtgagtatccgcatcctggatgaactggtgctgccattccaggagctgcagattgacgataacgaatacgcttacctgaaagccatcatctttttcgaccccgacgcaaagggactgtctgatcctggcaaaattaagcggctgaggtcccaggtccaggtgagcctggaggactatatcaatgacagacagtacgatagccgagggcggtttggagaactgctgctgctgctgccaacactgcagtccattacctggcagatgatcgagcagatccagttcattaaactgttcggcatggccaagatcgacaacctgctgcaggagatgctgctgtgaggactagtccctgttcccagagcccacttttttttctttttttgaaataaaatagcctgtctttcagatctaaaaaaaaaaaaaaaaaaaaaaaaaaaaaaaaaaaaaaaaaaaaaaaaaaaaaaaaaaaaaaaaaaaaaaaaaaaaaaaaaaaaaaaaaaaaaaaaaaaa

SEQ ID NO: 5031 - RNA, 1376 nt, synthetic construct; identical to SEQ ID NO: 5030
  misc_feature 1..1376: note = mRNA a-1 (A100) (opt28) from Homo sapiens__NP_000448.3__HNF4A(1-375)(S167A_S378A_T429A_T432A_ S436A)
  source 1..1376: mol_type = other RNA

SEQ ID NO: 5032 - RNA, 1376 nt, synthetic construct; identical to SEQ ID NO: 5029
  misc_feature 1..1376: note = mRNA a-1 (A100) (opt28) from Homo sapiens__NP_000448.3__HNF4A(1-375)(S167E_S378E_T429E_T432E_ S436E)
  source 1..1376: mol_type = other RNA

SEQ ID NO: 5033 - RNA, 1376 nt, synthetic construct
  misc_feature 1..1376: note = mRNA a-1 (A100) (opt28) from Homo sapiens__NP_000448.3__HNF4A(1-375)(S87A)
  source 1..1376: mol_type = other RNA
aggagagtcccgcagtcggcgtccagcggctctgcttgttcgtgtgtgtgtcgttgcaggccttattcaagcttaccatgcggctgagcaagaccctggtggacatggatatggcagactactccgccgctctggatccagcatatacaactctggagttcgaaaacgtccaggtgctgaccatgggaaatgacacatctccctcagagggcactaacctgaatgcccctaacagtctgggggtgagcgctctgtgcgcaatctgcggagacagggccaccggcaaacactacggggcttcctcttgtgatggatgcaagggctttttcagacgcgcagtccggaaaaatcatatgtacagctgccgattttcaaggcagtgcgtggtggacaaggacaagagaaaccagtgccgctattgtcggctgaaaaagtgcttcagggccggaatgaaaaaggaagctgtccagaatgagagagatcgaattagtacacggcgctccagctacgaagactctagcctgccatccatcaacgcactgctgcaggccgaggtgctgtcaaggcagatcaccagtcccgtgagcgggattaacggcgatatcagagcaaagaaaattgcttctatcgccgacgtctgcgaatccatgaaggagcagctgctggtgctggtggagtgggcaaaatacatccctgctttttgcgaactgccactggacgatcaggtcgccctgctgcgggcacacgctggagagcatctgctgctgggcgccactaagcgaagcatggtgttcaaggacgtgctgctgctggggaatgactatattgtccccaggcactgccctgaactggcagagatgtcaagagtgagtatccgcatcctggatgaactggtgctgccattccaggagctgcagattgacgataacgaatacgcttacctgaaagccatcatctttttcgaccccgacgcaaagggactgtctgatcctggcaaaattaagcggctgaggtcccaggtccaggtgagcctggaggactatatcaatgacagacagtacgatagccgagggcggtttggagaactgctgctgctgctgccaacactgcagtccattacctggcagatgatcgagcagatccagttcattaaactgttcggcatggccaagatcgacaacctgctgcaggagatgctgctgtgaggactagtccctgttcccagagcccacttttttttctttttttgaaataaaatagcctgtctttcagatctaaaaaaaaaaaaaaaaaaaaaaaaaaaaaaaaaaaaaaaaaaaaaaaaaaaaaaaaaaaaaaaaaaaaaaaaaaaaaaaaaaaaaaaaaaaaaaaaaaaa

SEQ ID NO: 5034 - RNA, 1376 nt, synthetic construct
  misc_feature 1..1376: note = mRNA a-1 (A100) (opt28) from Homo sapiens__NP_000448.3__HNF4A(1-375)(S87E)
  source 1..1376: mol_type = other RNA
aggagagtcccgcagtcggcgtccagcggctctgcttgttcgtgtgtgtgtcgttgcaggccttattcaagcttaccatgcggctgagcaagaccctggtggacatggatatggcagactactccgccgctctggatccagcatatacaactctggagttcgaaaacgtccaggtgctgaccatgggaaatgacacatctccctcagagggcactaacctgaatgcccctaacagtctgggggtgagcgctctgtgcgcaatctgcggagacagggccaccggcaaacactacggggcttcctcttgtgatggatgcaagggctttttcagacgcgaagtccggaaaaatcatatgtacagctgccgattttcaaggcagtgcgtggtggacaaggacaagagaaaccagtgccgctattgtcggctgaaaaagtgcttcagggcaggaatgaaaaaggaggccgtccagaatgaaagagatcgaattagtacacggcgctccagctacgaggactctagcctgccatccatcaacgctctgctgcaggcagaagtgctgtcaaggcagatcaccagtcccgtgagcgggattaacggcgatatcagagccaagaaaattgcatctatcgctgacgtctgcgagtccatgaaggagcagctgctggtgctggtggaatgggccaaatacatccctgcattttgcgagctgccactggacgatcaggtcgctctgctgcgggcccacgcaggagaacatctgctgctgggcgctactaagcgaagcatggtgttcaaggacgtgctgctgctggggaatgactatattgtccccaggcactgccctgagctggccgaaatgtcaagagtgagtatccgcatcctggatgagctggtgctgccattccaggaactgcagattgacgataacgagtacgcatacctgaaagctatcatctttttcgaccccgacgccaagggactgtctgatcctggcaaaattaagcggctgaggtcccaggtccaggtgagcctggaagactatatcaatgacagacagtacgatagccgagggcggtttggagagctgctgctgctgctgccaacactgcagtccattacctggcagatgatcgagcagatccagttcattaaactgttcggcatggcaaagatcgacaacctgctgcaggaaatgctgctgtgaggactagtccctgttcccagagcccacttttttttctttttttgaaataaaatagcctgtctttcagatctaaaaaaaaaaaaaaaaaaaaaaaaaaaaaaaaaaaaaaaaaaaaaaaaaaaaaaaaaaaaaaaaaaaaaaaaaaaaaaaaaaaaaaaaaaaaaaaaaaaa

SEQ ID NO: 5035 - RNA, 1376 nt, synthetic construct
  misc_feature 1..1376: note = mRNA a-1 (A100) (opt28) from Homo sapiens__NP_000448.3__HNF4A(1-375)(R2V)
  source 1..1376: mol_type = other RNA
aggagagtcccgcagtcggcgtccagcggctctgcttgttcgtgtgtgtgtcgttgcaggccttattcaagcttaccatggtgctgagcaagaccctggtcgacatggatatggcagactactccgccgctctggatccagcatatacaactctggagttcgaaaacgtccaggtgctgaccatgggaaatgacacatctccctcagagggcactaacctgaatgcccctaacagtctgggggtgagcgctctgtgcgcaatctgcggagaccgggccaccggcaaacactacggggcttcctcttgtgatggatgcaagggctttttcaggagaagcgtgcgcaaaaatcatatgtactcatgccgatttagtcggcagtgcgtggtcgacaaggacaagaggaaccagtgcagatattgtcgcctgaaaaagtgcttccgggcaggaatgaaaaaggaagccgtgcagaatgagagggatagaatttccacacgacggagctcttacgaagacagctccctgccatcaatcaacgctctgctgcaggcagaggtgctgagtcgccagatcactagccccgtctctgggattaacggcgatatcagggccaagaaaattgcatccatcgctgacgtgtgcgaaagcatgaaggagcagctgctggtgctggtcgagtgggccaaatacatccctgcattttgcgaactgccactggacgatcaggtggctctgctgagagcccacgcaggagagcatctgctgctgggcgctaccaagcggtcaatggtgttcaaggacgtcctgctgctggggaatgactatattgtgccccgacactgccctgaactggccgagatgagtagggtgtctatcagaatcctggatgaactggtcctgccattccaggagctgcagattgacgataacgaatacgcatacctgaaagctatcatctttttcgaccccgacgccaagggactgtccgatcctggcaaaattaagcgcctgcggagccaggtccaggtgagcctggaggactatatcaatgacaggcagtacgattccagagggcgatttggagaactgctgctgctgctgccaacactgcagtcaattacctggcagatgatcgagcagatccagttcattaaactgttcggcatggcaaagatcgacaacctgctgcaggagatgctgctgtgaggactagtccctgttcccagagcccacttttttttctttttttgaaataaaatagcctgtctttcagatctaaaaaaaaaaaaaaaaaaaaaaaaaaaaaaaaaaaaaaaaaaaaaaaaaaaaaaaaaaaaaaaaaaaaaaaaaaaaaaaaaaaaaaaaaaaaaaaaaaaa

SEQ ID NO: 5036 - RNA, 1376 nt, synthetic construct
  misc_feature 1..1376: note = mRNA a-1 (A100) (opt28) from Homo sapiens__NP_000448.3__HNF4A(1-375)(R2V_K5V)
  source 1..1376: mol_type = other RNA
aggagagtcccgcagtcggcgtccagcggctctgcttgttcgtgtgtgtgtcgttgcaggccttattcaagcttaccatggtgctgagcgtcaccctggtggacatggatatggcagactactccgccgctctggatccagcatatacaactctggagttcgaaaacgtgcaggtcctgaccatgggaaatgacacatctccctcagagggcactaacctgaatgcccctaacagtctgggggtgagcgctctgtgcgcaatctgcggagaccgggccaccggcaagcactacggggcttcctcttgtgatggatgcaaaggctttttcaggagaagcgtgcgcaagaatcatatgtactcatgccgatttagtcggcagtgcgtcgtggacaaagacaagaggaaccagtgcagatattgtcgcctgaagaaatgcttccgggcaggaatgaagaaagaagccgtgcagaatgagagggatagaatttccacacgacggagctcttacgaagacagctccctgccatcaatcaacgctctgctgcaggcagaggtcctgagtcgccagatcactagccccgtgtctgggattaacggcgatatcagggccaagaagattgcatccatcgctgacgtgtgcgaaagcatgaaagagcagctgctggtcctggtggagtgggccaagtacatccctgcattttgcgaactgccactggacgatcaggtggctctgctgagagcccacgcaggagagcatctgctgctgggcgctaccaaacggtcaatggtcttcaaggacgtgctgctgctggggaatgactatattgtgccccgacactgccctgaactggccgagatgagtagggtctctatcagaatcctggatgaactggtgctgccattccaggagctgcagattgacgataacgaatacgcatacctgaaggctatcatctttttcgaccccgacgccaaaggactgtccgatcctggcaagattaaacgcctgcggagccaggtgcaggtcagcctggaggactatatcaatgacaggcagtacgattccagagggcgatttggagaactgctgctgctgctgccaacactgcagtcaattacctggcagatgatcgagcagatccagttcattaagctgttcggcatggcaaaaatcgacaacctgctgcaggagatgctgctgtgaggactagtccctgttcccagagcccacttttttttctttttttgaaataaaatagcctgtctttcagatctaaaaaaaaaaaaaaaaaaaaaaaaaaaaaaaaaaaaaaaaaaaaaaaaaaaaaaaaaaaaaaaaaaaaaaaaaaaaaaaaaaaaaaaaaaaaaaaaaaaa

SEQ ID NO: 5037 - RNA, 1376 nt, synthetic construct
  misc_feature 1..1376: note = mRNA a-1 (A100) (opt28) from Homo sapiens__NP_000448.3__HNF4A(1-375)(K179R_K180R)
  source 1..1376: mol_type = other RNA
aggagagtcccgcagtcggcgtccagcggctctgcttgttcgtgtgtgtgtcgttgcaggccttattcaagcttaccatgcggctgagcaagaccctggtggacatggatatggcagactactccgccgctctggatccagcatatacaactctggagttcgaaaacgtccaggtgctgaccatgggaaatgacacatctccctcagagggcactaacctgaatgcccctaacagtctgggggtgagcgctctgtgcgcaatctgcggagacagggccaccggcaaacactacggggcttcctcttgtgatggatgcaagggctttttcagacgcagcgtccggaaaaatcatatgtactcatgccgatttagtaggcagtgcgtggtggacaaggacaagagaaaccagtgccgctattgtcggctgaaaaagtgcttcagggcaggaatgaaaaaggaagccgtccagaatgagagagatcgaatttccacacggcgcagctcttacgaagacagctccctgccatcaatcaacgctctgctgcaggcagaggtgctgagtaggcagatcactagccccgtgtctgggattaacggcgatatcagagcccggcgaattgcatccatcgctgacgtctgcgaaagcatgaaggagcagctgctggtgctggtggagtgggccaaatacatccctgcattttgcgaactgccactggacgatcaggtcgctctgctgagggcccacgcaggagagcatctgctgctgggcgctaccaagagatcaatggtgttcaaagacgtgctgctgctggggaatgactatattgtcccccgccactgccctgaactggccgagatgagtcgggtgtctatcaggatcctggatgaactggtgctgccattccaggagctgcagattgacgataacgaatacgcatacctgaaggctatcatctttttcgaccccgacgccaagggactgtccgatcctggcaaaattaagagactgcgaagccaggtccaggtgagcctggaggactatatcaatgaccggcagtacgattcccgcgggaggtttggagaactgctgctgctgctgccaacactgcagtcaattacctggcagatgatcgagcagatccagttcattaaactgttcggcatggcaaagatcgacaacctgctgcaggagatgctgctgtgaggactagtccctgttcccagagcccacttttttttctttttttgaaataaaatagcctgtctttcagatctaaaaaaaaaaaaaaaaaaaaaaaaaaaaaaaaaaaaaaaaaaaaaaaaaaaaaaaaaaaaaaaaaaaaaaaaaaaaaaaaaaaaaaaaaaaaaaaaaaaa

SEQ ID NO: 5038 - RNA, 1376 nt, synthetic construct
  misc_feature 1..1376: note = mRNA a-1 (A100) (opt28) from Homo sapiens__NP_000448.3__HNF4A(1-375)(K234R)
  source 1..1376: mol_type = other RNA
aggagagtcccgcagtcggcgtccagcggctctgcttgttcgtgtgtgtgtcgttgcaggccttattcaagcttaccatgcggctgagcaagaccctggtggacatggatatggcagactactccgccgctctggatccagcatatacaactctggagttcgaaaacgtccaggtgctgaccatgggaaatgacacatctccctcagagggcactaacctgaatgcccctaacagtctgggggtgagcgctctgtgcgcaatctgcggagacagggccaccggcaaacactacggggcttcctcttgtgatggatgcaagggctttttcagacgcagcgtccggaaaaatcatatgtactcatgccgatttagtaggcagtgcgtggtggacaaggacaagagaaaccagtgccgctattgtcggctgaaaaagtgcttcagggcaggaatgaaaaaggaagccgtccagaatgagagagatcgaatttccacacggcgcagctcttacgaagacagctccctgccatcaatcaacgctctgctgcaggcagaggtgctgagtaggcagatcactagccccgtgtctgggattaacggcgatatcagagccaagaaaattgcatccatcgctgacgtctgcgaaagcatgaaggagcagctgctggtgctggtggagtgggccaaatacatccctgcattttgcgaactgccactggacgatcaggtcgctctgctgcgggcccacgcaggagagcatctgctgctgggcgctacccgaaggtcaatggtgttcaaggacgtgctgctgctggggaatgactatattgtccccagacactgccctgaactggccgagatgagtcgcgtgtctatccggatcctggatgaactggtgctgccattccaggagctgcagattgacgataacgaatacgcatacctgaaggctatcatctttttcgaccccgacgccaaaggactgtccgatcctggcaagattaaaaggctgagaagccaggtccaggtgagcctggaggactatatcaatgaccgacagtacgattcccgggggcgctttggagaactgctgctgctgctgccaacactgcagtcaattacctggcagatgatcgagcagatccagttcattaagctgttcggcatggcaaaaatcgacaacctgctgcaggagatgctgctgtgaggactagtccctgttcccagagcccacttttttttctttttttgaaataaaatagcctgtctttcagatctaaaaaaaaaaaaaaaaaaaaaaaaaaaaaaaaaaaaaaaaaaaaaaaaaaaaaaaaaaaaaaaaaaaaaaaaaaaaaaaaaaaaaaaaaaaaaaaaaaaa

SEQ ID NO: 5039 - RNA, 1376 nt, synthetic construct
  misc_feature 1..1376: note = mRNA a-1 (A100) (opt28) from Homo sapiens__NP_000448.3__HNF4A(1-375)(K300R)
  source 1..1376: mol_type = other RNA
aggagagtcccgcagtcggcgtccagcggctctgcttgttcgtgtgtgtgtcgttgcaggccttattcaagcttaccatgcggctgagcaagaccctggtggacatggatatggcagactactccgccgctctggatccagcatatacaactctggagttcgaaaacgtccaggtgctgaccatgggaaatgacacatctccctcagagggcactaacctgaatgcccctaacagtctgggggtgagcgctctgtgcgcaatctgcggagacagggccaccggcaaacactacggggcttcctcttgtgatggatgcaagggctttttcagacgcagcgtccggaaaaatcatatgtactcatgccgatttagtaggcagtgcgtggtggacaaggacaagagaaaccagtgccgctattgtcggctgaaaaagtgcttcagggcaggaatgaaaaaggaagccgtccagaatgagagagatcgaatttccacacggcgcagctcttacgaagacagctccctgccatcaatcaacgctctgctgcaggcagaggtgctgagtaggcagatcactagccccgtgtctgggattaacggcgatatcagagccaagaaaattgcatccatcgctgacgtctgcgaaagcatgaaggagcagctgctggtgctggtggagtgggccaaatacatccctgcattttgcgaactgccactggacgatcaggtcgctctgctgcgggcccacgcaggagagcatctgctgctgggcgctaccaagcgatcaatggtgttcaaggacgtgctgctgctggggaatgactatattgtccccaggcactgccctgaactggccgagatgagtagagtgtctatccgcatcctggatgaactggtgctgccattccaggagctgcagattgacgataacgaatacgcatacctgaaagctatcatctttttcgaccccgacgcccggggactgtccgatcctggcaagattaaaaggctgagaagccaggtccaggtgagcctggaggactatatcaatgaccgacagtacgattcccgggggcgctttggagaactgctgctgctgctgccaacactgcagtcaattacctggcagatgatcgagcagatccagttcattaagctgttcggcatggcaaaaatcgacaacctgctgcaggagatgctgctgtgaggactagtccctgttcccagagcccacttttttttctttttttgaaataaaatagcctgtctttcagatctaaaaaaaaaaaaaaaaaaaaaaaaaaaaaaaaaaaaaaaaaaaaaaaaaaaaaaaaaaaaaaaaaaaaaaaaaaaaaaaaaaaaaaaaaaaaaaaaaaaa

SEQ ID NO: 5040 - RNA, 1376 nt, synthetic construct
  misc_feature 1..1376: note = mRNA a-1 (A100) (opt28) from Homo sapiens__NP_000448.3__HNF4A(1-375)(K300R_K307R_K309R)
  source 1..1376: mol_type = other RNA
aggagagtcccgcagtcggcgtccagcggctctgcttgttcgtgtgtgtgtcgttgcaggccttattcaagcttaccatgcggctgagcaagaccctggtggacatggatatggcagactactccgccgctctggatccagcatatacaactctggagttcgaaaacgtccaggtgctgaccatgggaaatgacacatctccctcagagggcactaacctgaatgcccctaacagtctgggggtgagcgctctgtgcgcaatctgcggagacagggccaccggcaaacactacggggcttcctcttgtgatggatgcaagggctttttcagacgcagcgtccggaaaaatcatatgtactcatgccgatttagtaggcagtgcgtggtggacaaggacaagagaaaccagtgccgctattgtcggctgaaaaagtgcttcagggcaggaatgaaaaaggaagccgtccagaatgagagagatcgaatttccacacggcgcagctcttacgaagacagctccctgccatcaatcaacgctctgctgcaggcagaggtgctgagtaggcagatcactagccccgtgtctgggattaacggcgatatcagagccaagaaaattgcatccatcgctgacgtctgcgaaagcatgaaggagcagctgctggtgctggtggagtgggccaaatacatccctgcattttgcgaactgccactggacgatcaggtcgctctgctgcgggcccacgcaggagagcatctgctgctgggcgctaccaagcgatcaatggtgttcaaggacgtgctgctgctggggaatgactatattgtccccaggcactgccctgaactggccgagatgagtagagtgtctatccgcatcctggatgaactggtgctgccattccaggagctgcagattgacgataacgaatacgcatacctgaaagctatcatctttttcgaccccgacgcccggggactgtccgatcctggcaggattagacgactgcggagccaggtccaggtgagcctggaggactatatcaatgaccgccagtacgattccagggggagatttggagaactgctgctgctgctgccaacactgcagtcaattacctggcagatgatcgagcagatccagttcattaagctgttcggcatggcaaaaatcgacaacctgctgcaggagatgctgctgtgaggactagtccctgttcccagagcccacttttttttctttttttgaaataaaatagcctgtctttcagatctaaaaaaaaaaaaaaaaaaaaaaaaaaaaaaaaaaaaaaaaaaaaaaaaaaaaaaaaaaaaaaaaaaaaaaaaaaaaaaaaaaaaaaaaaaaaaaaaaaaa

SEQ ID NO: 5041 - RNA, 1376 nt, synthetic construct
  misc_feature 1..1376: note = mRNA a-1 (A100) (opt28) from Homo sapiens__NP_000448.3__HNF4A(1-375)(K447R_K470R)
  source 1..1376: mol_type = other RNA
aggagagtcccgcagtcggcgtccagcggctctgcttgttcgtgtgtgtgtcgttgcaggccttattcaagcttaccatgcggctgagcaagaccctggtggacatggatatggcagactactccgccgctctggatccagcatatacaactctggagttcgaaaacgtccaggtgctgaccatgggaaatgacacatctccctcagagggcactaacctgaatgcccctaacagtctgggggtgagcgctctgtgcgcaatctgcggagacagggccaccggcaaacactacggggcttcctcttgtgatggatgcaagggctttttcagacgcagcgtccggaaaaatcatatgtactcatgccgatttagtaggcagtgcgtggtggacaaggacaagagaaaccagtgccgctattgtcggctgaaaaagtgcttcagggcaggaatgaaaaaggaagccgtccagaatgagagagatcgaatttccacacggcgcagctcttacgaagacagctccctgccatcaatcaacgctctgctgcaggcagaggtgctgagtaggcagatcactagccccgtgtctgggattaacggcgatatcagagccaagaaaattgcatccatcgctgacgtctgcgaaagcatgaaggagcagctgctggtgctggtggagtgggccaaatacatccctgcattttgcgaactgccactggacgatcaggtcgctctgctgcgggcccacgcaggagagcatctgctgctgggcgctaccaagcgatcaatggtgttcaaggacgtgctgctgctggggaatgactatattgtccccaggcactgccctgaactggccgagatgagtagagtgtctatccgcatcctggatgaactggtgctgccattccaggagctgcagattgacgataacgaatacgcatacctgaaagctatcatctttttcgaccccgacgccaagggactgtccgatcctggcaaaattaagcggctgaggagccaggtccaggtgagcctggaggactatatcaatgacagacagtacgattcccgagggcggtttggagaactgctgctgctgctgccaacactgcagtcaattacctggcagatgatcgagcagatccagttcattaaactgttcggcatggcaaagatcgacaacctgctgcaggagatgctgctgtgaggactagtccctgttcccagagcccacttttttttctttttttgaaataaaatagcctgtctttcagatctaaaaaaaaaaaaaaaaaaaaaaaaaaaaaaaaaaaaaaaaaaaaaaaaaaaaaaaaaaaaaaaaaaaaaaaaaaaaaaaaaaaaaaaaaaaaaaaaaaaa

SEQ ID NO: 5042 - RNA, 1376 nt, synthetic construct; identical to SEQ ID NO: 5041
  misc_feature 1..1376: note = mRNA a-1 (A100) (opt28) from Homo sapiens__NP_000448.3__HNF4A(1-375)(K458R)
  source 1..1376: mol_type = other RNA

SEQ ID NO: 5043 - RNA, 1376 nt, synthetic construct
  misc_feature 1..1376: note = mRNA a-1 (A100) (opt28) from Homo sapiens__NP_000448.3__HNF4A(1-375)(K106R_K108R_K126R_K127R)
  source 1..1376: mol_type = other RNA
aggagagtcccgcagtcggcgtccagcggctctgcttgttcgtgtgtgtgtcgttgcaggccttattcaagcttaccatgcggctgagcaagaccctggtggacatggatatggcagactactccgccgctctggatccagcatatacaactctggagttcgaaaacgtccaggtgctgaccatgggaaatgacacatctccctcagagggcactaacctgaatgcccctaacagtctgggggtgagcgctctgtgcgcaatctgcggagacagggccaccggcaaacactacggggcttcctcttgtgatggatgcaagggctttttcagacgcagcgtccggaaaaatcatatgtactcatgccgatttagtaggcagtgcgtggtggacagagaccgccggaaccagtgcaggtattgtagactgaagaagtgcttccgagcaggaatgcggcgcgaagccgtccagaatgagagggatagaatttccacacggcgaagctcttacgaagacagctccctgccatcaatcaacgctctgctgcaggcagaggtgctgagtaggcagatcactagccccgtgtctgggattaacggcgatatcagagccaaaaagattgcatccatcgctgacgtctgcgaaagcatgaaagagcagctgctggtgctggtggagtgggccaagtacatccctgcattttgcgaactgccactggacgatcaggtcgctctgctgcgcgcccacgcaggagagcatctgctgctgggcgctaccaagcggtcaatggtgttcaaagacgtgctgctgctggggaatgactatattgtccccaggcactgccctgaactggccgagatgagtagagtgtctatccgaatcctggatgaactggtgctgccattccaggagctgcagattgacgataacgaatacgcatacctgaaggctatcatctttttcgaccccgacgccaaaggactgtccgatcctggcaagattaagcggctgcgcagccaggtccaggtgagcctggaggactatatcaatgacaggcagtacgattccagagggcggtttggagaactgctgctgctgctgccaacactgcagtcaattacctggcagatgatcgagcagatccagttcattaaactgttcggcatggcaaagatcgacaacctgctgcaggagatgctgctgtgaggactagtccctgttcccagagcccacttttttttctttttttgaaataaaatagcctgtctttcagatctaaaaaaaaaaaaaaaaaaaaaaaaaaaaaaaaaaaaaaaaaaaaaaaaaaaaaaaaaaaaaaaaaaaaaaaaaaaaaaaaaaaaaaaaaaaaaaaaaaaa

SEQ ID NO: 5044 - RNA, 1376 nt, synthetic construct
  misc_feature 1..1376: note = mRNA a-1 (A100) (opt28) from Homo sapiens__NP_000448.3__HNF4A(1-375)(E285Q)
  source 1..1376: mol_type = other RNA
aggagagtcccgcagtcggcgtccagcggctctgcttgttcgtgtgtgtgtcgttgcaggccttattcaagcttaccatgcggctgagcaagaccctggtggacatggatatggcagactactccgccgctctggatccagcatatacaactctggagttcgaaaacgtccaggtgctgaccatgggaaatgacacatctccctcagagggcactaacctgaatgcccctaacagtctgggggtgagcgctctgtgcgcaatctgcggagacagggccaccggcaaacactacggggcttcctcttgtgatggatgcaagggctttttcagacgcagcgtccggaaaaatcatatgtactcatgccgatttagtaggcagtgcgtggtggacaaggacaagagaaaccagtgccgctattgtcggctgaaaaagtgcttcagggcaggaatgaaaaaggaagccgtccagaatgagagagatcgaatttccacacggcgcagctcttacgaagacagctccctgccatcaatcaacgctctgctgcaggcagaggtgctgagtaggcagatcactagccccgtgtctgggattaacggcgatatcagagccaagaaaattgcatccatcgctgacgtctgcgaaagcatgaaggagcagctgctggtgctggtggagtgggccaaatacatccctgcattttgcgaactgccactggacgatcaggtcgctctgctgcgggcccacgcaggagagcatctgctgctgggcgctaccaagcgatcaatggtgttcaaggacgtgctgctgctggggaatgactatattgtccccaggcactgccctgaactggccgagatgagtagagtgtctatccgcatcctggatgaactggtgctgccattccaggagctgcagattgacgataaccagtacgcatacctgaaagctatcatctttttcgaccccgacgccaagggactgtccgatcctggcaaaattaagcggctgaggagccaggtccaggtgagcctggaagactatatcaatgacagacagtacgattcccgagggcggtttggagagctgctgctgctgctgccaacactgcagtcaattacctggcagatgatcgaacagatccagttcattaaactgttcggcatggcaaagatcgacaacctgctgcaggagatgctgctgtgaggactagtccctgttcccagagcccacttttttttctttttttgaaataaaatagcctgtctttcagatctaaaaaaaaaaaaaaaaaaaaaaaaaaaaaaaaaaaaaaaaaaaaaaaaaaaaaaaaaaaaaaaaaaaaaaaaaaaaaaaaaaaaaaaaaaaaaaaaaaaa

SEQ ID NO: 5045 - RNA, 1376 nt, synthetic construct
  misc_feature 1..1376: note = mRNA a-1 (A100) (opt28) from Homo sapiens__NP_000448.3__HNF4A(1-375)(T166E)
  source 1..1376: mol_type = other RNA
aggagagtcccgcagtcggcgtccagcggctctgcttgttcgtgtgtgtgtcgttgcaggccttattcaagcttaccatgcggctgagcaagaccctggtggacatggatatggcagactactccgccgctctggatccagcatatacaactctggagttcgaaaacgtccaggtgctgaccatgggaaatgacacatctccctcagagggcactaacctgaatgcccctaacagtctgggggtgagcgctctgtgcgcaatctgcggagacagggccaccggcaaacactacggggcttcctcttgtgatggatgcaagggctttttcagacgcagcgtccggaaaaatcatatgtactcatgccgatttagtaggcagtgcgtggtggacaaggacaagagaaaccagtgccgctattgtcggctgaaaaagtgcttcagggcaggaatgaaaaaggaagccgtccagaatgagagagatcgaatttccacacggcgcagctcttacgaagacagctccctgccatcaatcaacgctctgctgcaggcagaggtgctgagtaggcagatcgaaagccccgtgtctgggattaacggcgatatcagagccaagaaaattgcatccatcgctgacgtctgcgagagcatgaaggagcagctgctggtgctggtggaatgggccaaatacatccctgcattttgcgagctgccactggacgatcaggtcgctctgctgcgggcccacgcaggagaacatctgctgctgggcgctactaagcgatcaatggtgttcaaggacgtgctgctgctggggaatgactatattgtccccaggcactgccctgagctggccgaaatgagtagagtgtctatccgcatcctggatgagctggtgctgccattccaggaactgcagattgacgataacgagtacgcatacctgaaagctatcatctttttcgaccccgacgccaagggactgtccgatcctggcaaaattaagcggctgaggagccaggtccaggtgagcctggaagactatatcaatgacagacagtacgattcccgagggcggtttggagagctgctgctgctgctgccaaccctgcagtcaattacatggcagatgatcgagcagatccagttcattaaactgttcggcatggcaaagatcgacaacctgctgcaggaaatgctgctgtgaggactagtccctgttcccagagcccacttttttttctttttttgaaataaaatagcctgtctttcagatctaaaaaaaaaaaaaaaaaaaaaaaaaaaaaaaaaaaaaaaaaaaaaaaaaaaaaaaaaaaaaaaaaaaaaaaaaaaaaaaaaaaaaaaaaaaaaaaaaaaa

SEQ ID NO: 5046 - RNA, 1376 nt, synthetic construct
  misc_feature 1..1376: note = mRNA a-1 (A100) (opt28) from Homo sapiens__NP_000448.3__HNF4A(1-375)(S148A)
  source 1..1376: mol_type = other RNA
aggagagtcccgcagtcggcgtccagcggctctgcttgttcgtgtgtgtgtcgttgcaggccttattcaagcttaccatgcggctgagcaagaccctggtggacatggatatggcagactactccgccgctctggatccagcatatacaactctggagttcgaaaacgtccaggtgctgaccatgggaaatgacacatctccctcagagggcactaacctgaatgcccctaacagtctgggggtgagcgctctgtgcgcaatctgcggagacagggccaccggcaaacactacggggcttcctcttgtgatggatgcaagggctttttcagacgcagcgtccggaaaaatcatatgtactcatgccgatttagtaggcagtgcgtggtggacaaggacaagagaaaccagtgccgctattgtcggctgaaaaagtgcttcagggcaggaatgaaaaaggaagccgtccagaatgagagagatcgaatttccacacggcgcagctcttacgaagacagcgctctgccatccatcaacgcactgctgcaggccgaggtgctgtcaaggcagatcaccagtcccgtgagcgggattaacggcgatatcagagcaaagaaaattgcttctatcgccgacgtctgcgaatccatgaaggagcagctgctggtgctggtggagtgggcaaaatacatccctgctttttgcgaactgccactggacgatcaggtcgccctgctgcgggcacacgctggagagcatctgctgctgggcgccactaagcgaagcatggtgttcaaggacgtgctgctgctggggaatgactatattgtccccaggcactgccctgaactggcagagatgtcaagagtgagtatccgcatcctggatgaactggtgctgccattccaggagctgcagattgacgataacgaatacgcttacctgaaagccatcatctttttcgaccccgacgcaaagggactgtctgatcctggcaaaattaagcggctgaggtcccaggtccaggtgagcctggaggactatatcaatgacagacagtacgatagccgagggcggtttggagaactgctgctgctgctgccaacactgcagtccattacctggcagatgatcgagcagatccagttcattaaactgttcggcatggccaagatcgacaacctgctgcaggagatgctgctgtgaggactagtccctgttcccagagcccacttttttttctttttttgaaataaaatagcctgtctttcagatctaaaaaaaaaaaaaaaaaaaaaaaaaaaaaaaaaaaaaaaaaaaaaaaaaaaaaaaaaaaaaaaaaaaaaaaaaaaaaaaaaaaaaaaaaaaaaaaaaaaa

SEQ ID NO: 5047 - RNA, 1376 nt, synthetic construct
  misc_feature 1..1376: note = mRNA a-1 (A100) (opt28) from Homo sapiens__NP_000448.3__HNF4A(1-375)(S148E)
  source 1..1376: mol_type = other RNA
aggagagtcccgcagtcggcgtccagcggctctgcttgttcgtgtgtgtgtcgttgcaggccttattcaagcttaccatgcggctgagcaagaccctggtggacatggatatggcagactactccgccgctctggatccagcatatacaactctggagttcgaaaacgtccaggtgctgaccatgggaaatgacacatctccctcagagggcactaacctgaatgcccctaacagtctgggggtgagcgctctgtgcgcaatctgcggagacagggccaccggcaaacactacggggcttcctcttgtgatggatgcaagggctttttcagacgcagcgtccggaaaaatcatatgtactcatgccgatttagtaggcagtgcgtggtggacaaggacaagagaaaccagtgccgctattgtcggctgaaaaagtgcttcagggcaggaatgaaaaaggaagccgtccagaatgagagagatcgaatttccacacggcgcagctcttacgaagacagcgagctgccatccatcaacgctctgctgcaggcagaagtgctgtcaaggcagatcaccagtcccgtgagcgggattaacggcgatatcagagccaagaaaattgcatctatcgctgacgtctgcgagtccatgaaggagcagctgctggtgctggtggaatgggccaaatacatccctgcattttgcgagctgccactggacgatcaggtcgctctgctgcgggcccacgcaggagaacatctgctgctgggcgctactaagcgaagcatggtgttcaaggacgtgctgctgctggggaatgactatattgtccccaggcactgccctgagctggccgaaatgtcaagagtgagtatccgcatcctggatgagctggtgctgccattccaggaactgcagattgacgataacgagtacgcatacctgaaagctatcatctttttcgaccccgacgccaagggactgtctgatcctggcaaaattaagcggctgaggtcccaggtccaggtgagcctggaagactatatcaatgacagacagtacgatagccgagggcggtttggagagctgctgctgctgctgccaacactgcagtccattacctggcagatgatcgagcagatccagttcattaaactgttcggcatggcaaagatcgacaacctgctgcaggaaatgctgctgtgaggactagtccctgttcccagagcccacttttttttctttttttgaaataaaatagcctgtctttcagatctaaaaaaaaaaaaaaaaaaaaaaaaaaaaaaaaaaaaaaaaaaaaaaaaaaaaaaaaaaaaaaaaaaaaaaaaaaaaaaaaaaaaaaaaaaaaaaaaaaaa

SEQ ID NO: 5048 - RNA, 1376 nt, synthetic construct
  misc_feature 1..1376: note = mRNA a-1 (A100) (opt28) from Homo sapiens__NP_000448.3__HNF4A(1-375)(S183A)
  source 1..1376: mol_type = other RNA
aggagagtcccgcagtcggcgtccagcggctctgcttgttcgtgtgtgtgtcgttgcaggccttattcaagcttaccatgcggctgagcaagaccctggtggacatggatatggcagactactccgccgctctggatccagcatatacaactctggagttcgaaaacgtccaggtgctgaccatgggaaatgacacatctccctcagagggcactaacctgaatgcccctaacagtctgggggtgagcgctctgtgcgcaatctgcggagacagggccaccggcaaacactacggggcttcctcttgtgatggatgcaagggctttttcagacgcagcgtccggaaaaatcatatgtactcatgccgatttagtaggcagtgcgtggtggacaaggacaagagaaaccagtgccgctattgtcggctgaaaaagtgcttcagggcaggaatgaaaaaggaagccgtccagaatgagagagatcgaatttccacacggcgcagctcttacgaagacagctccctgccatcaatcaacgctctgctgcaggcagaggtgctgagtaggcagatcactagccccgtgtctgggattaacggcgatatcagagccaagaaaattgcagctatcgccgacgtctgcgaatccatgaaggagcagctgctggtgctggtggagtgggcaaaatacatccctgctttttgcgaactgccactggacgatcaggtcgccctgctgcgggcacacgctggagagcatctgctgctgggcgccaccaagcgaagcatggtgttcaaggacgtgctgctgctggggaatgactatattgtccccaggcactgccctgaactggcagagatgtcaagagtgagtatccgcatcctggatgaactggtgctgccattccaggagctgcagattgacgataacgaatacgcttacctgaaagccatcatctttttcgaccccgacgcaaagggactgtctgatcctggcaaaattaagcggctgaggtcccaggtccaggtgagcctggaggactatatcaatgacagacagtacgatagccgagggcggtttggagaactgctgctgctgctgccaacactgcagtccattacctggcagatgatcgagcagatccagttcattaaactgttcggcatggccaagatcgacaacctgctgcaggagatgctgctgtgaggactagtccctgttcccagagcccacttttttttctttttttgaaataaaatagcctgtctttcagatctaaaaaaaaaaaaaaaaaaaaaaaaaaaaaaaaaaaaaaaaaaaaaaaaaaaaaaaaaaaaaaaaaaaaaaaaaaaaaaaaaaaaaaaaaaaaaaaaaaaa

SEQ ID NO: 5049 - RNA, 1376 nt, synthetic construct
  misc_feature 1..1376: note = mRNA a-1 (A100) (opt28) from Homo sapiens__NP_000448.3__HNF4A(1-375)(S183E)
  source 1..1376: mol_type = other RNA
aggagagtcccgcagtcggcgtccagcggctctgcttgttcgtgtgtgtgtcgttgcaggccttattcaagcttaccatgcggctgagcaagaccctggtggacatggatatggcagactactccgccgctctggatccagcatatacaactctggagttcgaaaacgtccaggtgctgaccatgggaaatgacacatctccctcagagggcactaacctgaatgcccctaacagtctgggggtgagcgctctgtgcgcaatctgcggagacagggccaccggcaaacactacggggcttcctcttgtgatggatgcaagggctttttcagacgcagcgtccggaaaaatcatatgtactcatgccgatttagtaggcagtgcgtggtggacaaggacaagagaaaccagtgccgctattgtcggctgaaaaagtgcttcagggcaggaatgaaaaaggaagccgtccagaatgagagagatcgaatttccacacggcgcagctcttacgaagacagctccctgccatcaatcaacgctctgctgcaggcagaggtgctgagtaggcagatcactagccccgtgtctgggattaacggcgatatcagagccaagaaaattgcagaaatcgctgacgtctgcgagtccatgaaggagcagctgctggtgctggtggaatgggccaaatacatccctgcattttgcgagctgccactggacgatcaggtcgctctgctgcgggcccacgcaggagaacatctgctgctgggcgctaccaagcgaagcatggtgttcaaggacgtgctgctgctggggaatgactatattgtccccaggcactgccctgagctggccgaaatgtcaagagtgagtatccgcatcctggatgagctggtgctgccattccaggaactgcagattgacgataacgagtacgcatacctgaaagctatcatctttttcgaccccgacgccaagggactgtctgatcctggcaaaattaagcggctgaggtcccaggtccaggtgagcctggaagactatatcaatgacagacagtacgatagccgagggcggtttggagagctgctgctgctgctgccaacactgcagtccattacctggcagatgatcgagcagatccagttcattaaactgttcggcatggcaaagatcgacaacctgctgcaggaaatgctgctgtgaggactagtccctgttcccagagcccacttttttttctttttttgaaataaaatagcctgtctttcagatctaaaaaaaaaaaaaaaaaaaaaaaaaaaaaaaaaaaaaaaaaaaaaaaaaaaaaaaaaaaaaaaaaaaaaaaaaaaaaaaaaaaaaaaaaaaaaaaaaaaa

SEQ ID NO: 5050 - RNA, 1376 nt, synthetic construct; identical to SEQ ID NO: 5041
  misc_feature 1..1376: note = mRNA a-1 (A100) (opt28) from Homo sapiens__NP_000448.3__HNF4A(1-375)(S461A)
  source 1..1376: mol_type = other RNA

SEQ ID NO: 5051 - RNA, 1376 nt, synthetic construct; identical to SEQ ID NO: 5041
  misc_feature 1..1376: note = mRNA a-1 (A100) (opt28) from Homo sapiens__NP_000448.3__HNF4A(1-375)(S461E)
  source 1..1376: mol_type = other RNA

SEQ ID NO: 5052 - RNA, 1376 nt, synthetic construct
  misc_feature 1..1376: note = mRNA a-1 (A100) (opt28) from Homo sapiens__NP_000448.3__HNF4A(1-375)(S142A_S143A_S313A)
  source 1..1376: mol_type = other RNA
aggagagtcccgcagtcggcgtccagcggctctgcttgttcgtgtgtgtgtcgttgcaggccttattcaagcttaccatgcggctgagcaagaccctggtggacatggatatggcagactactccgccgctctggatccagcatatacaactctggagttcgaaaacgtccaggtgctgaccatgggaaatgacacatctccctcagagggcactaacctgaatgcccctaacagtctgggggtgagcgctctgtgcgcaatctgcggagacagggccaccggcaaacactacggggcttcctcttgtgatggatgcaagggctttttcagacgcagcgtccggaaaaatcatatgtactcatgccgatttagtaggcagtgcgtggtggacaaggacaagagaaaccagtgccgctattgtcggctgaaaaagtgcttcagggcaggaatgaaaaaggaagccgtccagaatgagagagatcgaatttccacacggcgcgctgcatacgaagacagctctctgccaagcatcaacgccctgctgcaggcagaggtgctgtccaggcagatcacttcacccgtgagtgggattaacggcgatatcagagctaagaaaattgccagcatcgcagacgtctgcgaatctatgaaggagcagctgctggtgctggtggagtgggctaaatacatccctgccttttgcgaactgccactggacgatcaggtcgcactgctgcgggctcacgccggagagcatctgctgctgggcgcaaccaagcgatccatggtgttcaaggacgtgctgctgctggggaatgactatattgtccccaggcactgccctgaactggctgagatgagcagagtgtcaatccgcatcctggatgaactggtgctgccattccaggagctgcagattgacgataacgaatacgcctacctgaaagcaatcatctttttcgaccccgacgccaagggactgagtgatcctggcaaaattaagcggctgagggctcaggtccaggtgtctctggaggactatatcaatgacagacagtacgattcccgagggcggtttggagaactgctgctgctgctgccaacactgcagagcattacctggcagatgatcgagcagatccagttcattaaactgttcggcatggcaaagatcgacaacctgctgcaggagatgctgctgtgaggactagtccctgttcccagagcccacttttttttctttttttgaaataaaatagcctgtctttcagatctaaaaaaaaaaaaaaaaaaaaaaaaaaaaaaaaaaaaaaaaaaaaaaaaaaaaaaaaaaaaaaaaaaaaaaaaaaaaaaaaaaaaaaaaaaaaaaaaaaaa

SEQ ID NO: 5053 - RNA, 1376 nt, synthetic construct; identical to SEQ ID NO: 5052
  misc_feature 1..1376: note = mRNA a-1 (A100) (opt28) from Homo sapiens__NP_000448.3__HNF4A(1-375)(S142A_S143A_S313A_K458R)
  source 1..1376: mol_type = other RNA

SEQ ID NO: 5054 - RNA, 1376 nt, synthetic construct
  misc_feature 1..1376: note = mRNA a-1 (A100) (opt28) from Homo sapiens__NP_000448.3__HNF4A(1-375)(S142A_S143A_S167A_S313A_ S378A_T429A_T432A_S436A_K458R)
  source 1..1376: mol_type = other RNA
aggagagtcccgcagtcggcgtccagcggctctgcttgttcgtgtgtgtgtcgttgcaggccttattcaagcttaccatgcggctgagcaagaccctggtggacatggatatggcagactactccgccgctctggatccagcatatacaactctggagttcgaaaacgtccaggtgctgaccatgggaaatgacacatctccctcagagggcactaacctgaatgcccctaacagtctgggggtgagcgctctgtgcgcaatctgcggagacagggccaccggcaaacactacggggcttcctcttgtgatggatgcaagggctttttcagacgcagcgtccggaaaaatcatatgtactcatgccgatttagtaggcagtgcgtggtggacaaggacaagagaaaccagtgccgctattgtcggctgaaaaagtgcttcagggcaggaatgaaaaaggaagccgtccagaatgagagagatcgaatttccacacggcgcgctgcatacgaagacagctctctgccaagcatcaacgccctgctgcaggcagaggtgctgtccaggcagatcactgctcccgtgtcagggattaacggcgatatcagagccaagaaaattgcaagtatcgctgacgtctgcgaaagcatgaaggagcagctgctggtgctggtggagtgggccaaatacatccctgcattttgcgaactgccactggacgatcaggtcgctctgctgcgggcccacgcaggagagcatctgctgctgggcgctaccaagcgatctatggtgttcaaggacgtgctgctgctggggaatgactatattgtccccaggcactgccctgaactggccgagatgtccagagtgagcatccgcatcctggatgaactggtgctgccattccaggagctgcagattgacgataacgaatacgcatacctgaaagccatcatctttttcgaccccgacgctaagggactgtcagatcctggcaaaattaagcggctgagggcacaggtccaggtgagtctggaggactatatcaatgacagacagtacgattctcgagggcggtttggagaactgctgctgctgctgccaacactgcagtccattacctggcagatgatcgagcagatccagttcattaaactgttcggcatggccaagatcgacaacctgctgcaggagatgctgctgtgaggactagtccctgttcccagagcccacttttttttctttttttgaaataaaatagcctgtctttcagatctaaaaaaaaaaaaaaaaaaaaaaaaaaaaaaaaaaaaaaaaaaaaaaaaaaaaaaaaaaaaaaaaaaaaaaaaaaaaaaaaaaaaaaaaaaaaaaaaaaaa

SEQ ID NO: 5055 - RNA, 1376 nt, synthetic construct
  misc_feature 1..1376: note = mRNA a-1 (A100) (opt28) from Homo sapiens__NP_000448.3__HNF4A(1-375)(S142A_S143A_S148A_S167A_ S313A_S378A_T429A_T432A_S436A_K458R)
  source 1..1376: mol_type = other RNA
aggagagtcccgcagtcggcgtccagcggctctgcttgttcgtgtgtgtgtcgttgcaggccttattcaagcttaccatgcggctgagcaagaccctggtggacatggatatggcagactactccgccgctctggatccagcatatacaactctggagttcgaaaacgtccaggtgctgaccatgggaaatgacacatctccctcagagggcactaacctgaatgcccctaacagtctgggggtgagcgctctgtgcgcaatctgcggagacagggccaccggcaaacactacggggcttcctcttgtgatggatgcaagggctttttcagacgcagcgtccggaaaaatcatatgtactcatgccgatttagtaggcagtgcgtggtggacaaggacaagagaaaccagtgccgctattgtcggctgaaaaagtgcttcagggcaggaatgaaaaaggaagccgtccagaatgagagagatcgaatttccacacggcgcgctgcatacgaagacagcgccctgccatctatcaacgcactgctgcaggctgaggtgctgagcaggcagatcactgcccccgtgtccgggattaacggcgatatcagagcaaagaaaattgcttcaatcgccgacgtctgcgaaagtatgaaggagcagctgctggtgctggtggagtgggcaaaatacatccctgctttttgcgaactgccactggacgatcaggtcgccctgctgcgggcacacgctggagagcatctgctgctgggcgccaccaagcgaagcatggtgttcaaggacgtgctgctgctggggaatgactatattgtccccaggcactgccctgaactggcagagatgtctagagtgtccatccgcatcctggatgaactggtgctgccattccaggagctgcagattgacgataacgaatacgcctacctgaaagctatcatctttttcgaccccgacgcaaagggactgagcgatcctggcaaaattaagcggctgagggcccaggtccaggtgtcactggaggactatatcaatgacagacagtacgatagtcgagggcggtttggagaactgctgctgctgctgccaacactgcagtctattacctggcagatgatcgagcagatccagttcattaaactgttcggcatggcaaagatcgacaacctgctgcaggagatgctgctgtgaggactagtccctgttcccagagcccacttttttttctttttttgaaataaaatagcctgtctttcagatctaaaaaaaaaaaaaaaaaaaaaaaaaaaaaaaaaaaaaaaaaaaaaaaaaaaaaaaaaaaaaaaaaaaaaaaaaaaaaaaaaaaaaaaaaaaaaaaaaaaa

SEQ ID NO: 5056 - RNA, 1376 nt, synthetic construct
  misc_feature 1..1376: note = mRNA a-1 (A100) (opt28) from Homo sapiens__NP_000448.3__HNF4A(1-375)(K106R_K108R_K126R_K127R_ S142A_S143A_S148A_S167A_S313A_S378A_T429A_T432A_S436A_K458R )
  source 1..1376: mol_type = other RNA
aggagagtcccgcagtcggcgtccagcggctctgcttgttcgtgtgtgtgtcgttgcaggccttattcaagcttaccatgcggctgagcaagaccctggtggacatggatatggcagactactccgccgctctggatccagcatatacaactctggagttcgaaaacgtccaggtgctgaccatgggaaatgacacatctccctcagagggcactaacctgaatgcccctaacagtctgggggtgagcgctctgtgcgcaatctgcggagacagggccaccggcaaacactacggggcttcctcttgtgatggatgcaagggctttttcagacgcagcgtccggaaaaatcatatgtactcatgccgatttagtaggcagtgcgtggtggacagagaccgccggaaccagtgcaggtattgtagactgaagaagtgcttccgagcaggaatgcggcgcgaagccgtccagaatgagagggatagaatttccacacggcgagctgcatacgaagacagcgccctgccatctatcaacgcactgctgcaggctgaggtgctgagcaggcagatcactgcccccgtgtccgggattaacggcgatatcagagctaaaaagattgcatcaatcgccgacgtctgcgaaagtatgaaagagcagctgctggtgctggtggagtgggcaaagtacatccctgctttttgcgaactgccactggacgatcaggtcgccctgctgcgcgcacacgctggagagcatctgctgctgggcgccaccaagcggagcatggtgttcaaagacgtgctgctgctggggaatgactatattgtccccaggcactgccctgaactggcagagatgtctagagtgtccatccgaatcctggatgaactggtgctgccattccaggagctgcagattgacgataacgaatacgcctacctgaaggctatcatctttttcgaccccgacgcaaaaggactgagcgatcctggcaagattaagcggctgcgcgcccaggtccaggtgtcactggaggactatatcaatgacaggcagtacgatagtagagggcggtttggagaactgctgctgctgctgccaacactgcagtctattacctggcagatgatcgagcagatccagttcattaaactgttcggcatggcaaagatcgacaacctgctgcaggagatgctgctgtgaggactagtccctgttcccagagcccacttttttttctttttttgaaataaaatagcctgtctttcagatctaaaaaaaaaaaaaaaaaaaaaaaaaaaaaaaaaaaaaaaaaaaaaaaaaaaaaaaaaaaaaaaaaaaaaaaaaaaaaaaaaaaaaaaaaaaaaaaaaaaa

SEQ ID NO: 5057 - RNA, 1376 nt, synthetic construct
  misc_feature 1..1376: note = mRNA a-1 (A100) (opt28) from Homo sapiens__NP_000448.3__HNF4A(1-375)(S142A_S143A_S148A_T166A_ S167A_S313A_S378A_T429A_T432A_S436A_K458R)
  source 1..1376: mol_type = other RNA
aggagagtcccgcagtcggcgtccagcggctctgcttgttcgtgtgtgtgtcgttgcaggccttattcaagcttaccatgcggctgagcaagaccctggtggacatggatatggcagactactccgccgctctggatccagcatatacaactctggagttcgaaaacgtccaggtgctgaccatgggaaatgacacatctccctcagagggcactaacctgaatgcccctaacagtctgggggtgagcgctctgtgcgcaatctgcggagacagggccaccggcaaacactacggggcttcctcttgtgatggatgcaagggctttttcagacgcagcgtccggaaaaatcatatgtactcatgccgatttagtaggcagtgcgtggtggacaaggacaagagaaaccagtgccgctattgtcggctgaaaaagtgcttcagggcaggaatgaaaaaggaagccgtccagaatgagagagatcgaatttccacacggcgcgctgcatacgaagacagcgccctgccatctatcaacgcactgctgcaggctgaggtgctgagcaggcagatcgccgcacccgtgtccgggattaacggcgatatcagagctaagaaaattgcctcaatcgcagacgtctgcgaaagtatgaaggagcagctgctggtgctggtggagtgggctaaatacatccctgccttttgcgaactgccactggacgatcaggtcgcactgctgcgggctcacgccggagagcatctgctgctgggcgcaactaagcgaagcatggtgttcaaggacgtgctgctgctggggaatgactatattgtccccaggcactgccctgaactggccgagatgtctagagtgtccatccgcatcctggatgaactggtgctgccattccaggagctgcagattgacgataacgaatacgcttacctgaaagcaatcatctttttcgaccccgacgccaagggactgagcgatcctggcaaaattaagcggctgagggcacaggtccaggtgtcactggaggactatatcaatgacagacagtacgatagtcgagggcggtttggagaactgctgctgctgctgccaaccctgcagtctattacatggcagatgatcgagcagatccagttcattaaactgttcggcatggctaagatcgacaacctgctgcaggagatgctgctgtgaggactagtccctgttcccagagcccacttttttttctttttttgaaataaaatagcctgtctttcagatctaaaaaaaaaaaaaaaaaaaaaaaaaaaaaaaaaaaaaaaaaaaaaaaaaaaaaaaaaaaaaaaaaaaaaaaaaaaaaaaaaaaaaaaaaaaaaaaaaaaa

SEQ ID NO: 5058 - RNA, 1376 nt, synthetic construct
  misc_feature 1..1376: note = mRNA a-1 (A100) (opt28) from Homo sapiens__NP_000448.3__HNF4A(1-375)(S87A_S142A_S143A_S148A_T 166A_S167A_S313A_S378A_T429A_T432A_S436A_K458R)
  source 1..1376: mol_type = other RNA
aggagagtcccgcagtcggcgtccagcggctctgcttgttcgtgtgtgtgtcgttgcaggccttattcaagcttaccatgcggctgagcaagaccctggtggacatggatatggcagactactccgccgctctggatccagcatatacaactctggagttcgaaaacgtccaggtgctgaccatgggaaatgacacatctccctcagagggcactaacctgaatgcccctaacagtctgggggtgagcgctctgtgcgcaatctgcggagacagggccaccggcaaacactacggggcttcctcttgtgatggatgcaagggctttttcagacgcgcagtccggaaaaatcatatgtacagctgccgattttcaaggcagtgcgtggtggacaaggacaagagaaaccagtgccgctattgtcggctgaaaaagtgcttcagggccggaatgaaaaaggaagctgtccagaatgagagagatcgaattagtacacggcgcgcagcctacgaagactccgcactgccaagcatcaacgctctgctgcaggccgaggtgctgtctaggcagatcgcagctcccgtgagcgggattaacggcgatatcagagccaagaaaattgcatccatcgctgacgtctgcgaatcaatgaaggagcagctgctggtgctggtggagtgggccaaatacatccctgcattttgcgaactgccactggacgatcaggtcgctctgctgcgggcccacgcaggagagcatctgctgctgggcgccactaagcgaagtatggtgttcaaggacgtgctgctgctggggaatgactatattgtccccaggcactgccctgaactggctgagatgagcagagtgtctatccgcatcctggatgaactggtgctgccattccaggagctgcagattgacgataacgaatacgcatacctgaaagccatcatctttttcgaccccgacgcaaagggactgtccgatcctggcaaaattaagcggctgagggctcaggtccaggtgagcctggaggactatatcaatgacagacagtacgattcacgagggcggtttggagaactgctgctgctgctgccaaccctgcagagtattacatggcagatgatcgagcagatccagttcattaaactgttcggcatggcaaagatcgacaacctgctgcaggagatgctgctgtgaggactagtccctgttcccagagcccacttttttttctttttttgaaataaaatagcctgtctttcagatctaaaaaaaaaaaaaaaaaaaaaaaaaaaaaaaaaaaaaaaaaaaaaaaaaaaaaaaaaaaaaaaaaaaaaaaaaaaaaaaaaaaaaaaaaaaaaaaaaaaa

SEQ ID NO: 5059 - RNA, 1376 nt, synthetic construct
  misc_feature 1..1376: note = mRNA a-1 (A100) (opt28) from Homo sapiens__NP_000448.3__HNF4A(1-375)(S87A_K106R_K108R_K126R_K 127R_S142A_S143A_S148A_T166A_S167A_S313A_S378A_T429A_T432A_ S436A_K458R)
  source 1..1376: mol_type = other RNA
aggagagtcccgcagtcggcgtccagcggctctgcttgttcgtgtgtgtgtcgttgcaggccttattcaagcttaccatgcggctgagcaagaccctggtggacatggatatggcagactactccgccgctctggatccagcatatacaactctggagttcgaaaacgtccaggtgctgaccatgggaaatgacacatctccctcagagggcactaacctgaatgcccctaacagtctgggggtgagcgctctgtgcgcaatctgcggagacagggccaccggcaaacactacggggcttcctcttgtgatggatgcaagggctttttcagacgcgcagtccggaaaaatcatatgtacagctgccgattttcaaggcagtgcgtggtggacagagaccgccggaaccagtgcaggtattgtagactgaagaagtgcttccgagccggaatgcggcgcgaagctgtccagaatgagagggatagaattagtacacggcgagcagcctacgaagactccgcactgccaagcatcaacgctctgctgcaggccgaggtgctgtctaggcagatcgcagctcccgtgagcgggattaacggcgatatcagagccaaaaagattgcatccatcgctgacgtctgcgaatcaatgaaagagcagctgctggtgctggtggagtgggccaagtacatccctgcattttgcgaactgccactggacgatcaggtcgctctgctgcgcgcccacgcaggagagcatctgctgctgggcgccactaagcggagtatggtgttcaaagacgtgctgctgctggggaatgactatattgtccccaggcactgccctgaactggctgagatgagcagagtgtctatccgaatcctggatgaactggtgctgccattccaggagctgcagattgacgataacgaatacgcatacctgaaggccatcatctttttcgaccccgacgcaaaaggactgtccgatcctggcaagattaagcggctgcgcgctcaggtccaggtgagcctggaggactatatcaatgacaggcagtacgattcaagagggcggtttggagaactgctgctgctgctgccaaccctgcagagtattacatggcagatgatcgagcagatccagttcattaaactgttcggcatggcaaagatcgacaacctgctgcaggagatgctgctgtgaggactagtccctgttcccagagcccacttttttttctttttttgaaataaaatagcctgtctttcagatctaaaaaaaaaaaaaaaaaaaaaaaaaaaaaaaaaaaaaaaaaaaaaaaaaaaaaaaaaaaaaaaaaaaaaaaaaaaaaaaaaaaaaaaaaaaaaaaaaaaa

SEQ ID NO: 5060 - RNA, 1376 nt, synthetic construct
  misc_feature 1..1376: note = mRNA a-1 (A100) (opt28) from Homo sapiens__NP_000448.3__HNF4A(1-375)(S87A_K106R_K108R_K126R_K 127R)
  source 1..1376: mol_type = other RNA
aggagagtcccgcagtcggcgtccagcggctctgcttgttcgtgtgtgtgtcgttgcaggccttattcaagcttaccatgcggctgagcaagaccctggtggacatggatatggcagactactccgccgctctggatccagcatatacaactctggagttcgaaaacgtccaggtgctgaccatgggaaatgacacatctccctcagagggcactaacctgaatgcccctaacagtctgggggtgagcgctctgtgcgcaatctgcggagacagggccaccggcaaacactacggggcttcctcttgtgatggatgcaagggctttttcagacgcgcagtccggaaaaatcatatgtacagctgccgattttcaaggcagtgcgtggtggacagagaccgccggaaccagtgcaggtattgtagactgaagaagtgcttccgagccggaatgcggcgcgaagctgtccagaatgagagggatagaattagtacacggcgatccagctacgaagactctagcctgccatccatcaacgcactgctgcaggccgaggtgctgtcaaggcagatcaccagtcccgtgagcgggattaacggcgatatcagagctaaaaagattgcatctatcgccgacgtctgcgaatccatgaaagagcagctgctggtgctggtggagtgggcaaagtacatccctgctttttgcgaactgccactggacgatcaggtcgccctgctgcgcgcacacgctggagagcatctgctgctgggcgccactaagcggagcatggtgttcaaagacgtgctgctgctggggaatgactatattgtccccaggcactgccctgaactggcagagatgtcaagagtgagtatccgaatcctggatgaactggtgctgccattccaggagctgcagattgacgataacgaatacgcttacctgaaggccatcatctttttcgaccccgacgcaaaaggactgtctgatcctggcaagattaagcggctgcgctcccaggtccaggtgagcctggaggactatatcaatgacaggcagtacgatagcagagggcggtttggagaactgctgctgctgctgccaacactgcagtccattacctggcagatgatcgagcagatccagttcattaaactgttcggcatggccaagatcgacaacctgctgcaggagatgctgctgtgaggactagtccctgttcccagagcccacttttttttctttttttgaaataaaatagcctgtctttcagatctaaaaaaaaaaaaaaaaaaaaaaaaaaaaaaaaaaaaaaaaaaaaaaaaaaaaaaaaaaaaaaaaaaaaaaaaaaaaaaaaaaaaaaaaaaaaaaaaaaaa

SEQ ID NO: 5061 - RNA, 1376 nt, synthetic construct; identical to SEQ ID NO: 5059
  misc_feature 1..1376: note = mRNA a-1 (A100) (opt28) from Homo sapiens__NP_000448.3__HNF4A(1-375)(S87A_K106R_K108R_K126R_K 127R_S142A_S143A_S148A_T166A_S167A_S313A_S378A_T429A_T432A_ S436A_K458R_S461A)
  source 1..1376: mol_type = other RNA

SEQ ID NO: 5062 - RNA, 1376 nt, synthetic construct; identical to SEQ ID NO: 5059
  misc_feature 1..1376: note = mRNA a-1 (A100) (opt28) from Homo sapiens__NP_000448.3__HNF4A(1-375)(S87A_K106R_K108R_K126R_K 127R_S142A_S143A_S148A_T166A_S167A_S313A_S378A_T429A_T432A_ S436A_K458R_S461E)
  source 1..1376: mol_type = other RNA

SEQ ID NO: 5063 - RNA, 1376 nt, synthetic construct
  misc_feature 1..1376: note = mRNA a-1 (A100) (opt28) from Homo sapiens__NP_000448.3__HNF4A(1-375)(S87A_K106R_K108R_K126R_K 127R_S142A_S143A_S148E_T166A_S167E_S313A_S378E_T429E_T432E_ S436E_K458R_S461E)
  source 1..1376: mol_type = other RNA
aggagagtcccgcagtcggcgtccagcggctctgcttgttcgtgtgtgtgtcgttgcaggccttattcaagcttaccatgcggctgagcaagaccctggtggacatggatatggcagactactccgccgctctggatccagcatatacaactctggagttcgaaaacgtccaggtgctgaccatgggaaatgacacatctccctcagagggcactaacctgaatgcccctaacagtctgggggtgagcgctctgtgcgcaatctgcggagacagggccaccggcaaacactacggggcttcctcttgtgatggatgcaagggctttttcagacgcgcagtccggaaaaatcatatgtacagctgccgattttcaaggcagtgcgtggtggacagagaccgccggaaccagtgcaggtattgtagactgaagaagtgcttccgagccggaatgcggcgcgaagctgtccagaatgagagggatagaattagtacacggcgagcagcctacgaagactccgagctgccaagcatcaacgcactgctgcaggctgaagtgctgtctaggcagatcgccgagcccgtgagcgggattaacggcgatatcagagctaaaaagattgcatccatcgccgacgtctgcgagtcaatgaaagaacagctgctggtgctggtggagtgggcaaagtacatccctgctttttgcgaactgccactggacgatcaggtcgccctgctgcgcgcacacgctggagagcatctgctgctgggcgccactaagcggagtatggtgttcaaagacgtgctgctgctggggaatgactatattgtccccaggcactgccctgaactggcagagatgagcagagtgtctatccgaatcctggatgaactggtgctgccattccaggagctgcagattgacgataacgaatacgcctacctgaaggctatcatctttttcgaccccgacgcaaaaggactgtccgatcctggcaagattaagcggctgcgcgcccaggtccaggtgagcctggaggactatatcaatgacaggcagtacgattcaagagggcggtttggagagctgctgctgctgctgccaaccctgcagagtattacatggcagatgatcgaacagatccagttcattaaactgttcggcatggcaaagatcgacaacctgctgcaggagatgctgctgtgaggactagtccctgttcccagagcccacttttttttctttttttgaaataaaatagcctgtctttcagatctaaaaaaaaaaaaaaaaaaaaaaaaaaaaaaaaaaaaaaaaaaaaaaaaaaaaaaaaaaaaaaaaaaaaaaaaaaaaaaaaaaaaaaaaaaaaaaaaaaaa

SEQ ID NO: 5064 - RNA, 1376 nt, synthetic construct
  misc_feature 1..1376: note = mRNA a-1 (A100) (opt28) from Homo sapiens__NP_000448.3__HNF4A(1-375)(S87A_K106R_K108R_K126R_K 127R_S142A_S143A_S148A_T166A_S167A_K179R_K180R_S313A_S378A_ T429A_T432A_S436A_K458R_S461E)
  source 1..1376: mol_type = other RNA
aggagagtcccgcagtcggcgtccagcggctctgcttgttcgtgtgtgtgtcgttgcaggccttattcaagcttaccatgcggctgagcaagaccctggtggacatggatatggcagactactccgccgctctggatccagcatatacaactctggagttcgaaaacgtccaggtgctgaccatgggaaatgacacatctccctcagagggcactaacctgaatgcccctaacagtctgggggtgagcgctctgtgcgcaatctgcggagacagggccaccggcaaacactacggggcttcctcttgtgatggatgcaagggctttttcagacgcgcagtccggaaaaatcatatgtacagctgccgattttcaaggcagtgcgtggtggacagagaccgccggaaccagtgcaggtattgtagactgaagaagtgcttccgagccggaatgcggcgcgaagctgtccagaatgagagggatagaattagtacacggcgagcagcctacgaagactccgcactgccaagcatcaacgctctgctgcaggccgaggtgctgtctaggcagatcgcagctcccgtgagcgggattaacggcgatatcagagcccgccggattgcatccatcgctgacgtctgcgaatcaatgaaagagcagctgctggtgctggtggagtgggccaagtacatccctgcattttgcgaactgccactggacgatcaggtcgctctgctgagggcccacgcaggagagcatctgctgctgggcgccactaaaagaagtatggtgttcaaggacgtgctgctgctggggaatgactatattgtcccccgacactgccctgaactggctgagatgagccgggtgtctatccgcatcctggatgaactggtgctgccattccaggagctgcagattgacgataacgaatacgcatacctgaaggccatcatctttttcgaccccgacgcaaaaggactgtccgatcctggcaagattaaaaggctgagagctcaggtccaggtgagcctggaggactatatcaatgaccggcagtacgattcacgcgggaggtttggagaactgctgctgctgctgccaaccctgcagagtattacatggcagatgatcgagcagatccagttcattaagctgttcggcatggcaaagatcgacaacctgctgcaggagatgctgctgtgaggactagtccctgttcccagagcccacttttttttctttttttgaaataaaatagcctgtctttcagatctaaaaaaaaaaaaaaaaaaaaaaaaaaaaaaaaaaaaaaaaaaaaaaaaaaaaaaaaaaaaaaaaaaaaaaaaaaaaaaaaaaaaaaaaaaaaaaaaaaaa

SEQ ID NO: 5065 - RNA, 1376 nt, synthetic construct
  misc_feature 1..1376: note = mRNA a-1 (A100) (opt28) from Homo sapiens__NP_000448.3__HNF4A(1-375)(S87A_K106R_K108R_K126R_K 127R_S142A_S143A_S148A_T166A_S167A_K300R_K307R_K309R_S313A_ S378A_T429A_T432A_S436A_K458R_S461E)
  source 1..1376: mol_type = other RNA
aggagagtcccgcagtcggcgtccagcggctctgcttgttcgtgtgtgtgtcgttgcaggccttattcaagcttaccatgcggctgagcaagaccctggtggacatggatatggcagactactccgccgctctggatccagcatatacaactctggagttcgaaaacgtccaggtgctgaccatgggaaatgacacatctccctcagagggcactaacctgaatgcccctaacagtctgggggtgagcgctctgtgcgcaatctgcggagacagggccaccggcaaacactacggggcttcctcttgtgatggatgcaagggctttttcagacgcgcagtccggaaaaatcatatgtacagctgccgattttcaaggcagtgcgtggtggacagagaccgccggaaccagtgcaggtattgtagactgaagaagtgcttccgagccggaatgcggcgcgaagctgtccagaatgagagggatagaattagtacacggcgagcagcctacgaagactccgcactgccaagcatcaacgctctgctgcaggccgaggtgctgtctaggcagatcgcagctcccgtgagcgggattaacggcgatatcagagccaaaaagattgcatccatcgctgacgtctgcgaatcaatgaaagagcagctgctggtgctggtggagtgggccaagtacatccctgcattttgcgaactgccactggacgatcaggtcgctctgctgcgcgcccacgcaggagagcatctgctgctgggcgccactaagcggagtatggtgttcaaagacgtgctgctgctggggaatgactatattgtccccaggcactgccctgaactggctgagatgagcagagtgtctatccgaatcctggatgaactggtgctgccattccaggagctgcagattgacgataacgaatacgcatacctgaaggccatcatctttttcgaccccgacgcacggggactgtccgatcctggccgcattaggagactgcgggctcaggtccaggtgagcctggaggactatatcaatgaccgccagtacgattcaagggggagatttggagaactgctgctgctgctgccaaccctgcagagtattacatggcagatgatcgagcagatccagttcattaaactgttcggcatggcaaagatcgacaacctgctgcaggagatgctgctgtgaggactagtccctgttcccagagcccacttttttttctttttttgaaataaaatagcctgtctttcagatctaaaaaaaaaaaaaaaaaaaaaaaaaaaaaaaaaaaaaaaaaaaaaaaaaaaaaaaaaaaaaaaaaaaaaaaaaaaaaaaaaaaaaaaaaaaaaaaaaaaa

SEQ ID NO: 5066 - RNA, 1376 nt, synthetic construct; identical to SEQ ID NO: 5059
  misc_feature 1..1376: note = mRNA a-1 (A100) (opt28) from Homo sapiens__NP_000448.3__HNF4A(1-375)(S87A_K106R_K108R_K126R_K 127R_S142A_S143A_S148A_T166A_S167A_S313A_S378A_T429A_T432A_ S436A_K447R_K458R_S461E_K470R)
  source 1..1376: mol_type = other RNA

SEQ ID NO: 5067 - RNA, 1376 nt, synthetic construct
  misc_feature 1..1376: note = mRNA a-1 (A100) (opt28) from Homo sapiens__NP_000448.3__HNF4A(1-375)(S87A_K106R_K108R_K126R_K 127R_S142A_S143A_S148A_T166A_S167A_K179R_K180R_K234R_K300R_ K307R_K309R_S313A_S378A_T429A_T432A_S436A_K447R_K458R_S461E _K470R)
  source 1..1376: mol_type = other RNA
aggagagtcccgcagtcggcgtccagcggctctgcttgttcgtgtgtgtgtcgttgcaggccttattcaagcttaccatgcggctgagcaagaccctggtggacatggatatggcagactactccgccgctctggatccagcatatacaactctggagttcgaaaacgtccaggtgctgaccatgggaaatgacacatctccctcagagggcactaacctgaatgcccctaacagtctgggggtgagcgctctgtgcgcaatctgcggagacagggccaccggcaaacactacggggcttcctcttgtgatggatgcaagggctttttcagacgcgcagtccggaaaaatcatatgtacagctgccgattttcaaggcagtgcgtggtggacagagaccgccggaaccagtgcaggtattgtagactgaagaagtgcttccgagccggaatgcggcgcgaagctgtccagaatgagagggatagaattagtacacggcgagcagcctacgaagactccgcactgccaagcatcaacgctctgctgcaggccgaggtgctgtctaggcagatcgcagctcccgtgagcgggattaacggcgatatcagagcccgccggattgcatccatcgctgacgtctgcgaatcaatgaaagagcagctgctggtgctggtggagtgggccaagtacatccctgcattttgcgaactgccactggacgatcaggtcgctctgctgagggcccacgcaggagagcatctgctgctgggcgccactagacgaagtatggtgttcaaagacgtgctgctgctggggaatgactatattgtcccccggcactgccctgaactggctgagatgagccgcgtgtctatcaggatcctggatgaactggtgctgccattccaggagctgcagattgacgataacgaatacgcatacctgaaggccatcatctttttcgaccccgacgcaagaggactgtccgatcctggccggattcgcaggctgagagctcaggtccaggtgagcctggaggactatatcaatgaccgacagtacgattcacgggggaggtttggagaactgctgctgctgctgccaaccctgcagagtattacatggcagatgatcgagcagatccagttcattaagctgttcggcatggcaaaaatcgacaacctgctgcaggagatgctgctgtgaggactagtccctgttcccagagcccacttttttttctttttttgaaataaaatagcctgtctttcagatctaaaaaaaaaaaaaaaaaaaaaaaaaaaaaaaaaaaaaaaaaaaaaaaaaaaaaaaaaaaaaaaaaaaaaaaaaaaaaaaaaaaaaaaaaaaaaaaaaaaa

SEQ ID NO: 5068 - RNA, 1376 nt, synthetic construct
  misc_feature 1..1376: note = mRNA a-1 (A100) (opt28) from Homo sapiens__NP_000448.3__HNF4A(1-375)(S87A_S95A_S99A_K106R_K10 8R_K126R_K127R_S142A_S143A_S148A_T166A_S167A_S313A_S378A_T4 29A_T432A_S436A_K458R_S461E)
  source 1..1376: mol_type = other RNA
aggagagtcccgcagtcggcgtccagcggctctgcttgttcgtgtgtgtgtcgttgcaggccttattcaagcttaccatgcggctgagcaagaccctggtggacatggatatggcagactactccgccgctctggatccagcatatacaactctggagttcgaaaacgtccaggtgctgaccatgggaaatgacacatctccctcagagggcactaacctgaatgcccctaacagtctgggggtgagcgctctgtgcgcaatctgcggagacagggccaccggcaaacactacggggcttcctcttgtgatggatgcaagggctttttcagacgcgcagtccggaaaaatcatatgtacgcctgccgatttgctaggcagtgcgtggtggacagagaccgccggaaccagtgcaggtattgtagactgaagaagtgcttccgagcaggaatgcggcgcgaagccgtccagaatgagagggatagaattagcacacggcgagcagcttacgaagactcagccctgccaagtatcaacgcactgctgcaggctgaggtgctgtccaggcagatcgccgcacccgtgagcgggattaacggcgatatcagagctaaaaagattgcctctatcgcagacgtctgcgaaagcatgaaagagcagctgctggtgctggtggagtgggctaagtacatccctgccttttgcgaactgccactggacgatcaggtcgcactgctgcgcgcccacgctggagagcatctgctgctgggcgcaactaagcggtccatggtgttcaaagacgtgctgctgctggggaatgactatattgtccccaggcactgccctgaactggccgagatgtcaagagtgagtatccgaatcctggatgaactggtgctgccattccaggagctgcagattgacgataacgaatacgcatacctgaaggctatcatctttttcgaccccgacgcaaaaggactgagcgatcctggcaagattaagcggctgcgcgcccaggtccaggtgtctctggaggactatatcaatgacaggcagtacgattccagagggcggtttggagaactgctgctgctgctgccaaccctgcagagcattacatggcagatgatcgagcagatccagttcattaaactgttcggcatggctaagatcgacaacctgctgcaggagatgctgctgtgaggactagtccctgttcccagagcccacttttttttctttttttgaaataaaatagcctgtctttcagatctaaaaaaaaaaaaaaaaaaaaaaaaaaaaaaaaaaaaaaaaaaaaaaaaaaaaaaaaaaaaaaaaaaaaaaaaaaaaaaaaaaaaaaaaaaaaaaaaaaaa

SEQ ID NO: 5069 - RNA, 1376 nt, synthetic construct
  misc_feature 1..1376: note = mRNA a-1 (A100) (opt28) from Homo sapiens__NP_000448.3__HNF4A(1-375)(S87A_K106R_K108R_K126R_K 127R_S138A_T139A_S142A_S143A_S148A_T166A_S167A_S313A_S378A_ T429A_T432A_S436A_K458R_S461E)
  source 1..1376: mol_type = other RNA
aggagagtcccgcagtcggcgtccagcggctctgcttgttcgtgtgtgtgtcgttgcaggccttattcaagcttaccatgcggctgagcaagaccctggtggacatggatatggcagactactccgccgctctggatccagcatatacaactctggagttcgaaaacgtccaggtgctgaccatgggaaatgacacatctccctcagagggcactaacctgaatgcccctaacagtctgggggtgagcgctctgtgcgcaatctgcggagacagggccaccggcaaacactacggggcttcctcttgtgatggatgcaagggctttttcagacgcgcagtccggaaaaatcatatgtacagctgccgattttcaaggcagtgcgtggtggacagagaccgccggaaccagtgcaggtattgtagactgaagaagtgcttccgagccggaatgcggcgcgaagctgtccagaatgagagggatagaattgcagcccggcgagcagcttacgaagacagtgccctgccatccatcaacgcactgctgcaggctgaggtgctgagcaggcagatcgccgcacccgtgtctgggattaacggcgatatcagagctaaaaagattgccagcatcgcagacgtctgcgaatccatgaaagagcagctgctggtgctggtggagtgggctaagtacatccctgccttttgcgaactgccactggacgatcaggtcgcactgctgcgcgcccacgctggagagcatctgctgctgggcgcaacaaagcggtcaatggtgttcaaagacgtgctgctgctggggaatgactatattgtccccaggcactgccctgaactggccgagatgagtagagtgagcatccgaatcctggatgaactggtgctgccattccaggagctgcagattgacgataacgaatacgcatacctgaaggctatcatctttttcgaccccgacgcaaaaggactgtctgatcctggcaagattaagcggctgcgcgcccaggtccaggtgtccctggaggactatatcaatgacaggcagtacgatagcagagggcggtttggagaactgctgctgctgctgccaactctgcagtcaattacctggcagatgatcgagcagatccagttcattaaactgttcggcatggctaagatcgacaacctgctgcaggagatgctgctgtgaggactagtccctgttcccagagcccacttttttttctttttttgaaataaaatagcctgtctttcagatctaaaaaaaaaaaaaaaaaaaaaaaaaaaaaaaaaaaaaaaaaaaaaaaaaaaaaaaaaaaaaaaaaaaaaaaaaaaaaaaaaaaaaaaaaaaaaaaaaaaa

SEQ ID NO: 5070 - RNA, 1376 nt, synthetic construct
  misc_feature 1..1376: note = mRNA a-1 (A100) (opt28) from Homo sapiens__NP_000448.3__HNF4A(1-375)(S87A_S95A_S99A_K106R_K10 8R_K126R_K127R_S138A_T139A_S142A_S143A_S148A_T166A_S167A_S3 13A_S378A_T429A_T432A_S436A_K458R_S461E)
  source 1..1376: mol_type = other RNA
aggagagtcccgcagtcggcgtccagcggctctgcttgttcgtgtgtgtgtcgttgcaggccttattcaagcttaccatgcggctgagcaagaccctggtggacatggatatggcagactactccgccgctctggatccagcatatacaactctggagttcgaaaacgtccaggtgctgaccatgggaaatgacacatctccctcagagggcactaacctgaatgcccctaacagtctgggggtgagcgctctgtgcgcaatctgcggagacagggccaccggcaaacactacggggcttcctcttgtgatggatgcaagggctttttcagacgcgcagtccggaaaaatcatatgtacgcctgccgatttgctaggcagtgcgtggtggacagagaccgccggaaccagtgcaggtattgtagactgaagaagtgcttccgagcaggaatgcggcgcgaagccgtccagaatgagagggatagaattgcagctcggcgagccgcatacgaagacagcgctctgccatcaatcaacgccctgctgcaggcagaggtgctgagtaggcagatcgctgcccccgtgtccgggattaacggcgatatcagagctaaaaagattgcaagcatcgccgacgtctgcgaatctatgaaagagcagctgctggtgctggtggagtgggcaaagtacatccctgccttttgcgaactgccactggacgatcaggtcgctctgctgcgcgcacacgccggagagcatctgctgctgggcgcaacaaagcggagcatggtgttcaaagacgtgctgctgctggggaatgactatattgtccccaggcactgccctgaactggctgagatgtccagagtgtcaatccgaatcctggatgaactggtgctgccattccaggagctgcagattgacgataacgaatacgcatacctgaaggccatcatctttttcgaccccgacgctaaaggactgagtgatcctggcaagattaagcggctgcgcgcacaggtccaggtgagcctggaggactatatcaatgacaggcagtacgattctagagggcggtttggagaactgctgctgctgctgccaactctgcagtccattacctggcagatgatcgagcagatccagttcattaaactgttcggcatggccaagatcgacaacctgctgcaggagatgctgctgtgaggactagtccctgttcccagagcccacttttttttctttttttgaaataaaatagcctgtctttcagatctaaaaaaaaaaaaaaaaaaaaaaaaaaaaaaaaaaaaaaaaaaaaaaaaaaaaaaaaaaaaaaaaaaaaaaaaaaaaaaaaaaaaaaaaaaaaaaaaaaaa

SEQ ID NO: 5071 - RNA, 1376 nt, synthetic construct
  misc_feature 1..1376: note = mRNA a-1 (A100) (opt29) from Homo sapiens__NP_000448.3__HNF4A(1-375)
  source 1..1376: mol_type = other RNA
aggagagtcccgcagtcggcgtccagcggctctgcttgttcgtgtgtgtgtcgttgcaggccttattcaagcttaccatgagactgagcaagaccctggtggacatggacatggccgactactctgccgccctggaccctgcctacaccaccctggagttcgaaaacgtgcaagtgctgaccatgggcaacgacaccagccctagcgagggcaccaacctgaacgcccctaatagcctgggagtgtccgccctgtgtgccatctgtggcgatagagccaccggcaagcactacggcgccagctcttgtgatggctgcaagggcttcttccggcggagcgtgcggaagaaccacatgtacagctgccggttcagccggcagtgcgtggtggacaaggataagcggaaccagtgccggtactgcagactgaagaagtgcttcagagccggcatgaagaaagaagccgtgcagaacgagcgggaccggatcagcaccagaagaagcagctacgaggacagcagcctgcccagcatcaacgccctgctgcaggccgaggtgctgagcagacagatcaccagcccagtgtccggcatcaacggcgacatccgggccaagaagatcgccagcattgccgacgtgtgcgagagcatgaaggaacagctgctggtgctggtggaatgggccaagtacatccccgccttttgcgagctgcccctggacgatcaggtggccctgctgagagcacacgccggcgaacatctgctgctgggagccaccaagcggagcatggtgttcaaggacgtgctgctgctgggcaacgactacatcgtgcccagacactgccctgagctggccgagatgagccgggtgtccatcagaatcctggacgaactggtgctgccgtttcaggaactgcagatcgacgacaacgagtacgcctacctgaaggccatcatctttttcgaccccgacgccaagggcctgagcgaccctggcaagatcaagcggctgagaagccaggtgcaagtgtccctggaagattacatcaacgaccggcagtacgacagccggggcagatttggcgaactgctcctgctgctgcccaccctgcagagcatcacctggcagatgatcgagcagatccagttcatcaagctgttcggcatggccaagatcgacaatctgctgcaggaaatgctgctctgaggactagtccctgttcccagagcccacttttttttctttttttgaaataaaatagcctgtctttcagatctaaaaaaaaaaaaaaaaaaaaaaaaaaaaaaaaaaaaaaaaaaaaaaaaaaaaaaaaaaaaaaaaaaaaaaaaaaaaaaaaaaaaaaaaaaaaaaaaaaaa

SEQ ID NO: 5072 - RNA, 1376 nt, synthetic construct
  misc_feature 1..1376: note = mRNA a-1 (A100) (opt29) from Homo sapiens__NP_000448.3__HNF4A(1-375)(S313A)
  source 1..1376: mol_type = other RNA
aggagagtcccgcagtcggcgtccagcggctctgcttgttcgtgtgtgtgtcgttgcaggccttattcaagcttaccatgagactgagcaagaccctggtggacatggacatggccgactactctgccgccctggaccctgcctacaccaccctggagttcgaaaacgtgcaagtgctgaccatgggcaacgacaccagccctagcgagggcaccaacctgaacgcccctaatagcctgggagtgtccgccctgtgtgccatctgtggcgatagagccaccggcaagcactacggcgccagctcttgtgatggctgcaagggcttcttccggcggagcgtgcggaagaaccacatgtacagctgccggttcagccggcagtgcgtggtggacaaggataagcggaaccagtgccggtactgcagactgaagaagtgcttcagagccggcatgaagaaagaagccgtgcagaacgagcgggaccggatcagcaccagaagaagcagctacgaggacagcagcctgcccagcatcaacgccctgctgcaggccgaggtgctgagcagacagatcaccagcccagtgtccggcatcaacggcgacatccgggccaagaagatcgccagcattgccgacgtgtgcgagagcatgaaggaacagctgctggtgctggtggaatgggccaagtacatccccgccttttgcgagctgcccctggacgatcaggtggccctgctgagagcacacgccggcgaacatctgctgctgggagccaccaagcggagcatggtgttcaaggacgtgctgctgctgggcaacgactacatcgtgcccagacactgccctgagctggccgagatgagccgggtgtccatcagaatcctggacgaactggtgctgccgtttcaggaactgcagatcgacgacaacgagtacgcctacctgaaggccatcatctttttcgaccccgacgccaagggcctgagcgaccctggcaagatcaagcggctgagagcccaggtgcaagtgtccctggaagattacatcaacgaccggcagtacgacagccggggcagatttggcgaactgctcctgctgctgcccaccctgcagagcatcacctggcagatgatcgagcagatccagttcatcaagctgttcggcatggccaagatcgacaatctgctgcaggaaatgctgctctgaggactagtccctgttcccagagcccacttttttttctttttttgaaataaaatagcctgtctttcagatctaaaaaaaaaaaaaaaaaaaaaaaaaaaaaaaaaaaaaaaaaaaaaaaaaaaaaaaaaaaaaaaaaaaaaaaaaaaaaaaaaaaaaaaaaaaaaaaaaaaa

SEQ ID NO: 5073 - RNA, 1376 nt, synthetic construct
  misc_feature 1..1376: note = mRNA a-1 (A100) (opt29) from Homo sapiens__NP_000448.3__HNF4A(1-375)(S313E)
  source 1..1376: mol_type = other RNA
aggagagtcccgcagtcggcgtccagcggctctgcttgttcgtgtgtgtgtcgttgcaggccttattcaagcttaccatgagactgagcaagaccctggtggacatggacatggccgactactctgccgccctggaccctgcctacaccaccctggagttcgaaaacgtgcaagtgctgaccatgggcaacgacaccagccctagcgagggcaccaacctgaacgcccctaatagcctgggagtgtccgccctgtgtgccatctgtggcgatagagccaccggcaagcactacggcgccagctcttgtgatggctgcaagggcttcttccggcggagcgtgcggaagaaccacatgtacagctgccggttcagccggcagtgcgtggtggacaaggataagcggaaccagtgccggtactgcagactgaagaagtgcttcagagccggcatgaagaaagaagccgtgcagaacgagcgggaccggatcagcaccagaagaagcagctacgaggacagcagcctgcccagcatcaacgccctgctgcaggccgaggtgctgagcagacagatcaccagcccagtgtccggcatcaacggcgacatccgggccaagaagatcgccagcattgccgacgtgtgcgagagcatgaaggaacagctgctggtgctggtggaatgggccaagtacatccccgccttttgcgagctgcccctggacgatcaggtggccctgctgagagcacacgccggcgaacatctgctgctgggagccaccaagcggagcatggtgttcaaggacgtgctgctgctgggcaacgactacatcgtgcccagacactgccctgagctggccgagatgagccgggtgtccatcagaatcctggacgaactggtgctgccgtttcaggaactgcagatcgacgacaacgagtacgcctacctgaaggccatcatctttttcgaccccgacgccaagggcctgagcgaccctggcaagatcaagcggctgagagaacaggtgcaagtgtccctggaagattacatcaacgaccggcagtacgacagccggggcagatttggcgaactgctcctgctgctgcccaccctgcagagcatcacctggcagatgatcgagcagatccagttcatcaagctgttcggcatggccaagatcgacaatctgctgcaggaaatgctgctctgaggactagtccctgttcccagagcccacttttttttctttttttgaaataaaatagcctgtctttcagatctaaaaaaaaaaaaaaaaaaaaaaaaaaaaaaaaaaaaaaaaaaaaaaaaaaaaaaaaaaaaaaaaaaaaaaaaaaaaaaaaaaaaaaaaaaaaaaaaaaaa

SEQ ID NO: 5074 - RNA, 1376 nt, synthetic construct
  misc_feature 1..1376: note = mRNA a-1 (A100) (opt29) from Homo sapiens__NP_000448.3__HNF4A(1-375)(S142A_S143A)
  source 1..1376: mol_type = other RNA
aggagagtcccgcagtcggcgtccagcggctctgcttgttcgtgtgtgtgtcgttgcaggccttattcaagcttaccatgagactgagcaagaccctggtggacatggacatggccgactactctgccgccctggaccctgcctacaccaccctggagttcgaaaacgtgcaagtgctgaccatgggcaacgacaccagccctagcgagggcaccaacctgaacgcccctaatagcctgggagtgtccgccctgtgtgccatctgtggcgatagagccaccggcaagcactacggcgccagctcttgtgatggctgcaagggcttcttccggcggagcgtgcggaagaaccacatgtacagctgccggttcagccggcagtgcgtggtggacaaggataagcggaaccagtgccggtactgcagactgaagaagtgcttcagagccggcatgaagaaagaagccgtgcagaacgagcgggaccggatcagcaccagaagagccgcctacgaggacagcagcctgcccagcatcaacgccctgctgcaggccgaggtgctgagcagacagatcaccagcccagtgtccggcatcaacggcgacatccgggccaagaagatcgccagcattgccgacgtgtgcgagagcatgaaggaacagctgctggtgctggtggaatgggccaagtacatccccgccttttgcgagctgcccctggacgatcaggtggccctgctgagagcacacgccggcgaacatctgctgctgggagccaccaagcggagcatggtgttcaaggacgtgctgctgctgggcaacgactacatcgtgcccagacactgccctgagctggccgagatgagccgggtgtccatcagaatcctggacgaactggtgctgccgtttcaggaactgcagatcgacgacaacgagtacgcctacctgaaggccatcatctttttcgaccccgacgccaagggcctgagcgaccctggcaagatcaagcggctgagaagccaggtgcaagtgtccctggaagattacatcaacgaccggcagtacgacagccggggcagatttggcgaactgctcctgctgctgcccaccctgcagagcatcacctggcagatgatcgagcagatccagttcatcaagctgttcggcatggccaagatcgacaatctgctgcaggaaatgctgctctgaggactagtccctgttcccagagcccacttttttttctttttttgaaataaaatagcctgtctttcagatctaaaaaaaaaaaaaaaaaaaaaaaaaaaaaaaaaaaaaaaaaaaaaaaaaaaaaaaaaaaaaaaaaaaaaaaaaaaaaaaaaaaaaaaaaaaaaaaaaaaa

SEQ ID NO: 5075 - RNA, 1376 nt, synthetic construct
  misc_feature 1..1376: note = mRNA a-1 (A100) (opt29) from Homo sapiens__NP_000448.3__HNF4A(1-375)(S142E_S143E)
  source 1..1376: mol_type = other RNA
aggagagtcccgcagtcggcgtccagcggctctgcttgttcgtgtgtgtgtcgttgcaggccttattcaagcttaccatgagactgagcaagaccctggtggacatggacatggccgactactctgccgccctggaccctgcctacaccaccctggagttcgaaaacgtgcaagtgctgaccatgggcaacgacaccagccctagcgagggcaccaacctgaacgcccctaatagcctgggagtgtccgccctgtgtgccatctgtggcgatagagccaccggcaagcactacggcgccagctcttgtgatggctgcaagggcttcttccggcggagcgtgcggaagaaccacatgtacagctgccggttcagccggcagtgcgtggtggacaaggataagcggaaccagtgccggtactgcagactgaagaagtgcttcagagccggcatgaagaaagaagccgtgcagaacgagcgggaccggatcagcaccagaagagaagagtacgaggacagcagcctgcccagcatcaacgccctgctgcaggccgaggtgctgagcagacagatcaccagcccagtgtccggcatcaacggcgacatccgggccaagaagatcgccagcattgccgacgtgtgcgagagcatgaaggaacagctgctggtgctggtggaatgggccaagtacatccccgccttttgcgagctgcccctggacgatcaggtggccctgctgagagcacacgccggcgaacatctgctgctgggagccaccaagcggagcatggtgttcaaggacgtgctgctgctgggcaacgactacatcgtgcccagacactgccctgagctggccgagatgagccgggtgtccatcagaatcctggacgaactggtgctgccgtttcaggaactgcagatcgacgacaacgagtacgcctacctgaaggccatcatctttttcgaccccgacgccaagggcctgagcgaccctggcaagatcaagcggctgagaagccaggtgcaagtgtccctggaagattacatcaacgaccggcagtacgacagccggggcagatttggcgaactgctcctgctgctgcccaccctgcagagcatcacctggcagatgatcgagcagatccagttcatcaagctgttcggcatggccaagatcgacaatctgctgcaggaaatgctgctctgaggactagtccctgttcccagagcccacttttttttctttttttgaaataaaatagcctgtctttcagatctaaaaaaaaaaaaaaaaaaaaaaaaaaaaaaaaaaaaaaaaaaaaaaaaaaaaaaaaaaaaaaaaaaaaaaaaaaaaaaaaaaaaaaaaaaaaaaaaaaaa

SEQ ID NO: 5076 - RNA, 1376 nt, synthetic construct
  misc_feature 1..1376: note = mRNA a-1 (A100) (opt29) from Homo sapiens__NP_000448.3__HNF4A(1-375)(S143A)
  source 1..1376: mol_type = other RNA
aggagagtcccgcagtcggcgtccagcggctctgcttgttcgtgtgtgtgtcgttgcaggccttattcaagcttaccatgagactgagcaagaccctggtggacatggacatggccgactactctgccgccctggaccctgcctacaccaccctggagttcgaaaacgtgcaagtgctgaccatgggcaacgacaccagccctagcgagggcaccaacctgaacgcccctaatagcctgggagtgtccgccctgtgtgccatctgtggcgatagagccaccggcaagcactacggcgccagctcttgtgatggctgcaagggcttcttccggcggagcgtgcggaagaaccacatgtacagctgccggttcagccggcagtgcgtggtggacaaggataagcggaaccagtgccggtactgcagactgaagaagtgcttcagagccggcatgaagaaagaagccgtgcagaacgagcgggaccggatcagcaccagaagaagcgcctacgaggacagcagcctgcccagcatcaacgccctgctgcaggccgaggtgctgagcagacagatcaccagcccagtgtccggcatcaacggcgacatccgggccaagaagatcgccagcattgccgacgtgtgcgagagcatgaaggaacagctgctggtgctggtggaatgggccaagtacatccccgccttttgcgagctgcccctggacgatcaggtggccctgctgagagcacacgccggcgaacatctgctgctgggagccaccaagcggagcatggtgttcaaggacgtgctgctgctgggcaacgactacatcgtgcccagacactgccctgagctggccgagatgagccgggtgtccatcagaatcctggacgaactggtgctgccgtttcaggaactgcagatcgacgacaacgagtacgcctacctgaaggccatcatctttttcgaccccgacgccaagggcctgagcgaccctggcaagatcaagcggctgagaagccaggtgcaagtgtccctggaagattacatcaacgaccggcagtacgacagccggggcagatttggcgaactgctcctgctgctgcccaccctgcagagcatcacctggcagatgatcgagcagatccagttcatcaagctgttcggcatggccaagatcgacaatctgctgcaggaaatgctgctctgaggactagtccctgttcccagagcccacttttttttctttttttgaaataaaatagcctgtctttcagatctaaaaaaaaaaaaaaaaaaaaaaaaaaaaaaaaaaaaaaaaaaaaaaaaaaaaaaaaaaaaaaaaaaaaaaaaaaaaaaaaaaaaaaaaaaaaaaaaaaaa

SEQ ID NO: 5077 - RNA, 1376 nt, synthetic construct
  misc_feature 1..1376: note = mRNA a-1 (A100) (opt29) from Homo sapiens__NP_000448.3__HNF4A(1-375)(T166A)
  source 1..1376: mol_type = other RNA
aggagagtcccgcagtcggcgtccagcggctctgcttgttcgtgtgtgtgtcgttgcaggccttattcaagcttaccatgagactgagcaagaccctggtggacatggacatggccgactactctgccgccctggaccctgcctacaccaccctggagttcgaaaacgtgcaagtgctgaccatgggcaacgacaccagccctagcgagggcaccaacctgaacgcccctaatagcctgggagtgtccgccctgtgtgccatctgtggcgatagagccaccggcaagcactacggcgccagctcttgtgatggctgcaagggcttcttccggcggagcgtgcggaagaaccacatgtacagctgccggttcagccggcagtgcgtggtggacaaggataagcggaaccagtgccggtactgcagactgaagaagtgcttcagagccggcatgaagaaagaagccgtgcagaacgagcgggaccggatcagcaccagaagaagcagctacgaggacagcagcctgcccagcatcaacgccctgctgcaggccgaggtgctgagcagacagatcgccagcccagtgtccggcatcaacggcgacatccgggccaagaagatcgccagcattgccgacgtgtgcgagagcatgaaggaacagctgctggtgctggtggaatgggccaagtacatccccgccttttgcgagctgcccctggacgatcaggtggccctgctgagagcacacgccggcgaacatctgctgctgggagccaccaagcggagcatggtgttcaaggacgtgctgctgctgggcaacgactacatcgtgcccagacactgccctgagctggccgagatgagccgggtgtccatcagaatcctggacgaactggtgctgccgtttcaggaactgcagatcgacgacaacgagtacgcctacctgaaggccatcatctttttcgaccccgacgccaagggcctgagcgaccctggcaagatcaagcggctgagaagccaggtgcaagtgtccctggaagattacatcaacgaccggcagtacgacagccggggcagatttggcgaactgctcctgctgctgcccaccctgcagagcatcacctggcagatgatcgagcagatccagttcatcaagctgttcggcatggccaagatcgacaatctgctgcaggaaatgctgctctgaggactagtccctgttcccagagcccacttttttttctttttttgaaataaaatagcctgtctttcagatctaaaaaaaaaaaaaaaaaaaaaaaaaaaaaaaaaaaaaaaaaaaaaaaaaaaaaaaaaaaaaaaaaaaaaaaaaaaaaaaaaaaaaaaaaaaaaaaaaaaa

SEQ ID NO: 5078 - RNA, 1376 nt, synthetic construct
  misc_feature 1..1376: note = mRNA a-1 (A100) (opt29) from Homo sapiens__NP_000448.3__HNF4A(1-375)(S167E)
  source 1..1376: mol_type = other RNA
aggagagtcccgcagtcggcgtccagcggctctgcttgttcgtgtgtgtgtcgttgcaggccttattcaagcttaccatgagactgagcaagaccctggtggacatggacatggccgactactctgccgccctggaccctgcctacaccaccctggagttcgaaaacgtgcaagtgctgaccatgggcaacgacaccagccctagcgagggcaccaacctgaacgcccctaatagcctgggagtgtccgccctgtgtgccatctgtggcgatagagccaccggcaagcactacggcgccagctcttgtgatggctgcaagggcttcttccggcggagcgtgcggaagaaccacatgtacagctgccggttcagccggcagtgcgtggtggacaaggataagcggaaccagtgccggtactgcagactgaagaagtgcttcagagccggcatgaagaaagaagccgtgcagaacgagcgggaccggatcagcaccagaagaagcagctacgaggacagcagcctgcccagcatcaacgccctgctgcaggccgaggtgctgagcagacagatcaccgaaccagtgtccggcatcaacggcgacatccgggccaagaagatcgccagcattgccgacgtgtgcgagagcatgaaggaacagctgctggtgctggtggaatgggccaagtacatccccgccttttgcgagctgcccctggacgatcaggtggccctgctgagagcacacgccggcgaacatctgctgctgggagccaccaagcggagcatggtgttcaaggacgtgctgctgctgggcaacgactacatcgtgcccagacactgccctgagctggccgagatgagccgggtgtccatcagaatcctggacgaactggtgctgccgtttcaggaactgcagatcgacgacaacgagtacgcctacctgaaggccatcatctttttcgaccccgacgccaagggcctgagcgaccctggcaagatcaagcggctgagaagccaggtgcaagtgtccctggaagattacatcaacgaccggcagtacgacagccggggcagatttggcgaactgctcctgctgctgcccaccctgcagagcatcacctggcagatgatcgagcagatccagttcatcaagctgttcggcatggccaagatcgacaatctgctgcaggaaatgctgctctgaggactagtccctgttcccagagcccacttttttttctttttttgaaataaaatagcctgtctttcagatctaaaaaaaaaaaaaaaaaaaaaaaaaaaaaaaaaaaaaaaaaaaaaaaaaaaaaaaaaaaaaaaaaaaaaaaaaaaaaaaaaaaaaaaaaaaaaaaaaaaa

SEQ ID NO: 5079 - RNA, 1376 nt, synthetic construct
  misc_feature 1..1376: note = mRNA a-1 (A100) (opt29) from Homo sapiens__NP_000448.3__HNF4A(1-375)(S167A)
  source 1..1376: mol_type = other RNA
aggagagtcccgcagtcggcgtccagcggctctgcttgttcgtgtgtgtgtcgttgcaggccttattcaagcttaccatgagactgagcaagaccctggtggacatggacatggccgactactctgccgccctggaccctgcctacaccaccctggagttcgaaaacgtgcaagtgctgaccatgggcaacgacaccagccctagcgagggcaccaacctgaacgcccctaatagcctgggagtgtccgccctgtgtgccatctgtggcgatagagccaccggcaagcactacggcgccagctcttgtgatggctgcaagggcttcttccggcggagcgtgcggaagaaccacatgtacagctgccggttcagccggcagtgcgtggtggacaaggataagcggaaccagtgccggtactgcagactgaagaagtgcttcagagccggcatgaagaaagaagccgtgcagaacgagcgggaccggatcagcaccagaagaagcagctacgaggacagcagcctgcccagcatcaacgccctgctgcaggccgaggtgctgagcagacagatcaccgccccagtgtccggcatcaacggcgacatccgggccaagaagatcgccagcattgccgacgtgtgcgagagcatgaaggaacagctgctggtgctggtggaatgggccaagtacatccccgccttttgcgagctgcccctggacgatcaggtggccctgctgagagcacacgccggcgaacatctgctgctgggagccaccaagcggagcatggtgttcaaggacgtgctgctgctgggcaacgactacatcgtgcccagacactgccctgagctggccgagatgagccgggtgtccatcagaatcctggacgaactggtgctgccgtttcaggaactgcagatcgacgacaacgagtacgcctacctgaaggccatcatctttttcgaccccgacgccaagggcctgagcgaccctggcaagatcaagcggctgagaagccaggtgcaagtgtccctggaagattacatcaacgaccggcagtacgacagccggggcagatttggcgaactgctcctgctgctgcccaccctgcagagcatcacctggcagatgatcgagcagatccagttcatcaagctgttcggcatggccaagatcgacaatctgctgcaggaaatgctgctctgaggactagtccctgttcccagagcccacttttttttctttttttgaaataaaatagcctgtctttcagatctaaaaaaaaaaaaaaaaaaaaaaaaaaaaaaaaaaaaaaaaaaaaaaaaaaaaaaaaaaaaaaaaaaaaaaaaaaaaaaaaaaaaaaaaaaaaaaaaaaaa

SEQ ID NO: 5080 - RNA, 1376 nt, synthetic construct; identical to SEQ ID NO: 5079
  misc_feature 1..1376: note = mRNA a-1 (A100) (opt29) from Homo sapiens__NP_000448.3__HNF4A(1-375)(S167A_S378A_T429A_T432A_ S436A)
  source 1..1376: mol_type = other RNA

SEQ ID NO: 5081 - RNA, 1376 nt, synthetic construct; identical to SEQ ID NO: 5078
  misc_feature 1..1376: note = mRNA a-1 (A100) (opt29) from Homo sapiens__NP_000448.3__HNF4A(1-375)(S167E_S378E_T429E_T432E_ S436E)
  source 1..1376: mol_type = other RNA

SEQ ID NO: 5082 - RNA, 1376 nt, synthetic construct
  misc_feature 1..1376: note = mRNA a-1 (A100) (opt29) from Homo sapiens__NP_000448.3__HNF4A(1-375)(S87A)
  source 1..1376: mol_type = other RNA
aggagagtcccgcagtcggcgtccagcggctctgcttgttcgtgtgtgtgtcgttgcaggccttattcaagcttaccatgagactgagcaagaccctggtggacatggacatggccgactactctgccgccctggaccctgcctacaccaccctggagttcgaaaacgtgcaagtgctgaccatgggcaacgacaccagccctagcgagggcaccaacctgaacgcccctaatagcctgggagtgtccgccctgtgtgccatctgtggcgatagagccaccggcaagcactacggcgccagctcttgtgatggctgcaagggcttcttccggcgggccgtgcggaagaaccacatgtacagctgccggttcagccggcagtgcgtggtggacaaggataagcggaaccagtgccggtactgcagactgaagaagtgcttcagagccggcatgaagaaagaagccgtgcagaacgagcgggaccggatcagcaccagaagaagcagctacgaggacagcagcctgcccagcatcaacgccctgctgcaggccgaggtgctgagcagacagatcaccagcccagtgtccggcatcaacggcgacatccgggccaagaagatcgccagcattgccgacgtgtgcgagagcatgaaggaacagctgctggtgctggtggaatgggccaagtacatccccgccttttgcgagctgcccctggacgatcaggtggccctgctgagagcacacgccggcgaacatctgctgctgggagccaccaagcggagcatggtgttcaaggacgtgctgctgctgggcaacgactacatcgtgcccagacactgccctgagctggccgagatgagccgggtgtccatcagaatcctggacgaactggtgctgccgtttcaggaactgcagatcgacgacaacgagtacgcctacctgaaggccatcatctttttcgaccccgacgccaagggcctgagcgaccctggcaagatcaagcggctgagaagccaggtgcaagtgtccctggaagattacatcaacgaccggcagtacgacagccggggcagatttggcgaactgctcctgctgctgcccaccctgcagagcatcacctggcagatgatcgagcagatccagttcatcaagctgttcggcatggccaagatcgacaatctgctgcaggaaatgctgctctgaggactagtccctgttcccagagcccacttttttttctttttttgaaataaaatagcctgtctttcagatctaaaaaaaaaaaaaaaaaaaaaaaaaaaaaaaaaaaaaaaaaaaaaaaaaaaaaaaaaaaaaaaaaaaaaaaaaaaaaaaaaaaaaaaaaaaaaaaaaaaa

SEQ ID NO: 5083 - RNA, 1376 nt, synthetic construct
  misc_feature 1..1376: note = mRNA a-1 (A100) (opt29) from Homo sapiens__NP_000448.3__HNF4A(1-375)(S87E)
  source 1..1376: mol_type = other RNA
aggagagtcccgcagtcggcgtccagcggctctgcttgttcgtgtgtgtgtcgttgcaggccttattcaagcttaccatgagactgagcaagaccctggtggacatggacatggccgactactctgccgccctggaccctgcctacaccaccctggagttcgaaaacgtgcaagtgctgaccatgggcaacgacaccagccctagcgagggcaccaacctgaacgcccctaatagcctgggagtgtccgccctgtgtgccatctgtggcgatagagccaccggcaagcactacggcgccagctcttgtgatggctgcaagggcttcttccggcgggaggtgcggaagaaccacatgtacagctgccggttcagccggcagtgcgtggtggacaaggataagcggaaccagtgccggtactgcagactgaagaagtgcttcagagccggcatgaagaaagaagccgtgcagaacgagcgggaccggatcagcaccagaagaagcagctacgaggacagcagcctgcccagcatcaacgccctgctgcaggccgaggtgctgagcagacagatcaccagcccagtgtccggcatcaacggcgacatccgggccaagaagatcgccagcattgccgacgtgtgcgagagcatgaaggaacagctgctggtgctggtggaatgggccaagtacatccccgccttttgcgagctgcccctggacgatcaggtggccctgctgagagcacacgccggcgaacatctgctgctgggagccaccaagcggagcatggtgttcaaggacgtgctgctgctgggcaacgactacatcgtgcccagacactgccctgagctggccgagatgagccgggtgtccatcagaatcctggacgaactggtgctgccgtttcaggaactgcagatcgacgacaacgagtacgcctacctgaaggccatcatctttttcgaccccgacgccaagggcctgagcgaccctggcaagatcaagcggctgagaagccaggtgcaagtgtccctggaagattacatcaacgaccggcagtacgacagccggggcagatttggcgaactgctcctgctgctgcccaccctgcagagcatcacctggcagatgatcgagcagatccagttcatcaagctgttcggcatggccaagatcgacaatctgctgcaggaaatgctgctctgaggactagtccctgttcccagagcccacttttttttctttttttgaaataaaatagcctgtctttcagatctaaaaaaaaaaaaaaaaaaaaaaaaaaaaaaaaaaaaaaaaaaaaaaaaaaaaaaaaaaaaaaaaaaaaaaaaaaaaaaaaaaaaaaaaaaaaaaaaaaaa

SEQ ID NO: 5084 - RNA, 1376 nt, synthetic construct
  misc_feature 1..1376: note = mRNA a-1 (A100) (opt29) from Homo sapiens__NP_000448.3__HNF4A(1-375)(R2V)
  source 1..1376: mol_type = other RNA
aggagagtcccgcagtcggcgtccagcggctctgcttgttcgtgtgtgtgtcgttgcaggccttattcaagcttaccatggtgctgagcaagaccctggtggacatggacatggccgactactctgccgccctggaccctgcctacaccaccctggagttcgaaaacgtgcaagtgctgaccatgggcaacgacaccagccctagcgagggcaccaacctgaacgcccctaatagcctgggagtgtccgccctgtgtgccatctgtggcgatagagccaccggcaagcactacggcgccagctcttgtgatggctgcaagggcttcttccggcggagcgtgcggaagaaccacatgtacagctgccggttcagccggcagtgcgtggtggacaaggataagcggaaccagtgccggtactgcagactgaagaagtgcttcagagccggcatgaagaaagaagccgtgcagaacgagcgggaccggatcagcaccagaagaagcagctacgaggacagcagcctgcccagcatcaacgccctgctgcaggccgaggtgctgagcagacagatcaccagcccagtgtccggcatcaacggcgacatccgggccaagaagatcgccagcattgccgacgtgtgcgagagcatgaaggaacagctgctggtgctggtggaatgggccaagtacatccccgccttttgcgagctgcccctggacgatcaggtggccctgctgagagcacacgccggcgaacatctgctgctgggagccaccaagcggagcatggtgttcaaggacgtgctgctgctgggcaacgactacatcgtgcccagacactgccctgagctggccgagatgagccgggtgtccatcagaatcctggacgaactggtgctgccgtttcaggaactgcagatcgacgacaacgagtacgcctacctgaaggccatcatctttttcgaccccgacgccaagggcctgagcgaccctggcaagatcaagcggctgagaagccaggtgcaagtgtccctggaagattacatcaacgaccggcagtacgacagccggggcagatttggcgaactgctcctgctgctgcccaccctgcagagcatcacctggcagatgatcgagcagatccagttcatcaagctgttcggcatggccaagatcgacaatctgctgcaggaaatgctgctctgaggactagtccctgttcccagagcccacttttttttctttttttgaaataaaatagcctgtctttcagatctaaaaaaaaaaaaaaaaaaaaaaaaaaaaaaaaaaaaaaaaaaaaaaaaaaaaaaaaaaaaaaaaaaaaaaaaaaaaaaaaaaaaaaaaaaaaaaaaaaaa

SEQ ID NO: 5085 - RNA, 1376 nt, synthetic construct
  misc_feature 1..1376: note = mRNA a-1 (A100) (opt29) from Homo sapiens__NP_000448.3__HNF4A(1-375)(R2V_K5V)
  source 1..1376: mol_type = other RNA
aggagagtcccgcagtcggcgtccagcggctctgcttgttcgtgtgtgtgtcgttgcaggccttattcaagcttaccatggtgctgagcgtgaccctggtggacatggacatggccgactactctgccgccctggaccctgcctacaccaccctggagttcgaaaacgtgcaagtgctgaccatgggcaacgacaccagccctagcgagggcaccaacctgaacgcccctaatagcctgggagtgtccgccctgtgtgccatctgtggcgatagagccaccggcaagcactacggcgccagctcttgtgatggctgcaagggcttcttccggcggagcgtgcggaagaaccacatgtacagctgccggttcagccggcagtgcgtggtggacaaggataagcggaaccagtgccggtactgcagactgaagaagtgcttcagagccggcatgaagaaagaagccgtgcagaacgagcgggaccggatcagcaccagaagaagcagctacgaggacagcagcctgcccagcatcaacgccctgctgcaggccgaggtgctgagcagacagatcaccagcccagtgtccggcatcaacggcgacatccgggccaagaagatcgccagcattgccgacgtgtgcgagagcatgaaggaacagctgctggtgctggtggaatgggccaagtacatccccgccttttgcgagctgcccctggacgatcaggtggccctgctgagagcacacgccggcgaacatctgctgctgggagccaccaagcggagcatggtgttcaaggacgtgctgctgctgggcaacgactacatcgtgcccagacactgccctgagctggccgagatgagccgggtgtccatcagaatcctggacgaactggtgctgccgtttcaggaactgcagatcgacgacaacgagtacgcctacctgaaggccatcatctttttcgaccccgacgccaagggcctgagcgaccctggcaagatcaagcggctgagaagccaggtgcaagtgtccctggaagattacatcaacgaccggcagtacgacagccggggcagatttggcgaactgctcctgctgctgcccaccctgcagagcatcacctggcagatgatcgagcagatccagttcatcaagctgttcggcatggccaagatcgacaatctgctgcaggaaatgctgctctgaggactagtccctgttcccagagcccacttttttttctttttttgaaataaaatagcctgtctttcagatctaaaaaaaaaaaaaaaaaaaaaaaaaaaaaaaaaaaaaaaaaaaaaaaaaaaaaaaaaaaaaaaaaaaaaaaaaaaaaaaaaaaaaaaaaaaaaaaaaaaa

SEQ ID NO: 5086 - RNA, 1376 nt, synthetic construct
  misc_feature 1..1376: note = mRNA a-1 (A100) (opt29) from Homo sapiens__NP_000448.3__HNF4A(1-375)(K179R_K180R)
  source 1..1376: mol_type = other RNA
aggagagtcccgcagtcggcgtccagcggctctgcttgttcgtgtgtgtgtcgttgcaggccttattcaagcttaccatgagactgagcaagaccctggtggacatggacatggccgactactctgccgccctggaccctgcctacaccaccctggagttcgaaaacgtgcaagtgctgaccatgggcaacgacaccagccctagcgagggcaccaacctgaacgcccctaatagcctgggagtgtccgccctgtgtgccatctgtggcgatagagccaccggcaagcactacggcgccagctcttgtgatggctgcaagggcttcttccggcggagcgtgcggaagaaccacatgtacagctgccggttcagccggcagtgcgtggtggacaaggataagcggaaccagtgccggtactgcagactgaagaagtgcttcagagccggcatgaagaaagaagccgtgcagaacgagcgggaccggatcagcaccagaagaagcagctacgaggacagcagcctgcccagcatcaacgccctgctgcaggccgaggtgctgagcagacagatcaccagcccagtgtccggcatcaacggcgacatccgggcccggagaatcgccagcattgccgacgtgtgcgagagcatgaaggaacagctgctggtgctggtggaatgggccaagtacatccccgccttttgcgagctgcccctggacgatcaggtggccctgctgagagcacacgccggcgaacatctgctgctgggagccaccaagcggagcatggtgttcaaggacgtgctgctgctgggcaacgactacatcgtgcccagacactgccctgagctggccgagatgagccgggtgtccatcagaatcctggacgaactggtgctgccgtttcaggaactgcagatcgacgacaacgagtacgcctacctgaaggccatcatctttttcgaccccgacgccaagggcctgagcgaccctggcaagatcaagcggctgagaagccaggtgcaagtgtccctggaagattacatcaacgaccggcagtacgacagccggggcagatttggcgaactgctcctgctgctgcccaccctgcagagcatcacctggcagatgatcgagcagatccagttcatcaagctgttcggcatggccaagatcgacaatctgctgcaggaaatgctgctctgaggactagtccctgttcccagagcccacttttttttctttttttgaaataaaatagcctgtctttcagatctaaaaaaaaaaaaaaaaaaaaaaaaaaaaaaaaaaaaaaaaaaaaaaaaaaaaaaaaaaaaaaaaaaaaaaaaaaaaaaaaaaaaaaaaaaaaaaaaaaaa

SEQ ID NO: 5087 - RNA, 1376 nt, synthetic construct
  misc_feature 1..1376: note = mRNA a-1 (A100) (opt29) from Homo sapiens__NP_000448.3__HNF4A(1-375)(K234R)
  source 1..1376: mol_type = other RNA
aggagagtcccgcagtcggcgtccagcggctctgcttgttcgtgtgtgtgtcgttgcaggccttattcaagcttaccatgagactgagcaagaccctggtggacatggacatggccgactactctgccgccctggaccctgcctacaccaccctggagttcgaaaacgtgcaagtgctgaccatgggcaacgacaccagccctagcgagggcaccaacctgaacgcccctaatagcctgggagtgtccgccctgtgtgccatctgtggcgatagagccaccggcaagcactacggcgccagctcttgtgatggctgcaagggcttcttccggcggagcgtgcggaagaaccacatgtacagctgccggttcagccggcagtgcgtggtggacaaggataagcggaaccagtgccggtactgcagactgaagaagtgcttcagagccggcatgaagaaagaagccgtgcagaacgagcgggaccggatcagcaccagaagaagcagctacgaggacagcagcctgcccagcatcaacgccctgctgcaggccgaggtgctgagcagacagatcaccagcccagtgtccggcatcaacggcgacatccgggccaagaagatcgccagcattgccgacgtgtgcgagagcatgaaggaacagctgctggtgctggtggaatgggccaagtacatccccgccttttgcgagctgcccctggacgatcaggtggccctgctgagagcacacgccggcgaacatctgctgctgggagccacccggcggagcatggtgttcaaggacgtgctgctgctgggcaacgactacatcgtgcccagacactgccctgagctggccgagatgagccgggtgtccatcagaatcctggacgaactggtgctgccgtttcaggaactgcagatcgacgacaacgagtacgcctacctgaaggccatcatctttttcgaccccgacgccaagggcctgagcgaccctggcaagatcaagcggctgagaagccaggtgcaagtgtccctggaagattacatcaacgaccggcagtacgacagccggggcagatttggcgaactgctcctgctgctgcccaccctgcagagcatcacctggcagatgatcgagcagatccagttcatcaagctgttcggcatggccaagatcgacaatctgctgcaggaaatgctgctctgaggactagtccctgttcccagagcccacttttttttctttttttgaaataaaatagcctgtctttcagatctaaaaaaaaaaaaaaaaaaaaaaaaaaaaaaaaaaaaaaaaaaaaaaaaaaaaaaaaaaaaaaaaaaaaaaaaaaaaaaaaaaaaaaaaaaaaaaaaaaaa

SEQ ID NO: 5088 - RNA, 1376 nt, synthetic construct
  misc_feature 1..1376: note = mRNA a-1 (A100) (opt29) from Homo sapiens__NP_000448.3__HNF4A(1-375)(K300R)
  source 1..1376: mol_type = other RNA
aggagagtcccgcagtcggcgtccagcggctctgcttgttcgtgtgtgtgtcgttgcaggccttattcaagcttaccatgagactgagcaagaccctggtggacatggacatggccgactactctgccgccctggaccctgcctacaccaccctggagttcgaaaacgtgcaagtgctgaccatgggcaacgacaccagccctagcgagggcaccaacctgaacgcccctaatagcctgggagtgtccgccctgtgtgccatctgtggcgatagagccaccggcaagcactacggcgccagctcttgtgatggctgcaagggcttcttccggcggagcgtgcggaagaaccacatgtacagctgccggttcagccggcagtgcgtggtggacaaggataagcggaaccagtgccggtactgcagactgaagaagtgcttcagagccggcatgaagaaagaagccgtgcagaacgagcgggaccggatcagcaccagaagaagcagctacgaggacagcagcctgcccagcatcaacgccctgctgcaggccgaggtgctgagcagacagatcaccagcccagtgtccggcatcaacggcgacatccgggccaagaagatcgccagcattgccgacgtgtgcgagagcatgaaggaacagctgctggtgctggtggaatgggccaagtacatccccgccttttgcgagctgcccctggacgatcaggtggccctgctgagagcacacgccggcgaacatctgctgctgggagccaccaagcggagcatggtgttcaaggacgtgctgctgctgggcaacgactacatcgtgcccagacactgccctgagctggccgagatgagccgggtgtccatcagaatcctggacgaactggtgctgccgtttcaggaactgcagatcgacgacaacgagtacgcctacctgaaggccatcatctttttcgaccccgacgccagaggcctgagcgaccctggcaagatcaagcggctgagaagccaggtgcaagtgtccctggaagattacatcaacgaccggcagtacgacagccggggcagatttggcgaactgctcctgctgctgcccaccctgcagagcatcacctggcagatgatcgagcagatccagttcatcaagctgttcggcatggccaagatcgacaatctgctgcaggaaatgctgctctgaggactagtccctgttcccagagcccacttttttttctttttttgaaataaaatagcctgtctttcagatctaaaaaaaaaaaaaaaaaaaaaaaaaaaaaaaaaaaaaaaaaaaaaaaaaaaaaaaaaaaaaaaaaaaaaaaaaaaaaaaaaaaaaaaaaaaaaaaaaaaa

SEQ ID NO: 5089 - RNA, 1376 nt, synthetic construct
  misc_feature 1..1376: note = mRNA a-1 (A100) (opt29) from Homo sapiens__NP_000448.3__HNF4A(1-375)(K300R_K307R_K309R)
  source 1..1376: mol_type = other RNA
aggagagtcccgcagtcggcgtccagcggctctgcttgttcgtgtgtgtgtcgttgcaggccttattcaagcttaccatgagactgagcaagaccctggtggacatggacatggccgactactctgccgccctggaccctgcctacaccaccctggagttcgaaaacgtgcaagtgctgaccatgggcaacgacaccagccctagcgagggcaccaacctgaacgcccctaatagcctgggagtgtccgccctgtgtgccatctgtggcgatagagccaccggcaagcactacggcgccagctcttgtgatggctgcaagggcttcttccggcggagcgtgcggaagaaccacatgtacagctgccggttcagccggcagtgcgtggtggacaaggataagcggaaccagtgccggtactgcagactgaagaagtgcttcagagccggcatgaagaaagaagccgtgcagaacgagcgggaccggatcagcaccagaagaagcagctacgaggacagcagcctgcccagcatcaacgccctgctgcaggccgaggtgctgagcagacagatcaccagcccagtgtccggcatcaacggcgacatccgggccaagaagatcgccagcattgccgacgtgtgcgagagcatgaaggaacagctgctggtgctggtggaatgggccaagtacatccccgccttttgcgagctgcccctggacgatcaggtggccctgctgagagcacacgccggcgaacatctgctgctgggagccaccaagcggagcatggtgttcaaggacgtgctgctgctgggcaacgactacatcgtgcccagacactgccctgagctggccgagatgagccgggtgtccatcagaatcctggacgaactggtgctgccgtttcaggaactgcagatcgacgacaacgagtacgcctacctgaaggccatcatctttttcgaccccgacgccagaggcctgagcgaccctggccggatcagacggctgagaagccaggtgcaagtgtccctggaagattacatcaacgaccggcagtacgacagccggggcagatttggcgaactgctcctgctgctgcccaccctgcagagcatcacctggcagatgatcgagcagatccagttcatcaagctgttcggcatggccaagatcgacaatctgctgcaggaaatgctgctctgaggactagtccctgttcccagagcccacttttttttctttttttgaaataaaatagcctgtctttcagatctaaaaaaaaaaaaaaaaaaaaaaaaaaaaaaaaaaaaaaaaaaaaaaaaaaaaaaaaaaaaaaaaaaaaaaaaaaaaaaaaaaaaaaaaaaaaaaaaaaaa

SEQ ID NO: 5090 - RNA, 1376 nt, synthetic construct; identical to SEQ ID NO: 5071
  misc_feature 1..1376: note = mRNA a-1 (A100) (opt29) from Homo sapiens__NP_000448.3__HNF4A(1-375)(K447R_K470R)
  source 1..1376: mol_type = other RNA

SEQ ID NO: 5091 - RNA, 1376 nt, synthetic construct; identical to SEQ ID NO: 5071
  misc_feature 1..1376: note = mRNA a-1 (A100) (opt29) from Homo sapiens__NP_000448.3__HNF4A(1-375)(K458R)
  source 1..1376: mol_type = other RNA

SEQ ID NO: 5092 - RNA, 1376 nt, synthetic construct
  misc_feature 1..1376: note = mRNA a-1 (A100) (opt29) from Homo sapiens__NP_000448.3__HNF4A(1-375)(K106R_K108R_K126R_K127R)
  source 1..1376: mol_type = other RNA
aggagagtcccgcagtcggcgtccagcggctctgcttgttcgtgtgtgtgtcgttgcaggccttattcaagcttaccatgagactgagcaagaccctggtggacatggacatggccgactactctgccgccctggaccctgcctacaccaccctggagttcgaaaacgtgcaagtgctgaccatgggcaacgacaccagccctagcgagggcaccaacctgaacgcccctaatagcctgggagtgtccgccctgtgtgccatctgtggcgatagagccaccggcaagcactacggcgccagctcttgtgatggctgcaagggcttcttccggcggagcgtgcggaagaaccacatgtacagctgccggttcagccggcagtgcgtggtggaccgggatagacggaaccagtgccggtactgcagactgaagaagtgcttcagagccggcatgcggagagaagccgtgcagaacgagcgggaccggatcagcaccagaagaagcagctacgaggacagcagcctgcccagcatcaacgccctgctgcaggccgaggtgctgagcagacagatcaccagcccagtgtccggcatcaacggcgacatccgggccaagaagatcgccagcattgccgacgtgtgcgagagcatgaaggaacagctgctggtgctggtggaatgggccaagtacatccccgccttttgcgagctgcccctggacgatcaggtggccctgctgagagcacacgccggcgaacatctgctgctgggagccaccaagcggagcatggtgttcaaggacgtgctgctgctgggcaacgactacatcgtgcccagacactgccctgagctggccgagatgagccgggtgtccatcagaatcctggacgaactggtgctgccgtttcaggaactgcagatcgacgacaacgagtacgcctacctgaaggccatcatctttttcgaccccgacgccaagggcctgagcgaccctggcaagatcaagcggctgagaagccaggtgcaagtgtccctggaagattacatcaacgaccggcagtacgacagccggggcagatttggcgaactgctcctgctgctgcccaccctgcagagcatcacctggcagatgatcgagcagatccagttcatcaagctgttcggcatggccaagatcgacaatctgctgcaggaaatgctgctctgaggactagtccctgttcccagagcccacttttttttctttttttgaaataaaatagcctgtctttcagatctaaaaaaaaaaaaaaaaaaaaaaaaaaaaaaaaaaaaaaaaaaaaaaaaaaaaaaaaaaaaaaaaaaaaaaaaaaaaaaaaaaaaaaaaaaaaaaaaaaaa

SEQ ID NO: 5093 - RNA, 1376 nt, synthetic construct
  misc_feature 1..1376: note = mRNA a-1 (A100) (opt29) from Homo sapiens__NP_000448.3__HNF4A(1-375)(E285Q)
  source 1..1376: mol_type = other RNA
aggagagtcccgcagtcggcgtccagcggctctgcttgttcgtgtgtgtgtcgttgcaggccttattcaagcttaccatgagactgagcaagaccctggtggacatggacatggccgactactctgccgccctggaccctgcctacaccaccctggagttcgaaaacgtgcaagtgctgaccatgggcaacgacaccagccctagcgagggcaccaacctgaacgcccctaatagcctgggagtgtccgccctgtgtgccatctgtggcgatagagccaccggcaagcactacggcgccagctcttgtgatggctgcaagggcttcttccggcggagcgtgcggaagaaccacatgtacagctgccggttcagccggcagtgcgtggtggacaaggataagcggaaccagtgccggtactgcagactgaagaagtgcttcagagccggcatgaagaaagaagccgtgcagaacgagcgggaccggatcagcaccagaagaagcagctacgaggacagcagcctgcccagcatcaacgccctgctgcaggccgaggtgctgagcagacagatcaccagcccagtgtccggcatcaacggcgacatccgggccaagaagatcgccagcattgccgacgtgtgcgagagcatgaaggaacagctgctggtgctggtggaatgggccaagtacatccccgccttttgcgagctgcccctggacgatcaggtggccctgctgagagcacacgccggcgaacatctgctgctgggagccaccaagcggagcatggtgttcaaggacgtgctgctgctgggcaacgactacatcgtgcccagacactgccctgagctggccgagatgagccgggtgtccatcagaatcctggacgaactggtgctgccgtttcaggaactgcagatcgacgacaaccagtacgcctacctgaaggccatcatctttttcgaccccgacgccaagggcctgagcgaccctggcaagatcaagcggctgagaagccaggtgcaagtgtccctggaagattacatcaacgaccggcagtacgacagccggggcagatttggcgaactgctcctgctgctgcccaccctgcagagcatcacctggcagatgatcgagcagatccagttcatcaagctgttcggcatggccaagatcgacaatctgctgcaggaaatgctgctctgaggactagtccctgttcccagagcccacttttttttctttttttgaaataaaatagcctgtctttcagatctaaaaaaaaaaaaaaaaaaaaaaaaaaaaaaaaaaaaaaaaaaaaaaaaaaaaaaaaaaaaaaaaaaaaaaaaaaaaaaaaaaaaaaaaaaaaaaaaaaaa

SEQ ID NO: 5094 - RNA, 1376 nt, synthetic construct
  misc_feature 1..1376: note = mRNA a-1 (A100) (opt29) from Homo sapiens__NP_000448.3__HNF4A(1-375)(T166E)
  source 1..1376: mol_type = other RNA
aggagagtcccgcagtcggcgtccagcggctctgcttgttcgtgtgtgtgtcgttgcaggccttattcaagcttaccatgagactgagcaagaccctggtggacatggacatggccgactactctgccgccctggaccctgcctacaccaccctggagttcgaaaacgtgcaagtgctgaccatgggcaacgacaccagccctagcgagggcaccaacctgaacgcccctaatagcctgggagtgtccgccctgtgtgccatctgtggcgatagagccaccggcaagcactacggcgccagctcttgtgatggctgcaagggcttcttccggcggagcgtgcggaagaaccacatgtacagctgccggttcagccggcagtgcgtggtggacaaggataagcggaaccagtgccggtactgcagactgaagaagtgcttcagagccggcatgaagaaagaagccgtgcagaacgagcgggaccggatcagcaccagaagaagcagctacgaggacagcagcctgcccagcatcaacgccctgctgcaggccgaggtgctgagcagacagatcgagagcccagtgtccggcatcaacggcgacatccgggccaagaagatcgccagcattgccgacgtgtgcgagagcatgaaggaacagctgctggtgctggtggaatgggccaagtacatccccgccttttgcgagctgcccctggacgatcaggtggccctgctgagagcacacgccggcgaacatctgctgctgggagccaccaagcggagcatggtgttcaaggacgtgctgctgctgggcaacgactacatcgtgcccagacactgccctgagctggccgagatgagccgggtgtccatcagaatcctggacgaactggtgctgccgtttcaggaactgcagatcgacgacaacgagtacgcctacctgaaggccatcatctttttcgaccccgacgccaagggcctgagcgaccctggcaagatcaagcggctgagaagccaggtgcaagtgtccctggaagattacatcaacgaccggcagtacgacagccggggcagatttggcgaactgctcctgctgctgcccaccctgcagagcatcacctggcagatgatcgagcagatccagttcatcaagctgttcggcatggccaagatcgacaatctgctgcaggaaatgctgctctgaggactagtccctgttcccagagcccacttttttttctttttttgaaataaaatagcctgtctttcagatctaaaaaaaaaaaaaaaaaaaaaaaaaaaaaaaaaaaaaaaaaaaaaaaaaaaaaaaaaaaaaaaaaaaaaaaaaaaaaaaaaaaaaaaaaaaaaaaaaaaa

SEQ ID NO: 5095 - RNA, 1376 nt, synthetic construct
  misc_feature 1..1376: note = mRNA a-1 (A100) (opt29) from Homo sapiens__NP_000448.3__HNF4A(1-375)(S148A)
  source 1..1376: mol_type = other RNA
aggagagtcccgcagtcggcgtccagcggctctgcttgttcgtgtgtgtgtcgttgcaggccttattcaagcttaccatgagactgagcaagaccctggtggacatggacatggccgactactctgccgccctggaccctgcctacaccaccctggagttcgaaaacgtgcaagtgctgaccatgggcaacgacaccagccctagcgagggcaccaacctgaacgcccctaatagcctgggagtgtccgccctgtgtgccatctgtggcgatagagccaccggcaagcactacggcgccagctcttgtgatggctgcaagggcttcttccggcggagcgtgcggaagaaccacatgtacagctgccggttcagccggcagtgcgtggtggacaaggataagcggaaccagtgccggtactgcagactgaagaagtgcttcagagccggcatgaagaaagaagccgtgcagaacgagcgggaccggatcagcaccagaagaagcagctacgaggacagcgccctgcccagcatcaacgccctgctgcaggccgaggtgctgagcagacagatcaccagcccagtgtccggcatcaacggcgacatccgggccaagaagatcgccagcattgccgacgtgtgcgagagcatgaaggaacagctgctggtgctggtggaatgggccaagtacatccccgccttttgcgagctgcccctggacgatcaggtggccctgctgagagcacacgccggcgaacatctgctgctgggagccaccaagcggagcatggtgttcaaggacgtgctgctgctgggcaacgactacatcgtgcccagacactgccctgagctggccgagatgagccgggtgtccatcagaatcctggacgaactggtgctgccgtttcaggaactgcagatcgacgacaacgagtacgcctacctgaaggccatcatctttttcgaccccgacgccaagggcctgagcgaccctggcaagatcaagcggctgagaagccaggtgcaagtgtccctggaagattacatcaacgaccggcagtacgacagccggggcagatttggcgaactgctcctgctgctgcccaccctgcagagcatcacctggcagatgatcgagcagatccagttcatcaagctgttcggcatggccaagatcgacaatctgctgcaggaaatgctgctctgaggactagtccctgttcccagagcccacttttttttctttttttgaaataaaatagcctgtctttcagatctaaaaaaaaaaaaaaaaaaaaaaaaaaaaaaaaaaaaaaaaaaaaaaaaaaaaaaaaaaaaaaaaaaaaaaaaaaaaaaaaaaaaaaaaaaaaaaaaaaaa

SEQ ID NO: 5096 - RNA, 1376 nt, synthetic construct
  misc_feature 1..1376: note = mRNA a-1 (A100) (opt29) from Homo sapiens__NP_000448.3__HNF4A(1-375)(S148E)
  source 1..1376: mol_type = other RNA
aggagagtcccgcagtcggcgtccagcggctctgcttgttcgtgtgtgtgtcgttgcaggccttattcaagcttaccatgagactgagcaagaccctggtggacatggacatggccgactactctgccgccctggaccctgcctacaccaccctggagttcgaaaacgtgcaagtgctgaccatgggcaacgacaccagccctagcgagggcaccaacctgaacgcccctaatagcctgggagtgtccgccctgtgtgccatctgtggcgatagagccaccggcaagcactacggcgccagctcttgtgatggctgcaagggcttcttccggcggagcgtgcggaagaaccacatgtacagctgccggttcagccggcagtgcgtggtggacaaggataagcggaaccagtgccggtactgcagactgaagaagtgcttcagagccggcatgaagaaagaagccgtgcagaacgagcgggaccggatcagcaccagaagaagcagctacgaggacagcgaactgcccagcatcaacgccctgctgcaggccgaggtgctgagcagacagatcaccagcccagtgtccggcatcaacggcgacatccgggccaagaagatcgccagcattgccgacgtgtgcgagagcatgaaggaacagctgctggtgctggtggaatgggccaagtacatccccgccttttgcgagctgcccctggacgatcaggtggccctgctgagagcacacgccggcgaacatctgctgctgggagccaccaagcggagcatggtgttcaaggacgtgctgctgctgggcaacgactacatcgtgcccagacactgccctgagctggccgagatgagccgggtgtccatcagaatcctggacgaactggtgctgccgtttcaggaactgcagatcgacgacaacgagtacgcctacctgaaggccatcatctttttcgaccccgacgccaagggcctgagcgaccctggcaagatcaagcggctgagaagccaggtgcaagtgtccctggaagattacatcaacgaccggcagtacgacagccggggcagatttggcgaactgctcctgctgctgcccaccctgcagagcatcacctggcagatgatcgagcagatccagttcatcaagctgttcggcatggccaagatcgacaatctgctgcaggaaatgctgctctgaggactagtccctgttcccagagcccacttttttttctttttttgaaataaaatagcctgtctttcagatctaaaaaaaaaaaaaaaaaaaaaaaaaaaaaaaaaaaaaaaaaaaaaaaaaaaaaaaaaaaaaaaaaaaaaaaaaaaaaaaaaaaaaaaaaaaaaaaaaaaa

SEQ ID NO: 5097 - RNA, 1376 nt, synthetic construct
  misc_feature 1..1376: note = mRNA a-1 (A100) (opt29) from Homo sapiens__NP_000448.3__HNF4A(1-375)(S183A)
  source 1..1376: mol_type = other RNA
aggagagtcccgcagtcggcgtccagcggctctgcttgttcgtgtgtgtgtcgttgcaggccttattcaagcttaccatgagactgagcaagaccctggtggacatggacatggccgactactctgccgccctggaccctgcctacaccaccctggagttcgaaaacgtgcaagtgctgaccatgggcaacgacaccagccctagcgagggcaccaacctgaacgcccctaatagcctgggagtgtccgccctgtgtgccatctgtggcgatagagccaccggcaagcactacggcgccagctcttgtgatggctgcaagggcttcttccggcggagcgtgcggaagaaccacatgtacagctgccggttcagccggcagtgcgtggtggacaaggataagcggaaccagtgccggtactgcagactgaagaagtgcttcagagccggcatgaagaaagaagccgtgcagaacgagcgggaccggatcagcaccagaagaagcagctacgaggacagcagcctgcccagcatcaacgccctgctgcaggccgaggtgctgagcagacagatcaccagcccagtgtccggcatcaacggcgacatccgggccaagaagatcgccgccattgccgacgtgtgcgagagcatgaaggaacagctgctggtgctggtggaatgggccaagtacatccccgccttttgcgagctgcccctggacgatcaggtggccctgctgagagcacacgccggcgaacatctgctgctgggagccaccaagcggagcatggtgttcaaggacgtgctgctgctgggcaacgactacatcgtgcccagacactgccctgagctggccgagatgagccgggtgtccatcagaatcctggacgaactggtgctgccgtttcaggaactgcagatcgacgacaacgagtacgcctacctgaaggccatcatctttttcgaccccgacgccaagggcctgagcgaccctggcaagatcaagcggctgagaagccaggtgcaagtgtccctggaagattacatcaacgaccggcagtacgacagccggggcagatttggcgaactgctcctgctgctgcccaccctgcagagcatcacctggcagatgatcgagcagatccagttcatcaagctgttcggcatggccaagatcgacaatctgctgcaggaaatgctgctctgaggactagtccctgttcccagagcccacttttttttctttttttgaaataaaatagcctgtctttcagatctaaaaaaaaaaaaaaaaaaaaaaaaaaaaaaaaaaaaaaaaaaaaaaaaaaaaaaaaaaaaaaaaaaaaaaaaaaaaaaaaaaaaaaaaaaaaaaaaaaaa

SEQ ID NO: 5098 - RNA, 1376 nt, synthetic construct
  misc_feature 1..1376: note = mRNA a-1 (A100) (opt29) from Homo sapiens__NP_000448.3__HNF4A(1-375)(S183E)
  source 1..1376: mol_type = other RNA
aggagagtcccgcagtcggcgtccagcggctctgcttgttcgtgtgtgtgtcgttgcaggccttattcaagcttaccatgagactgagcaagaccctggtggacatggacatggccgactactctgccgccctggaccctgcctacaccaccctggagttcgaaaacgtgcaagtgctgaccatgggcaacgacaccagccctagcgagggcaccaacctgaacgcccctaatagcctgggagtgtccgccctgtgtgccatctgtggcgatagagccaccggcaagcactacggcgccagctcttgtgatggctgcaagggcttcttccggcggagcgtgcggaagaaccacatgtacagctgccggttcagccggcagtgcgtggtggacaaggataagcggaaccagtgccggtactgcagactgaagaagtgcttcagagccggcatgaagaaagaagccgtgcagaacgagcgggaccggatcagcaccagaagaagcagctacgaggacagcagcctgcccagcatcaacgccctgctgcaggccgaggtgctgagcagacagatcaccagcccagtgtccggcatcaacggcgacatccgggccaagaagatcgccgagattgccgacgtgtgcgagagcatgaaggaacagctgctggtgctggtggaatgggccaagtacatccccgccttttgcgagctgcccctggacgatcaggtggccctgctgagagcacacgccggcgaacatctgctgctgggagccaccaagcggagcatggtgttcaaggacgtgctgctgctgggcaacgactacatcgtgcccagacactgccctgagctggccgagatgagccgggtgtccatcagaatcctggacgaactggtgctgccgtttcaggaactgcagatcgacgacaacgagtacgcctacctgaaggccatcatctttttcgaccccgacgccaagggcctgagcgaccctggcaagatcaagcggctgagaagccaggtgcaagtgtccctggaagattacatcaacgaccggcagtacgacagccggggcagatttggcgaactgctcctgctgctgcccaccctgcagagcatcacctggcagatgatcgagcagatccagttcatcaagctgttcggcatggccaagatcgacaatctgctgcaggaaatgctgctctgaggactagtccctgttcccagagcccacttttttttctttttttgaaataaaatagcctgtctttcagatctaaaaaaaaaaaaaaaaaaaaaaaaaaaaaaaaaaaaaaaaaaaaaaaaaaaaaaaaaaaaaaaaaaaaaaaaaaaaaaaaaaaaaaaaaaaaaaaaaaaa

SEQ ID NO: 5099 - RNA, 1376 nt, synthetic construct; identical to SEQ ID NO: 5071
  misc_feature 1..1376: note = mRNA a-1 (A100) (opt29) from Homo sapiens__NP_000448.3__HNF4A(1-375)(S461A)
  source 1..1376: mol_type = other RNA

SEQ ID NO: 5100 - RNA, 1376 nt, synthetic construct; identical to SEQ ID NO: 5071
  misc_feature 1..1376: note = mRNA a-1 (A100) (opt29) from Homo sapiens__NP_000448.3__HNF4A(1-375)(S461E)
  source 1..1376: mol_type = other RNA

SEQ ID NO: 5101 - RNA, 1376 nt, synthetic construct
  misc_feature 1..1376: note = mRNA a-1 (A100) (opt29) from Homo sapiens__NP_000448.3__HNF4A(1-375)(S142A_S143A_S313A)
  source 1..1376: mol_type = other RNA
aggagagtcccgcagtcggcgtccagcggctctgcttgttcgtgtgtgtgtcgttgcaggccttattcaagcttaccatgagactgagcaagaccctggtggacatggacatggccgactactctgccgccctggaccctgcctacaccaccctggagttcgaaaacgtgcaagtgctgaccatgggcaacgacaccagccctagcgagggcaccaacctgaacgcccctaatagcctgggagtgtccgccctgtgtgccatctgtggcgatagagccaccggcaagcactacggcgccagctcttgtgatggctgcaagggcttcttccggcggagcgtgcggaagaaccacatgtacagctgccggttcagccggcagtgcgtggtggacaaggataagcggaaccagtgccggtactgcagactgaagaagtgcttcagagccggcatgaagaaagaagccgtgcagaacgagcgggaccggatcagcaccagaagagccgcctacgaggacagcagcctgcccagcatcaacgccctgctgcaggccgaggtgctgagcagacagatcaccagcccagtgtccggcatcaacggcgacatccgggccaagaagatcgccagcattgccgacgtgtgcgagagcatgaaggaacagctgctggtgctggtggaatgggccaagtacatccccgccttttgcgagctgcccctggacgatcaggtggccctgctgagagcacacgccggcgaacatctgctgctgggagccaccaagcggagcatggtgttcaaggacgtgctgctgctgggcaacgactacatcgtgcccagacactgccctgagctggccgagatgagccgggtgtccatcagaatcctggacgaactggtgctgccgtttcaggaactgcagatcgacgacaacgagtacgcctacctgaaggccatcatctttttcgaccccgacgccaagggcctgagcgaccctggcaagatcaagcggctgagagcccaggtgcaagtgtccctggaagattacatcaacgaccggcagtacgacagccggggcagatttggcgaactgctcctgctgctgcccaccctgcagagcatcacctggcagatgatcgagcagatccagttcatcaagctgttcggcatggccaagatcgacaatctgctgcaggaaatgctgctctgaggactagtccctgttcccagagcccacttttttttctttttttgaaataaaatagcctgtctttcagatctaaaaaaaaaaaaaaaaaaaaaaaaaaaaaaaaaaaaaaaaaaaaaaaaaaaaaaaaaaaaaaaaaaaaaaaaaaaaaaaaaaaaaaaaaaaaaaaaaaaa

SEQ ID NO: 5102 - RNA, 1376 nt, synthetic construct; identical to SEQ ID NO: 5101
  misc_feature 1..1376: note = mRNA a-1 (A100) (opt29) from Homo sapiens__NP_000448.3__HNF4A(1-375)(S142A_S143A_S313A_K458R)
  source 1..1376: mol_type = other RNA

SEQ ID NO: 5103 - RNA, 1376 nt, synthetic construct
  misc_feature 1..1376: note = mRNA a-1 (A100) (opt29) from Homo sapiens__NP_000448.3__HNF4A(1-375)(S142A_S143A_S167A_S313A_ S378A_T429A_T432A_S436A_K458R)
  source 1..1376: mol_type = other RNA
aggagagtcccgcagtcggcgtccagcggctctgcttgttcgtgtgtgtgtcgttgcaggccttattcaagcttaccatgagactgagcaagaccctggtggacatggacatggccgactactctgccgccctggaccctgcctacaccaccctggagttcgaaaacgtgcaagtgctgaccatgggcaacgacaccagccctagcgagggcaccaacctgaacgcccctaatagcctgggagtgtccgccctgtgtgccatctgtggcgatagagccaccggcaagcactacggcgccagctcttgtgatggctgcaagggcttcttccggcggagcgtgcggaagaaccacatgtacagctgccggttcagccggcagtgcgtggtggacaaggataagcggaaccagtgccggtactgcagactgaagaagtgcttcagagccggcatgaagaaagaagccgtgcagaacgagcgggaccggatcagcaccagaagagccgcctacgaggacagcagcctgcccagcatcaacgccctgctgcaggccgaggtgctgagcagacagatcaccgccccagtgtccggcatcaacggcgacatccgggccaagaagatcgccagcattgccgacgtgtgcgagagcatgaaggaacagctgctggtgctggtggaatgggccaagtacatccccgccttttgcgagctgcccctggacgatcaggtggccctgctgagagcacacgccggcgaacatctgctgctgggagccaccaagcggagcatggtgttcaaggacgtgctgctgctgggcaacgactacatcgtgcccagacactgccctgagctggccgagatgagccgggtgtccatcagaatcctggacgaactggtgctgccgtttcaggaactgcagatcgacgacaacgagtacgcctacctgaaggccatcatctttttcgaccccgacgccaagggcctgagcgaccctggcaagatcaagcggctgagagcccaggtgcaagtgtccctggaagattacatcaacgaccggcagtacgacagccggggcagatttggcgaactgctcctgctgctgcccaccctgcagagcatcacctggcagatgatcgagcagatccagttcatcaagctgttcggcatggccaagatcgacaatctgctgcaggaaatgctgctctgaggactagtccctgttcccagagcccacttttttttctttttttgaaataaaatagcctgtctttcagatctaaaaaaaaaaaaaaaaaaaaaaaaaaaaaaaaaaaaaaaaaaaaaaaaaaaaaaaaaaaaaaaaaaaaaaaaaaaaaaaaaaaaaaaaaaaaaaaaaaaa

SEQ ID NO: 5104 - RNA, 1376 nt, synthetic construct
  misc_feature 1..1376: note = mRNA a-1 (A100) (opt29) from Homo sapiens__NP_000448.3__HNF4A(1-375)(S142A_S143A_S148A_S167A_ S313A_S378A_T429A_T432A_S436A_K458R)
  source 1..1376: mol_type = other RNA
aggagagtcccgcagtcggcgtccagcggctctgcttgttcgtgtgtgtgtcgttgcaggccttattcaagcttaccatgagactgagcaagaccctggtggacatggacatggccgactactctgccgccctggaccctgcctacaccaccctggagttcgaaaacgtgcaagtgctgaccatgggcaacgacaccagccctagcgagggcaccaacctgaacgcccctaatagcctgggagtgtccgccctgtgtgccatctgtggcgatagagccaccggcaagcactacggcgccagctcttgtgatggctgcaagggcttcttccggcggagcgtgcggaagaaccacatgtacagctgccggttcagccggcagtgcgtggtggacaaggataagcggaaccagtgccggtactgcagactgaagaagtgcttcagagccggcatgaagaaagaagccgtgcagaacgagcgggaccggatcagcaccagaagagccgcctacgaggacagcgccctgcccagcatcaacgccctgctgcaggccgaggtgctgagcagacagatcaccgccccagtgtccggcatcaacggcgacatccgggccaagaagatcgccagcattgccgacgtgtgcgagagcatgaaggaacagctgctggtgctggtggaatgggccaagtacatccccgccttttgcgagctgcccctggacgatcaggtggccctgctgagagcacacgccggcgaacatctgctgctgggagccaccaagcggagcatggtgttcaaggacgtgctgctgctgggcaacgactacatcgtgcccagacactgccctgagctggccgagatgagccgggtgtccatcagaatcctggacgaactggtgctgccgtttcaggaactgcagatcgacgacaacgagtacgcctacctgaaggccatcatctttttcgaccccgacgccaagggcctgagcgaccctggcaagatcaagcggctgagagcccaggtgcaagtgtccctggaagattacatcaacgaccggcagtacgacagccggggcagatttggcgaactgctcctgctgctgcccaccctgcagagcatcacctggcagatgatcgagcagatccagttcatcaagctgttcggcatggccaagatcgacaatctgctgcaggaaatgctgctctgaggactagtccctgttcccagagcccacttttttttctttttttgaaataaaatagcctgtctttcagatctaaaaaaaaaaaaaaaaaaaaaaaaaaaaaaaaaaaaaaaaaaaaaaaaaaaaaaaaaaaaaaaaaaaaaaaaaaaaaaaaaaaaaaaaaaaaaaaaaaaa

SEQ ID NO: 5105 - RNA, 1376 nt, synthetic construct
  misc_feature 1..1376: note = mRNA a-1 (A100) (opt29) from Homo sapiens__NP_000448.3__HNF4A(1-375)(K106R_K108R_K126R_K127R_ S142A_S143A_S148A_S167A_S313A_S378A_T429A_T432A_S436A_K458R )
  source 1..1376: mol_type = other RNA
aggagagtcccgcagtcggcgtccagcggctctgcttgttcgtgtgtgtgtcgttgcaggccttattcaagcttaccatgagactgagcaagaccctggtggacatggacatggccgactactctgccgccctggaccctgcctacaccaccctggagttcgaaaacgtgcaagtgctgaccatgggcaacgacaccagccctagcgagggcaccaacctgaacgcccctaatagcctgggagtgtccgccctgtgtgccatctgtggcgatagagccaccggcaagcactacggcgccagctcttgtgatggctgcaagggcttcttccggcggagcgtgcggaagaaccacatgtacagctgccggttcagccggcagtgcgtggtggaccgggatagacggaaccagtgccggtactgcagactgaagaagtgcttcagagccggcatgcggagagaagccgtgcagaacgagcgggaccggatcagcaccagaagagccgcctacgaggacagcgccctgcccagcatcaacgccctgctgcaggccgaggtgctgagcagacagatcaccgccccagtgtccggcatcaacggcgacatccgggccaagaagatcgccagcattgccgacgtgtgcgagagcatgaaggaacagctgctggtgctggtggaatgggccaagtacatccccgccttttgcgagctgcccctggacgatcaggtggccctgctgagagcacacgccggcgaacatctgctgctgggagccaccaagcggagcatggtgttcaaggacgtgctgctgctgggcaacgactacatcgtgcccagacactgccctgagctggccgagatgagccgggtgtccatcagaatcctggacgaactggtgctgccgtttcaggaactgcagatcgacgacaacgagtacgcctacctgaaggccatcatctttttcgaccccgacgccaagggcctgagcgaccctggcaagatcaagcggctgagagcccaggtgcaagtgtccctggaagattacatcaacgaccggcagtacgacagccggggcagatttggcgaactgctcctgctgctgcccaccctgcagagcatcacctggcagatgatcgagcagatccagttcatcaagctgttcggcatggccaagatcgacaatctgctgcaggaaatgctgctctgaggactagtccctgttcccagagcccacttttttttctttttttgaaataaaatagcctgtctttcagatctaaaaaaaaaaaaaaaaaaaaaaaaaaaaaaaaaaaaaaaaaaaaaaaaaaaaaaaaaaaaaaaaaaaaaaaaaaaaaaaaaaaaaaaaaaaaaaaaaaaa

SEQ ID NO: 5106 - RNA, 1376 nt, synthetic construct
  misc_feature 1..1376: note = mRNA a-1 (A100) (opt29) from Homo sapiens__NP_000448.3__HNF4A(1-375)(S142A_S143A_S148A_T166A_ S167A_S313A_S378A_T429A_T432A_S436A_K458R)
  source 1..1376: mol_type = other RNA
aggagagtcccgcagtcggcgtccagcggctctgcttgttcgtgtgtgtgtcgttgcaggccttattcaagcttaccatgagactgagcaagaccctggtggacatggacatggccgactactctgccgccctggaccctgcctacaccaccctggagttcgaaaacgtgcaagtgctgaccatgggcaacgacaccagccctagcgagggcaccaacctgaacgcccctaatagcctgggagtgtccgccctgtgtgccatctgtggcgatagagccaccggcaagcactacggcgccagctcttgtgatggctgcaagggcttcttccggcggagcgtgcggaagaaccacatgtacagctgccggttcagccggcagtgcgtggtggacaaggataagcggaaccagtgccggtactgcagactgaagaagtgcttcagagccggcatgaagaaagaagccgtgcagaacgagcgggaccggatcagcaccagaagagccgcctacgaggacagcgccctgcccagcatcaacgccctgctgcaggccgaggtgctgagcagacagatcgccgccccagtgtccggcatcaacggcgacatccgggccaagaagatcgccagcattgccgacgtgtgcgagagcatgaaggaacagctgctggtgctggtggaatgggccaagtacatccccgccttttgcgagctgcccctggacgatcaggtggccctgctgagagcacacgccggcgaacatctgctgctgggagccaccaagcggagcatggtgttcaaggacgtgctgctgctgggcaacgactacatcgtgcccagacactgccctgagctggccgagatgagccgggtgtccatcagaatcctggacgaactggtgctgccgtttcaggaactgcagatcgacgacaacgagtacgcctacctgaaggccatcatctttttcgaccccgacgccaagggcctgagcgaccctggcaagatcaagcggctgagagcccaggtgcaagtgtccctggaagattacatcaacgaccggcagtacgacagccggggcagatttggcgaactgctcctgctgctgcccaccctgcagagcatcacctggcagatgatcgagcagatccagttcatcaagctgttcggcatggccaagatcgacaatctgctgcaggaaatgctgctctgaggactagtccctgttcccagagcccacttttttttctttttttgaaataaaatagcctgtctttcagatctaaaaaaaaaaaaaaaaaaaaaaaaaaaaaaaaaaaaaaaaaaaaaaaaaaaaaaaaaaaaaaaaaaaaaaaaaaaaaaaaaaaaaaaaaaaaaaaaaaaa

SEQ ID NO: 5107 - RNA, 1376 nt, synthetic construct
  misc_feature 1..1376: note = mRNA a-1 (A100) (opt29) from Homo sapiens__NP_000448.3__HNF4A(1-375)(S87A_S142A_S143A_S148A_T 166A_S167A_S313A_S378A_T429A_T432A_S436A_K458R)
  source 1..1376: mol_type = other RNA
aggagagtcccgcagtcggcgtccagcggctctgcttgttcgtgtgtgtgtcgttgcaggccttattcaagcttaccatgagactgagcaagaccctggtggacatggacatggccgactactctgccgccctggaccctgcctacaccaccctggagttcgaaaacgtgcaagtgctgaccatgggcaacgacaccagccctagcgagggcaccaacctgaacgcccctaatagcctgggagtgtccgccctgtgtgccatctgtggcgatagagccaccggcaagcactacggcgccagctcttgtgatggctgcaagggcttcttccggcgggccgtgcggaagaaccacatgtacagctgccggttcagccggcagtgcgtggtggacaaggataagcggaaccagtgccggtactgcagactgaagaagtgcttcagagccggcatgaagaaagaagccgtgcagaacgagcgggaccggatcagcaccagaagagccgcctacgaggacagcgccctgcccagcatcaacgccctgctgcaggccgaggtgctgagcagacagatcgccgccccagtgtccggcatcaacggcgacatccgggccaagaagatcgccagcattgccgacgtgtgcgagagcatgaaggaacagctgctggtgctggtggaatgggccaagtacatccccgccttttgcgagctgcccctggacgatcaggtggccctgctgagagcacacgccggcgaacatctgctgctgggagccaccaagcggagcatggtgttcaaggacgtgctgctgctgggcaacgactacatcgtgcccagacactgccctgagctggccgagatgagccgggtgtccatcagaatcctggacgaactggtgctgccgtttcaggaactgcagatcgacgacaacgagtacgcctacctgaaggccatcatctttttcgaccccgacgccaagggcctgagcgaccctggcaagatcaagcggctgagagcccaggtgcaagtgtccctggaagattacatcaacgaccggcagtacgacagccggggcagatttggcgaactgctcctgctgctgcccaccctgcagagcatcacctggcagatgatcgagcagatccagttcatcaagctgttcggcatggccaagatcgacaatctgctgcaggaaatgctgctctgaggactagtccctgttcccagagcccacttttttttctttttttgaaataaaatagcctgtctttcagatctaaaaaaaaaaaaaaaaaaaaaaaaaaaaaaaaaaaaaaaaaaaaaaaaaaaaaaaaaaaaaaaaaaaaaaaaaaaaaaaaaaaaaaaaaaaaaaaaaaaa

SEQ ID NO: 5108 - RNA, 1376 nt, synthetic construct
  misc_feature 1..1376: note = mRNA a-1 (A100) (opt29) from Homo sapiens__NP_000448.3__HNF4A(1-375)(S87A_K106R_K108R_K126R_K 127R_S142A_S143A_S148A_T166A_S167A_S313A_S378A_T429A_T432A_ S436A_K458R)
  source 1..1376: mol_type = other RNA
aggagagtcccgcagtcggcgtccagcggctctgcttgttcgtgtgtgtgtcgttgcaggccttattcaagcttaccatgagactgagcaagaccctggtggacatggacatggccgactactctgccgccctggaccctgcctacaccaccctggagttcgaaaacgtgcaagtgctgaccatgggcaacgacaccagccctagcgagggcaccaacctgaacgcccctaatagcctgggagtgtccgccctgtgtgccatctgtggcgatagagccaccggcaagcactacggcgccagctcttgtgatggctgcaagggcttcttccggcgggccgtgcggaagaaccacatgtacagctgccggttcagccggcagtgcgtggtggaccgggatagacggaaccagtgccggtactgcagactgaagaagtgcttcagagccggcatgcggagagaagccgtgcagaacgagcgggaccggatcagcaccagaagagccgcctacgaggacagcgccctgcccagcatcaacgccctgctgcaggccgaggtgctgagcagacagatcgccgccccagtgtccggcatcaacggcgacatccgggccaagaagatcgccagcattgccgacgtgtgcgagagcatgaaggaacagctgctggtgctggtggaatgggccaagtacatccccgccttttgcgagctgcccctggacgatcaggtggccctgctgagagcacacgccggcgaacatctgctgctgggagccaccaagcggagcatggtgttcaaggacgtgctgctgctgggcaacgactacatcgtgcccagacactgccctgagctggccgagatgagccgggtgtccatcagaatcctggacgaactggtgctgccgtttcaggaactgcagatcgacgacaacgagtacgcctacctgaaggccatcatctttttcgaccccgacgccaagggcctgagcgaccctggcaagatcaagcggctgagagcccaggtgcaagtgtccctggaagattacatcaacgaccggcagtacgacagccggggcagatttggcgaactgctcctgctgctgcccaccctgcagagcatcacctggcagatgatcgagcagatccagttcatcaagctgttcggcatggccaagatcgacaatctgctgcaggaaatgctgctctgaggactagtccctgttcccagagcccacttttttttctttttttgaaataaaatagcctgtctttcagatctaaaaaaaaaaaaaaaaaaaaaaaaaaaaaaaaaaaaaaaaaaaaaaaaaaaaaaaaaaaaaaaaaaaaaaaaaaaaaaaaaaaaaaaaaaaaaaaaaaaa

SEQ ID NO: 5109 - RNA, 1376 nt, synthetic construct
  misc_feature 1..1376: note = mRNA a-1 (A100) (opt29) from Homo sapiens__NP_000448.3__HNF4A(1-375)(S87A_K106R_K108R_K126R_K 127R)
  source 1..1376: mol_type = other RNA
aggagagtcccgcagtcggcgtccagcggctctgcttgttcgtgtgtgtgtcgttgcaggccttattcaagcttaccatgagactgagcaagaccctggtggacatggacatggccgactactctgccgccctggaccctgcctacaccaccctggagttcgaaaacgtgcaagtgctgaccatgggcaacgacaccagccctagcgagggcaccaacctgaacgcccctaatagcctgggagtgtccgccctgtgtgccatctgtggcgatagagccaccggcaagcactacggcgccagctcttgtgatggctgcaagggcttcttccggcgggccgtgcggaagaaccacatgtacagctgccggttcagccggcagtgcgtggtggaccgggatagacggaaccagtgccggtactgcagactgaagaagtgcttcagagccggcatgcggagagaagccgtgcagaacgagcgggaccggatcagcaccagaagaagcagctacgaggacagcagcctgcccagcatcaacgccctgctgcaggccgaggtgctgagcagacagatcaccagcccagtgtccggcatcaacggcgacatccgggccaagaagatcgccagcattgccgacgtgtgcgagagcatgaaggaacagctgctggtgctggtggaatgggccaagtacatccccgccttttgcgagctgcccctggacgatcaggtggccctgctgagagcacacgccggcgaacatctgctgctgggagccaccaagcggagcatggtgttcaaggacgtgctgctgctgggcaacgactacatcgtgcccagacactgccctgagctggccgagatgagccgggtgtccatcagaatcctggacgaactggtgctgccgtttcaggaactgcagatcgacgacaacgagtacgcctacctgaaggccatcatctttttcgaccccgacgccaagggcctgagcgaccctggcaagatcaagcggctgagaagccaggtgcaagtgtccctggaagattacatcaacgaccggcagtacgacagccggggcagatttggcgaactgctcctgctgctgcccaccctgcagagcatcacctggcagatgatcgagcagatccagttcatcaagctgttcggcatggccaagatcgacaatctgctgcaggaaatgctgctctgaggactagtccctgttcccagagcccacttttttttctttttttgaaataaaatagcctgtctttcagatctaaaaaaaaaaaaaaaaaaaaaaaaaaaaaaaaaaaaaaaaaaaaaaaaaaaaaaaaaaaaaaaaaaaaaaaaaaaaaaaaaaaaaaaaaaaaaaaaaaaa

SEQ ID NO: 5110 - RNA, 1376 nt, synthetic construct; identical to SEQ ID NO: 5108
  misc_feature 1..1376: note = mRNA a-1 (A100) (opt29) from Homo sapiens__NP_000448.3__HNF4A(1-375)(S87A_K106R_K108R_K126R_K 127R_S142A_S143A_S148A_T166A_S167A_S313A_S378A_T429A_T432A_ S436A_K458R_S461A)
  source 1..1376: mol_type = other RNA

SEQ ID NO: 5111 - RNA, 1376 nt, synthetic construct; identical to SEQ ID NO: 5108
  misc_feature 1..1376: note = mRNA a-1 (A100) (opt29) from Homo sapiens__NP_000448.3__HNF4A(1-375)(S87A_K106R_K108R_K126R_K 127R_S142A_S143A_S148A_T166A_S167A_S313A_S378A_T429A_T432A_ S436A_K458R_S461E)
  source 1..1376: mol_type = other RNA

SEQ ID NO: 5112 - RNA, 1376 nt, synthetic construct
  misc_feature 1..1376: note = mRNA a-1 (A100) (opt29) from Homo sapiens__NP_000448.3__HNF4A(1-375)(S87A_K106R_K108R_K126R_K 127R_S142A_S143A_S148E_T166A_S167E_S313A_S378E_T429E_T432E_ S436E_K458R_S461E)
  source 1..1376: mol_type = other RNA
aggagagtcccgcagtcggcgtccagcggctctgcttgttcgtgtgtgtgtcgttgcaggccttattcaagcttaccatgagactgagcaagaccctggtggacatggacatggccgactactctgccgccctggaccctgcctacaccaccctggagttcgaaaacgtgcaagtgctgaccatgggcaacgacaccagccctagcgagggcaccaacctgaacgcccctaatagcctgggagtgtccgccctgtgtgccatctgtggcgatagagccaccggcaagcactacggcgccagctcttgtgatggctgcaagggcttcttccggcgggccgtgcggaagaaccacatgtacagctgccggttcagccggcagtgcgtggtggaccgggatagacggaaccagtgccggtactgcagactgaagaagtgcttcagagccggcatgcggagagaagccgtgcagaacgagcgggaccggatcagcaccagaagagccgcctacgaggacagcgaactgcccagcatcaacgccctgctgcaggccgaggtgctgagcagacagatcgccgaaccagtgtccggcatcaacggcgacatccgggccaagaagatcgccagcattgccgacgtgtgcgagagcatgaaggaacagctgctggtgctggtggaatgggccaagtacatccccgccttttgcgagctgcccctggacgatcaggtggccctgctgagagcacacgccggcgaacatctgctgctgggagccaccaagcggagcatggtgttcaaggacgtgctgctgctgggcaacgactacatcgtgcccagacactgccctgagctggccgagatgagccgggtgtccatcagaatcctggacgaactggtgctgccgtttcaggaactgcagatcgacgacaacgagtacgcctacctgaaggccatcatctttttcgaccccgacgccaagggcctgagcgaccctggcaagatcaagcggctgagagcccaggtgcaagtgtccctggaagattacatcaacgaccggcagtacgacagccggggcagatttggcgaactgctcctgctgctgcccaccctgcagagcatcacctggcagatgatcgagcagatccagttcatcaagctgttcggcatggccaagatcgacaatctgctgcaggaaatgctgctctgaggactagtccctgttcccagagcccacttttttttctttttttgaaataaaatagcctgtctttcagatctaaaaaaaaaaaaaaaaaaaaaaaaaaaaaaaaaaaaaaaaaaaaaaaaaaaaaaaaaaaaaaaaaaaaaaaaaaaaaaaaaaaaaaaaaaaaaaaaaaaa

SEQ ID NO: 5113 - RNA, 1376 nt, synthetic construct
  misc_feature 1..1376: note = mRNA a-1 (A100) (opt29) from Homo sapiens__NP_000448.3__HNF4A(1-375)(S87A_K106R_K108R_K126R_K 127R_S142A_S143A_S148A_T166A_S167A_K179R_K180R_S313A_S378A_ T429A_T432A_S436A_K458R_S461E)
  source 1..1376: mol_type = other RNA
aggagagtcccgcagtcggcgtccagcggctctgcttgttcgtgtgtgtgtcgttgcaggccttattcaagcttaccatgagactgagcaagaccctggtggacatggacatggccgactactctgccgccctggaccctgcctacaccaccctggagttcgaaaacgtgcaagtgctgaccatgggcaacgacaccagccctagcgagggcaccaacctgaacgcccctaatagcctgggagtgtccgccctgtgtgccatctgtggcgatagagccaccggcaagcactacggcgccagctcttgtgatggctgcaagggcttcttccggcgggccgtgcggaagaaccacatgtacagctgccggttcagccggcagtgcgtggtggaccgggatagacggaaccagtgccggtactgcagactgaagaagtgcttcagagccggcatgcggagagaagccgtgcagaacgagcgggaccggatcagcaccagaagagccgcctacgaggacagcgccctgcccagcatcaacgccctgctgcaggccgaggtgctgagcagacagatcgccgccccagtgtccggcatcaacggcgacatccgggcccggagaatcgccagcattgccgacgtgtgcgagagcatgaaggaacagctgctggtgctggtggaatgggccaagtacatccccgccttttgcgagctgcccctggacgatcaggtggccctgctgagagcacacgccggcgaacatctgctgctgggagccaccaagcggagcatggtgttcaaggacgtgctgctgctgggcaacgactacatcgtgcccagacactgccctgagctggccgagatgagccgggtgtccatcagaatcctggacgaactggtgctgccgtttcaggaactgcagatcgacgacaacgagtacgcctacctgaaggccatcatctttttcgaccccgacgccaagggcctgagcgaccctggcaagatcaagcggctgagagcccaggtgcaagtgtccctggaagattacatcaacgaccggcagtacgacagccggggcagatttggcgaactgctcctgctgctgcccaccctgcagagcatcacctggcagatgatcgagcagatccagttcatcaagctgttcggcatggccaagatcgacaatctgctgcaggaaatgctgctctgaggactagtccctgttcccagagcccacttttttttctttttttgaaataaaatagcctgtctttcagatctaaaaaaaaaaaaaaaaaaaaaaaaaaaaaaaaaaaaaaaaaaaaaaaaaaaaaaaaaaaaaaaaaaaaaaaaaaaaaaaaaaaaaaaaaaaaaaaaaaaa

SEQ ID NO: 5114 - RNA, 1376 nt, synthetic construct
  misc_feature 1..1376: note = mRNA a-1 (A100) (opt29) from Homo sapiens__NP_000448.3__HNF4A(1-375)(S87A_K106R_K108R_K126R_K 127R_S142A_S143A_S148A_T166A_S167A_K300R_K307R_K309R_S313A_ S378A_T429A_T432A_S436A_K458R_S461E)
  source 1..1376: mol_type = other RNA
aggagagtcccgcagtcggcgtccagcggctctgcttgttcgtgtgtgtgtcgttgcaggccttattcaagcttaccatgagactgagcaagaccctggtggacatggacatggccgactactctgccgccctggaccctgcctacaccaccctggagttcgaaaacgtgcaagtgctgaccatgggcaacgacaccagccctagcgagggcaccaacctgaacgcccctaatagcctgggagtgtccgccctgtgtgccatctgtggcgatagagccaccggcaagcactacggcgccagctcttgtgatggctgcaagggcttcttccggcgggccgtgcggaagaaccacatgtacagctgccggttcagccggcagtgcgtggtggaccgggatagacggaaccagtgccggtactgcagactgaagaagtgcttcagagccggcatgcggagagaagccgtgcagaacgagcgggaccggatcagcaccagaagagccgcctacgaggacagcgccctgcccagcatcaacgccctgctgcaggccgaggtgctgagcagacagatcgccgccccagtgtccggcatcaacggcgacatccgggccaagaagatcgccagcattgccgacgtgtgcgagagcatgaaggaacagctgctggtgctggtggaatgggccaagtacatccccgccttttgcgagctgcccctggacgatcaggtggccctgctgagagcacacgccggcgaacatctgctgctgggagccaccaagcggagcatggtgttcaaggacgtgctgctgctgggcaacgactacatcgtgcccagacactgccctgagctggccgagatgagccgggtgtccatcagaatcctggacgaactggtgctgccgtttcaggaactgcagatcgacgacaacgagtacgcctacctgaaggccatcatctttttcgaccccgacgccagaggcctgagcgaccctggccggatcagacggctgagagcccaggtgcaagtgtccctggaagattacatcaacgaccggcagtacgacagccggggcagatttggcgaactgctcctgctgctgcccaccctgcagagcatcacctggcagatgatcgagcagatccagttcatcaagctgttcggcatggccaagatcgacaatctgctgcaggaaatgctgctctgaggactagtccctgttcccagagcccacttttttttctttttttgaaataaaatagcctgtctttcagatctaaaaaaaaaaaaaaaaaaaaaaaaaaaaaaaaaaaaaaaaaaaaaaaaaaaaaaaaaaaaaaaaaaaaaaaaaaaaaaaaaaaaaaaaaaaaaaaaaaaa

SEQ ID NO: 5115 - RNA, 1376 nt, synthetic construct; identical to SEQ ID NO: 5108
  misc_feature 1..1376: note = mRNA a-1 (A100) (opt29) from Homo sapiens__NP_000448.3__HNF4A(1-375)(S87A_K106R_K108R_K126R_K 127R_S142A_S143A_S148A_T166A_S167A_S313A_S378A_T429A_T432A_ S436A_K447R_K458R_S461E_K470R)
  source 1..1376: mol_type = other RNA

SEQ ID NO: 5116 - RNA, 1376 nt, synthetic construct
  misc_feature 1..1376: note = mRNA a-1 (A100) (opt29) from Homo sapiens__NP_000448.3__HNF4A(1-375)(S87A_K106R_K108R_K126R_K 127R_S142A_S143A_S148A_T166A_S167A_K179R_K180R_K234R_K300R_ K307R_K309R_S313A_S378A_T429A_T432A_S436A_K447R_K458R_S461E _K470R)
  source 1..1376: mol_type = other RNA
aggagagtcccgcagtcggcgtccagcggctctgcttgttcgtgtgtgtgtcgttgcaggccttattcaagcttaccatgagactgagcaagaccctggtggacatggacatggccgactactctgccgccctggaccctgcctacaccaccctggagttcgaaaacgtgcaagtgctgaccatgggcaacgacaccagccctagcgagggcaccaacctgaacgcccctaatagcctgggagtgtccgccctgtgtgccatctgtggcgatagagccaccggcaagcactacggcgccagctcttgtgatggctgcaagggcttcttccggcgggccgtgcggaagaaccacatgtacagctgccggttcagccggcagtgcgtggtggaccgggatagacggaaccagtgccggtactgcagactgaagaagtgcttcagagccggcatgcggagagaagccgtgcagaacgagcgggaccggatcagcaccagaagagccgcctacgaggacagcgccctgcccagcatcaacgccctgctgcaggccgaggtgctgagcagacagatcgccgccccagtgtccggcatcaacggcgacatccgggcccggagaatcgccagcattgccgacgtgtgcgagagcatgaaggaacagctgctggtgctggtggaatgggccaagtacatccccgccttttgcgagctgcccctggacgatcaggtggccctgctgagagcacacgccggcgaacatctgctgctgggagccacccggcggagcatggtgttcaaggacgtgctgctgctgggcaacgactacatcgtgcccagacactgccctgagctggccgagatgagccgggtgtccatcagaatcctggacgaactggtgctgccgtttcaggaactgcagatcgacgacaacgagtacgcctacctgaaggccatcatctttttcgaccccgacgccagaggcctgagcgaccctggccggatcagacggctgagagcccaggtgcaagtgtccctggaagattacatcaacgaccggcagtacgacagccggggcagatttggcgaactgctcctgctgctgcccaccctgcagagcatcacctggcagatgatcgagcagatccagttcatcaagctgttcggcatggccaagatcgacaatctgctgcaggaaatgctgctctgaggactagtccctgttcccagagcccacttttttttctttttttgaaataaaatagcctgtctttcagatctaaaaaaaaaaaaaaaaaaaaaaaaaaaaaaaaaaaaaaaaaaaaaaaaaaaaaaaaaaaaaaaaaaaaaaaaaaaaaaaaaaaaaaaaaaaaaaaaaaaa

SEQ ID NO: 5117 - RNA, 1376 nt, synthetic construct
  misc_feature 1..1376: note = mRNA a-1 (A100) (opt29) from Homo sapiens__NP_000448.3__HNF4A(1-375)(S87A_S95A_S99A_K106R_K10 8R_K126R_K127R_S142A_S143A_S148A_T166A_S167A_S313A_S378A_T4 29A_T432A_S436A_K458R_S461E)
  source 1..1376: mol_type = other RNA
aggagagtcccgcagtcggcgtccagcggctctgcttgttcgtgtgtgtgtcgttgcaggccttattcaagcttaccatgagactgagcaagaccctggtggacatggacatggccgactactctgccgccctggaccctgcctacaccaccctggagttcgaaaacgtgcaagtgctgaccatgggcaacgacaccagccctagcgagggcaccaacctgaacgcccctaatagcctgggagtgtccgccctgtgtgccatctgtggcgatagagccaccggcaagcactacggcgccagctcttgtgatggctgcaagggcttcttccggcgggccgtgcggaagaaccacatgtacgcctgccggttcgcccggcagtgcgtggtggaccgggatagacggaaccagtgccggtactgcagactgaagaagtgcttcagagccggcatgcggagagaagccgtgcagaacgagcgggaccggatcagcaccagaagagccgcctacgaggacagcgccctgcccagcatcaacgccctgctgcaggccgaggtgctgagcagacagatcgccgccccagtgtccggcatcaacggcgacatccgggccaagaagatcgccagcattgccgacgtgtgcgagagcatgaaggaacagctgctggtgctggtggaatgggccaagtacatccccgccttttgcgagctgcccctggacgatcaggtggccctgctgagagcacacgccggcgaacatctgctgctgggagccaccaagcggagcatggtgttcaaggacgtgctgctgctgggcaacgactacatcgtgcccagacactgccctgagctggccgagatgagccgggtgtccatcagaatcctggacgaactggtgctgccgtttcaggaactgcagatcgacgacaacgagtacgcctacctgaaggccatcatctttttcgaccccgacgccaagggcctgagcgaccctggcaagatcaagcggctgagagcccaggtgcaagtgtccctggaagattacatcaacgaccggcagtacgacagccggggcagatttggcgaactgctcctgctgctgcccaccctgcagagcatcacctggcagatgatcgagcagatccagttcatcaagctgttcggcatggccaagatcgacaatctgctgcaggaaatgctgctctgaggactagtccctgttcccagagcccacttttttttctttttttgaaataaaatagcctgtctttcagatctaaaaaaaaaaaaaaaaaaaaaaaaaaaaaaaaaaaaaaaaaaaaaaaaaaaaaaaaaaaaaaaaaaaaaaaaaaaaaaaaaaaaaaaaaaaaaaaaaaaa

SEQ ID NO: 5118 - RNA, 1376 nt, synthetic construct
  misc_feature 1..1376: note = mRNA a-1 (A100) (opt29) from Homo sapiens__NP_000448.3__HNF4A(1-375)(S87A_K106R_K108R_K126R_K 127R_S138A_T139A_S142A_S143A_S148A_T166A_S167A_S313A_S378A_ T429A_T432A_S436A_K458R_S461E)
  source 1..1376: mol_type = other RNA
aggagagtcccgcagtcggcgtccagcggctctgcttgttcgtgtgtgtgtcgttgcaggccttattcaagcttaccatgagactgagcaagaccctggtggacatggacatggccgactactctgccgccctggaccctgcctacaccaccctggagttcgaaaacgtgcaagtgctgaccatgggcaacgacaccagccctagcgagggcaccaacctgaacgcccctaatagcctgggagtgtccgccctgtgtgccatctgtggcgatagagccaccggcaagcactacggcgccagctcttgtgatggctgcaagggcttcttccggcgggccgtgcggaagaaccacatgtacagctgccggttcagccggcagtgcgtggtggaccgggatagacggaaccagtgccggtactgcagactgaagaagtgcttcagagccggcatgcggagagaagccgtgcagaacgagcgggaccggatcgccgccagaagagccgcctacgaggacagcgccctgcccagcatcaacgccctgctgcaggccgaggtgctgagcagacagatcgccgccccagtgtccggcatcaacggcgacatccgggccaagaagatcgccagcattgccgacgtgtgcgagagcatgaaggaacagctgctggtgctggtggaatgggccaagtacatccccgccttttgcgagctgcccctggacgatcaggtggccctgctgagagcacacgccggcgaacatctgctgctgggagccaccaagcggagcatggtgttcaaggacgtgctgctgctgggcaacgactacatcgtgcccagacactgccctgagctggccgagatgagccgggtgtccatcagaatcctggacgaactggtgctgccgtttcaggaactgcagatcgacgacaacgagtacgcctacctgaaggccatcatctttttcgaccccgacgccaagggcctgagcgaccctggcaagatcaagcggctgagagcccaggtgcaagtgtccctggaagattacatcaacgaccggcagtacgacagccggggcagatttggcgaactgctcctgctgctgcccaccctgcagagcatcacctggcagatgatcgagcagatccagttcatcaagctgttcggcatggccaagatcgacaatctgctgcaggaaatgctgctctgaggactagtccctgttcccagagcccacttttttttctttttttgaaataaaatagcctgtctttcagatctaaaaaaaaaaaaaaaaaaaaaaaaaaaaaaaaaaaaaaaaaaaaaaaaaaaaaaaaaaaaaaaaaaaaaaaaaaaaaaaaaaaaaaaaaaaaaaaaaaaa

SEQ ID NO: 5119 - RNA, 1376 nt, synthetic construct
  misc_feature 1..1376: note = mRNA a-1 (A100) (opt29) from Homo sapiens__NP_000448.3__HNF4A(1-375)(S87A_S95A_S99A_K106R_K10 8R_K126R_K127R_S138A_T139A_S142A_S143A_S148A_T166A_S167A_S3 13A_S378A_T429A_T432A_S436A_K458R_S461E)
  source 1..1376: mol_type = other RNA
aggagagtcccgcagtcggcgtccagcggctctgcttgttcgtgtgtgtgtcgttgcaggccttattcaagcttaccatgagactgagcaagaccctggtggacatggacatggccgactactctgccgccctggaccctgcctacaccaccctggagttcgaaaacgtgcaagtgctgaccatgggcaacgacaccagccctagcgagggcaccaacctgaacgcccctaatagcctgggagtgtccgccctgtgtgccatctgtggcgatagagccaccggcaagcactacggcgccagctcttgtgatggctgcaagggcttcttccggcgggccgtgcggaagaaccacatgtacgcctgccggttcgcccggcagtgcgtggtggaccgggatagacggaaccagtgccggtactgcagactgaagaagtgcttcagagccggcatgcggagagaagccgtgcagaacgagcgggaccggatcgccgccagaagagccgcctacgaggacagcgccctgcccagcatcaacgccctgctgcaggccgaggtgctgagcagacagatcgccgccccagtgtccggcatcaacggcgacatccgggccaagaagatcgccagcattgccgacgtgtgcgagagcatgaaggaacagctgctggtgctggtggaatgggccaagtacatccccgccttttgcgagctgcccctggacgatcaggtggccctgctgagagcacacgccggcgaacatctgctgctgggagccaccaagcggagcatggtgttcaaggacgtgctgctgctgggcaacgactacatcgtgcccagacactgccctgagctggccgagatgagccgggtgtccatcagaatcctggacgaactggtgctgccgtttcaggaactgcagatcgacgacaacgagtacgcctacctgaaggccatcatctttttcgaccccgacgccaagggcctgagcgaccctggcaagatcaagcggctgagagcccaggtgcaagtgtccctggaagattacatcaacgaccggcagtacgacagccggggcagatttggcgaactgctcctgctgctgcccaccctgcagagcatcacctggcagatgatcgagcagatccagttcatcaagctgttcggcatggccaagatcgacaatctgctgcaggaaatgctgctctgaggactagtccctgttcccagagcccacttttttttctttttttgaaataaaatagcctgtctttcagatctaaaaaaaaaaaaaaaaaaaaaaaaaaaaaaaaaaaaaaaaaaaaaaaaaaaaaaaaaaaaaaaaaaaaaaaaaaaaaaaaaaaaaaaaaaaaaaaaaaaa

SEQ ID NO: 5120 - RNA, 1562 nt, synthetic construct
  misc_feature 1..1562: note = mRNA a-1 (A100) (wt) from Homo sapiens__NP_000448.3__HNF4A(39-474)
  source 1..1562: mol_type = other RNA
aggagagtcccgcagtcggcgtccagcggctctgcttgttcgtgtgtgtgtcgttgcaggccttattcaagcttaccatggacacgtccccatcagaaggcaccaacctcaacgcgcccaacagcctgggtgtcagcgccctgtgtgccatctgcggggaccgggccacgggcaaacactacggtgcctcgagctgtgacggctgcaagggcttcttccggaggagcgtgcggaagaaccacatgtactcctgcagatttagccggcagtgcgtggtggacaaagacaagaggaaccagtgccgctactgcaggctcaagaaatgcttccgggctggcatgaagaaggaagccgtccagaatgagcgggaccggatcagcactcgaaggtcaagctatgaggacagcagcctgccctccatcaatgcgctcctgcaggcggaggtcctgtcccgacagatcacctcccccgtctccgggatcaacggcgacattcgggcgaagaagattgccagcatcgcagatgtgtgtgagtccatgaaggagcagctgctggttctcgttgagtgggccaagtacatcccagctttctgcgagctccccctggacgaccaggtggccctgctcagagcccatgctggcgagcacctgctgctcggagccaccaagagatccatggtgttcaaggacgtgctgctcctaggcaatgactacattgtccctcggcactgcccggagctggcggagatgagccgggtgtccatacgcatccttgacgagctggtgctgcccttccaggagctgcagatcgatgacaatgagtatgcctacctcaaagccatcatcttctttgacccagatgccaaggggctgagcgatccagggaagatcaagcggctgcgttcccaggtgcaggtgagcttggaggactacatcaacgaccgccagtatgactcgcgtggccgctttggagagctgctgctgctgctgcccaccttgcagagcatcacctggcagatgatcgagcagatccagttcatcaagctcttcggcatggccaagattgacaacctgttgcaggagatgctgctgggagggtcccccagcgatgcaccccatgcccaccaccccctgcaccctcacctgatgcaggaacatatgggaaccaacgtcatcgttgccaacacaatgcccactcacctcagcaacggacagatgtgtgagtggccccgacccaggggacaggcagccacccctgagaccccacagccctcaccgccaggtggctcagggtctgagccctataagctcctgccgggagccgtcgccacaatcgtcaagcccctctctgccatcccccagccgaccatcaccaagcaggaagttatctagggactagtccctgttcccagagcccacttttttttctttttttgaaataaaatagcctgtctttcagatctaaaaaaaaaaaaaaaaaaaaaaaaaaaaaaaaaaaaaaaaaaaaaaaaaaaaaaaaaaaaaaaaaaaaaaaaaaaaaaaaaaaaaaaaaaaaaaaaaaaa

SEQ ID NO: 5121 - RNA, 1562 nt, synthetic construct
  misc_feature 1..1562: note = mRNA a-1 (A100) (wt mod) from Homo sapiens__NP_000448.3__HNF4A(39-474)
  source 1..1562: mol_type = other RNA
aggagagtcccgcagtcggcgtccagcggctctgcttgttcgtgtgtgtgtcgttgcaggccttattcaagcttaccatggacacgtccccatcagaaggcaccaacctcaacgcgcccaacagcctgggtgtgagcgccctgtgtgccatctgcggggaccgggccacgggcaaacactacggtgcctcgagctgtgacggctgcaagggcttcttccggaggagcgtgcggaagaaccacatgtactcctgcagatttagccggcagtgcgtggtggacaaagacaagaggaaccagtgccgctactgcaggctcaagaaatgcttccgggctggcatgaagaaggaagccgtccagaatgagcgggaccggatcagcactcgaaggtcaagctatgaggacagcagcctgccctccatcaatgcgctcctgcaggcggaggtcctgtcccgacagatcacctcccccgtctccgggatcaacggcgacattcgggcgaagaagattgccagcatcgcagatgtgtgtgagtccatgaaggagcagctgctggttctcgttgagtgggccaagtacatcccagctttctgcgagctccccctggacgaccaggtggccctgctcagagcccatgctggcgagcacctcctgctcggagccaccaagagatccatggtgttcaaggacgtgctgctcctaggcaatgactacattgtccctcggcactgcccggagctggcggagatgagccgggtgtccatacgcatccttgacgagctggtgctgcccttccaggagctgcagatcgatgacaatgagtatgcctacctcaaagccatcatcttctttgacccagatgccaaggggctgagcgatccagggaagatcaagcggctgcgttcccaggtccaggtgagcttggaggactacatcaacgaccgccagtatgactcgcgtggccgctttggagagctgctgctgctgctgcccaccttgcagagcatcacctggcagatgatcgagcagatccagttcatcaagctgttcggcatggccaagattgacaacctgttgcaggagatgctgctgggagggtcccccagcgatgcaccccatgcccaccaccccctgcaccctcacctgatgcaggaacatatgggaaccaacgtgatcgttgccaacacaatgcccactcacctcagcaacggacagatgtgtgagtggccccgacccaggggacaggcagccacccctgagaccccacagccctcaccgccaggtggctcagggtctgagccctataagctcctgccgggagccgtcgccacaatcgtcaagcccctctctgccatcccccagccgaccatcaccaagcaggaagttatctgaggactagtccctgttcccagagcccacttttttttctttttttgaaataaaatagcctgtctttcagatctaaaaaaaaaaaaaaaaaaaaaaaaaaaaaaaaaaaaaaaaaaaaaaaaaaaaaaaaaaaaaaaaaaaaaaaaaaaaaaaaaaaaaaaaaaaaaaaaaaaa

SEQ ID NO: 5122 - RNA, 1562 nt, synthetic construct
  misc_feature 1..1562: note = mRNA a-1 (A100) (opt1) from Homo sapiens__NP_000448.3__HNF4A(39-474)
  source 1..1562: mol_type = other RNA
aggagagtcccgcagtcggcgtccagcggctctgcttgttcgtgtgtgtgtcgttgcaggccttattcaagcttaccatggacaccagcccgtccgaggggaccaacctgaacgcccccaacagcctgggcgtgtccgccctctgcgccatctgcggggaccgggcgacgggcaagcactacggggccagctcctgcgacggctgcaagggcttcttccgccggagcgtccgcaagaaccacatgtactcctgccggttcagccgccagtgcgtggtggacaaggacaagcggaaccagtgccgctactgccggctgaagaagtgcttccgcgccgggatgaagaaggaggccgtccagaacgagcgggaccgcatctccacccggcgcagctcctacgaggacagctccctgcccagcatcaacgcgctcctgcaggccgaggtgctgtcccggcagatcaccagccccgtgtccggcatcaacggggacatccgcgccaagaagatcgccagcatcgccgacgtctgcgagagcatgaaggagcagctcctggtgctggtggagtgggcgaagtacatcccggccttctgcgagctccccctggacgaccaggtcgccctgctccgggcccacgccggcgagcacctcctgctgggggcgaccaagcgctccatggtgttcaaggacgtgctgctgctcggcaacgactacatcgtcccccggcactgccccgagctggccgagatgagccgcgtgtccatccggatcctggacgagctcgtgctgccgttccaggagctgcagatcgacgacaacgagtacgcctacctcaaggccatcatcttcttcgaccccgacgccaagggcctgagcgaccccgggaagatcaagcgcctgcgctcccaggtccaggtgagcctcgaggactacatcaacgaccggcagtacgactcccgcggccggttcggggagctgctgctcctgctgcccacgctccagagcatcacctggcagatgatcgagcagatccagttcatcaagctgttcggcatggcgaagatcgacaacctgctccaggagatgctgctgggcgggtccccgagcgacgcgccccacgcccaccaccccctccacccccacctgatgcaggagcacatgggcaccaacgtgatcgtcgccaacaccatgccgacgcacctgtccaacgggcagatgtgcgagtggccccgcccccggggccaggccgccacccccgagaccccgcagcccagcccgcccgggggctccggcagcgagccctacaagctgctccccggggccgtggccaccatcgtgaagcccctgtccgccatcccccagccgacgatcaccaagcaggaggtcatctgaggactagtccctgttcccagagcccacttttttttctttttttgaaataaaatagcctgtctttcagatctaaaaaaaaaaaaaaaaaaaaaaaaaaaaaaaaaaaaaaaaaaaaaaaaaaaaaaaaaaaaaaaaaaaaaaaaaaaaaaaaaaaaaaaaaaaaaaaaaaaa

SEQ ID NO: 5123 - RNA, 1562 nt, synthetic construct
  misc_feature 1..1562: note = mRNA a-1 (A100) (opt1) from Homo sapiens__NP_000448.3__HNF4A(39-474)(S313A)
  source 1..1562: mol_type = other RNA
aggagagtcccgcagtcggcgtccagcggctctgcttgttcgtgtgtgtgtcgttgcaggccttattcaagcttaccatggacaccagcccgtccgaggggaccaacctgaacgcccccaacagcctgggcgtgtccgccctctgcgccatctgcggggaccgggcgacgggcaagcactacggggccagctcctgcgacggctgcaagggcttcttccgccggagcgtccgcaagaaccacatgtactcctgccggttcagccgccagtgcgtggtggacaaggacaagcggaaccagtgccgctactgccggctgaagaagtgcttccgcgccgggatgaagaaggaggccgtccagaacgagcgggaccgcatctccacccggcgcagctcctacgaggacagctccctgcccagcatcaacgcgctcctgcaggccgaggtgctgtcccggcagatcaccagccccgtgtccggcatcaacggggacatccgcgccaagaagatcgccagcatcgccgacgtctgcgagagcatgaaggagcagctcctggtgctggtggagtgggcgaagtacatcccggccttctgcgagctccccctggacgaccaggtcgccctgctccgggcccacgccggcgagcacctcctgctgggggcgaccaagcgctccatggtgttcaaggacgtgctgctgctcggcaacgactacatcgtcccccggcactgccccgagctggccgagatgagccgcgtgtccatccggatcctggacgagctcgtgctgccgttccaggagctgcagatcgacgacaacgagtacgcctacctcaaggccatcatcttcttcgaccccgacgccaagggcctgagcgaccccgggaagatcaagcgcctgcgcgcgcaggtccaggtgagcctcgaggactacatcaacgaccggcagtacgactcccgcggccggttcggggagctgctgctcctgctgcccacgctccagagcatcacctggcagatgatcgagcagatccagttcatcaagctgttcggcatggcgaagatcgacaacctgctccaggagatgctgctgggcgggtccccgagcgacgcgccccacgcccaccaccccctccacccccacctgatgcaggagcacatgggcaccaacgtgatcgtcgccaacaccatgccgacgcacctgtccaacgggcagatgtgcgagtggccccgcccccggggccaggccgccacccccgagaccccgcagcccagcccgcccgggggctccggcagcgagccctacaagctgctccccggggccgtggccaccatcgtgaagcccctgtccgccatcccccagccgacgatcaccaagcaggaggtcatctgaggactagtccctgttcccagagcccacttttttttctttttttgaaataaaatagcctgtctttcagatctaaaaaaaaaaaaaaaaaaaaaaaaaaaaaaaaaaaaaaaaaaaaaaaaaaaaaaaaaaaaaaaaaaaaaaaaaaaaaaaaaaaaaaaaaaaaaaaaaaaa

SEQ ID NO: 5124 - RNA, 1562 nt, synthetic construct
  misc_feature 1..1562: note = mRNA a-1 (A100) (opt1) from Homo sapiens__NP_000448.3__HNF4A(39-474)(S313E)
  source 1..1562: mol_type = other RNA
aggagagtcccgcagtcggcgtccagcggctctgcttgttcgtgtgtgtgtcgttgcaggccttattcaagcttaccatggacaccagcccgtccgaggggaccaacctgaacgcccccaacagcctgggcgtgtccgccctctgcgccatctgcggggaccgggcgacgggcaagcactacggggccagctcctgcgacggctgcaagggcttcttccgccggagcgtccgcaagaaccacatgtactcctgccggttcagccgccagtgcgtggtggacaaggacaagcggaaccagtgccgctactgccggctgaagaagtgcttccgcgccgggatgaagaaggaggccgtccagaacgagcgggaccgcatctccacccggcgcagctcctacgaggacagctccctgcccagcatcaacgcgctcctgcaggccgaggtgctgtcccggcagatcaccagccccgtgtccggcatcaacggggacatccgcgccaagaagatcgccagcatcgccgacgtctgcgagagcatgaaggagcagctcctggtgctggtggagtgggcgaagtacatcccggccttctgcgagctccccctggacgaccaggtcgccctgctccgggcccacgccggcgagcacctcctgctgggggcgaccaagcgctccatggtgttcaaggacgtgctgctgctcggcaacgactacatcgtcccccggcactgccccgagctggccgagatgagccgcgtgtccatccggatcctggacgagctcgtgctgccgttccaggagctgcagatcgacgacaacgagtacgcctacctcaaggccatcatcttcttcgaccccgacgccaagggcctgagcgaccccgggaagatcaagcgcctgcgcgagcaggtccaggtgagcctcgaggactacatcaacgaccggcagtacgactcccgcggccggttcggggagctgctgctcctgctgcccacgctccagagcatcacctggcagatgatcgagcagatccagttcatcaagctgttcggcatggcgaagatcgacaacctgctccaggagatgctgctgggcgggtccccgagcgacgcgccccacgcccaccaccccctccacccccacctgatgcaggagcacatgggcaccaacgtgatcgtcgccaacaccatgccgacgcacctgtccaacgggcagatgtgcgagtggccccgcccccggggccaggccgccacccccgagaccccgcagcccagcccgcccgggggctccggcagcgagccctacaagctgctccccggggccgtggccaccatcgtgaagcccctgtccgccatcccccagccgacgatcaccaagcaggaggtcatctgaggactagtccctgttcccagagcccacttttttttctttttttgaaataaaatagcctgtctttcagatctaaaaaaaaaaaaaaaaaaaaaaaaaaaaaaaaaaaaaaaaaaaaaaaaaaaaaaaaaaaaaaaaaaaaaaaaaaaaaaaaaaaaaaaaaaaaaaaaaaaa

SEQ ID NO: 5125 - RNA, 1562 nt, synthetic construct
  misc_feature 1..1562: note = mRNA a-1 (A100) (opt1) from Homo sapiens__NP_000448.3__HNF4A(39-474)(S142A_S143A)
  source 1..1562: mol_type = other RNA
aggagagtcccgcagtcggcgtccagcggctctgcttgttcgtgtgtgtgtcgttgcaggccttattcaagcttaccatggacaccagcccgtccgaggggaccaacctgaacgcccccaacagcctgggcgtgtccgccctctgcgccatctgcggggaccgggcgacgggcaagcactacggggccagctcctgcgacggctgcaagggcttcttccgccggagcgtccgcaagaaccacatgtactcctgccggttcagccgccagtgcgtggtggacaaggacaagcggaaccagtgccgctactgccggctgaagaagtgcttccgcgccgggatgaagaaggaggccgtccagaacgagcgggaccgcatctccacccggcgcgcggcctacgaggacagctccctgcccagcatcaacgcgctcctgcaggccgaggtgctgtcccggcagatcaccagccccgtgtccggcatcaacggggacatccgcgccaagaagatcgccagcatcgccgacgtctgcgagagcatgaaggagcagctcctggtgctggtggagtgggcgaagtacatcccggccttctgcgagctccccctggacgaccaggtcgccctgctccgggcccacgccggcgagcacctcctgctgggggcgaccaagcgctccatggtgttcaaggacgtgctgctgctcggcaacgactacatcgtcccccggcactgccccgagctggccgagatgagccgcgtgtccatccggatcctggacgagctcgtgctgccgttccaggagctgcagatcgacgacaacgagtacgcctacctcaaggccatcatcttcttcgaccccgacgccaagggcctgagcgaccccgggaagatcaagcgcctgcgctcccaggtccaggtgagcctcgaggactacatcaacgaccggcagtacgactcccgcggccggttcggggagctgctgctcctgctgcccacgctccagagcatcacctggcagatgatcgagcagatccagttcatcaagctgttcggcatggcgaagatcgacaacctgctccaggagatgctgctgggcgggtccccgagcgacgcgccccacgcccaccaccccctccacccccacctgatgcaggagcacatgggcaccaacgtgatcgtcgccaacaccatgccgacgcacctgtccaacgggcagatgtgcgagtggccccgcccccggggccaggccgccacccccgagaccccgcagcccagcccgcccgggggctccggcagcgagccctacaagctgctccccggggccgtggccaccatcgtgaagcccctgtccgccatcccccagccgacgatcaccaagcaggaggtcatctgaggactagtccctgttcccagagcccacttttttttctttttttgaaataaaatagcctgtctttcagatctaaaaaaaaaaaaaaaaaaaaaaaaaaaaaaaaaaaaaaaaaaaaaaaaaaaaaaaaaaaaaaaaaaaaaaaaaaaaaaaaaaaaaaaaaaaaaaaaaaaa

SEQ ID NO: 5126 - RNA, 1562 nt, synthetic construct
  misc_feature 1..1562: note = mRNA a-1 (A100) (opt1) from Homo sapiens__NP_000448.3__HNF4A(39-474)(S142E_S143E)
  source 1..1562: mol_type = other RNA
aggagagtcccgcagtcggcgtccagcggctctgcttgttcgtgtgtgtgtcgttgcaggccttattcaagcttaccatggacaccagcccgtccgaggggaccaacctgaacgcccccaacagcctgggcgtgtccgccctctgcgccatctgcggggaccgggcgacgggcaagcactacggggccagctcctgcgacggctgcaagggcttcttccgccggagcgtccgcaagaaccacatgtactcctgccggttcagccgccagtgcgtggtggacaaggacaagcggaaccagtgccgctactgccggctgaagaagtgcttccgcgccgggatgaagaaggaggccgtccagaacgagcgggaccgcatctccacccggcgcgaggagtacgaggacagctccctgcccagcatcaacgcgctcctgcaggccgaggtgctgtcccggcagatcaccagccccgtgtccggcatcaacggggacatccgcgccaagaagatcgccagcatcgccgacgtctgcgagagcatgaaggagcagctcctggtgctggtggagtgggcgaagtacatcccggccttctgcgagctccccctggacgaccaggtcgccctgctccgggcccacgccggcgagcacctcctgctgggggcgaccaagcgctccatggtgttcaaggacgtgctgctgctcggcaacgactacatcgtcccccggcactgccccgagctggccgagatgagccgcgtgtccatccggatcctggacgagctcgtgctgccgttccaggagctgcagatcgacgacaacgagtacgcctacctcaaggccatcatcttcttcgaccccgacgccaagggcctgagcgaccccgggaagatcaagcgcctgcgctcccaggtccaggtgagcctcgaggactacatcaacgaccggcagtacgactcccgcggccggttcggggagctgctgctcctgctgcccacgctccagagcatcacctggcagatgatcgagcagatccagttcatcaagctgttcggcatggcgaagatcgacaacctgctccaggagatgctgctgggcgggtccccgagcgacgcgccccacgcccaccaccccctccacccccacctgatgcaggagcacatgggcaccaacgtgatcgtcgccaacaccatgccgacgcacctgtccaacgggcagatgtgcgagtggccccgcccccggggccaggccgccacccccgagaccccgcagcccagcccgcccgggggctccggcagcgagccctacaagctgctccccggggccgtggccaccatcgtgaagcccctgtccgccatcccccagccgacgatcaccaagcaggaggtcatctgaggactagtccctgttcccagagcccacttttttttctttttttgaaataaaatagcctgtctttcagatctaaaaaaaaaaaaaaaaaaaaaaaaaaaaaaaaaaaaaaaaaaaaaaaaaaaaaaaaaaaaaaaaaaaaaaaaaaaaaaaaaaaaaaaaaaaaaaaaaaaa

SEQ ID NO: 5127 - RNA, 1562 nt, synthetic construct
  misc_feature 1..1562: note = mRNA a-1 (A100) (opt1) from Homo sapiens__NP_000448.3__HNF4A(39-474)(S143A)
  source 1..1562: mol_type = other RNA
aggagagtcccgcagtcggcgtccagcggctctgcttgttcgtgtgtgtgtcgttgcaggccttattcaagcttaccatggacaccagcccgtccgaggggaccaacctgaacgcccccaacagcctgggcgtgtccgccctctgcgccatctgcggggaccgggcgacgggcaagcactacggggccagctcctgcgacggctgcaagggcttcttccgccggagcgtccgcaagaaccacatgtactcctgccggttcagccgccagtgcgtggtggacaaggacaagcggaaccagtgccgctactgccggctgaagaagtgcttccgcgccgggatgaagaaggaggccgtccagaacgagcgggaccgcatctccacccggcgcagcgcgtacgaggacagctccctgcccagcatcaacgcgctcctgcaggccgaggtgctgtcccggcagatcaccagccccgtgtccggcatcaacggggacatccgcgccaagaagatcgccagcatcgccgacgtctgcgagagcatgaaggagcagctcctggtgctggtggagtgggcgaagtacatcccggccttctgcgagctccccctggacgaccaggtcgccctgctccgggcccacgccggcgagcacctcctgctgggggcgaccaagcgctccatggtgttcaaggacgtgctgctgctcggcaacgactacatcgtcccccggcactgccccgagctggccgagatgagccgcgtgtccatccggatcctggacgagctcgtgctgccgttccaggagctgcagatcgacgacaacgagtacgcctacctcaaggccatcatcttcttcgaccccgacgccaagggcctgagcgaccccgggaagatcaagcgcctgcgctcccaggtccaggtgagcctcgaggactacatcaacgaccggcagtacgactcccgcggccggttcggggagctgctgctcctgctgcccacgctccagagcatcacctggcagatgatcgagcagatccagttcatcaagctgttcggcatggcgaagatcgacaacctgctccaggagatgctgctgggcgggtccccgagcgacgcgccccacgcccaccaccccctccacccccacctgatgcaggagcacatgggcaccaacgtgatcgtcgccaacaccatgccgacgcacctgtccaacgggcagatgtgcgagtggccccgcccccggggccaggccgccacccccgagaccccgcagcccagcccgcccgggggctccggcagcgagccctacaagctgctccccggggccgtggccaccatcgtgaagcccctgtccgccatcccccagccgacgatcaccaagcaggaggtcatctgaggactagtccctgttcccagagcccacttttttttctttttttgaaataaaatagcctgtctttcagatctaaaaaaaaaaaaaaaaaaaaaaaaaaaaaaaaaaaaaaaaaaaaaaaaaaaaaaaaaaaaaaaaaaaaaaaaaaaaaaaaaaaaaaaaaaaaaaaaaaaa

SEQ ID NO: 5128 - RNA, 1562 nt, synthetic construct
  misc_feature 1..1562: note = mRNA a-1 (A100) (opt1) from Homo sapiens__NP_000448.3__HNF4A(39-474)(T166A)
  source 1..1562: mol_type = other RNA
aggagagtcccgcagtcggcgtccagcggctctgcttgttcgtgtgtgtgtcgttgcaggccttattcaagcttaccatggacaccagcccgtccgaggggaccaacctgaacgcccccaacagcctgggcgtgtccgccctctgcgccatctgcggggaccgggcgacgggcaagcactacggggccagctcctgcgacggctgcaagggcttcttccgccggagcgtccgcaagaaccacatgtactcctgccggttcagccgccagtgcgtggtggacaaggacaagcggaaccagtgccgctactgccggctgaagaagtgcttccgcgccgggatgaagaaggaggccgtccagaacgagcgggaccgcatctccacccggcgcagctcctacgaggacagctccctgcccagcatcaacgcgctcctgcaggccgaggtgctgtcccggcagatcgcgagccccgtgtccggcatcaacggggacatccgcgccaagaagatcgccagcatcgccgacgtctgcgagagcatgaaggagcagctcctggtgctggtggagtgggcgaagtacatcccggccttctgcgagctccccctggacgaccaggtcgccctgctccgggcccacgccggcgagcacctcctgctgggggcgaccaagcgctccatggtgttcaaggacgtgctgctgctcggcaacgactacatcgtcccccggcactgccccgagctggccgagatgagccgcgtgtccatccggatcctggacgagctcgtgctgccgttccaggagctgcagatcgacgacaacgagtacgcctacctcaaggccatcatcttcttcgaccccgacgccaagggcctgagcgaccccgggaagatcaagcgcctgcgctcccaggtccaggtgagcctcgaggactacatcaacgaccggcagtacgactcccgcggccggttcggggagctgctgctcctgctgcccacgctccagagcatcacctggcagatgatcgagcagatccagttcatcaagctgttcggcatggcgaagatcgacaacctgctccaggagatgctgctgggcgggtccccgagcgacgcgccccacgcccaccaccccctccacccccacctgatgcaggagcacatgggcaccaacgtgatcgtcgccaacaccatgccgacgcacctgtccaacgggcagatgtgcgagtggccccgcccccggggccaggccgccacccccgagaccccgcagcccagcccgcccgggggctccggcagcgagccctacaagctgctccccggggccgtggccaccatcgtgaagcccctgtccgccatcccccagccgacgatcaccaagcaggaggtcatctgaggactagtccctgttcccagagcccacttttttttctttttttgaaataaaatagcctgtctttcagatctaaaaaaaaaaaaaaaaaaaaaaaaaaaaaaaaaaaaaaaaaaaaaaaaaaaaaaaaaaaaaaaaaaaaaaaaaaaaaaaaaaaaaaaaaaaaaaaaaaaa

SEQ ID NO: 5129 - RNA, 1562 nt, synthetic construct
  misc_feature 1..1562: note = mRNA a-1 (A100) (opt1) from Homo sapiens__NP_000448.3__HNF4A(39-474)(S167E)
  source 1..1562: mol_type = other RNA
aggagagtcccgcagtcggcgtccagcggctctgcttgttcgtgtgtgtgtcgttgcaggccttattcaagcttaccatggacaccagcccgtccgaggggaccaacctgaacgcccccaacagcctgggcgtgtccgccctctgcgccatctgcggggaccgggcgacgggcaagcactacggggccagctcctgcgacggctgcaagggcttcttccgccggagcgtccgcaagaaccacatgtactcctgccggttcagccgccagtgcgtggtggacaaggacaagcggaaccagtgccgctactgccggctgaagaagtgcttccgcgccgggatgaagaaggaggccgtccagaacgagcgggaccgcatctccacccggcgcagctcctacgaggacagctccctgcccagcatcaacgcgctcctgcaggccgaggtgctgtcccggcagatcaccgagcccgtgtccggcatcaacggggacatccgcgccaagaagatcgccagcatcgccgacgtctgcgagagcatgaaggagcagctcctggtgctggtggagtgggcgaagtacatcccggccttctgcgagctccccctggacgaccaggtcgccctgctccgggcccacgccggcgagcacctcctgctgggggcgaccaagcgctccatggtgttcaaggacgtgctgctgctcggcaacgactacatcgtcccccggcactgccccgagctggccgagatgagccgcgtgtccatccggatcctggacgagctcgtgctgccgttccaggagctgcagatcgacgacaacgagtacgcctacctcaaggccatcatcttcttcgaccccgacgccaagggcctgagcgaccccgggaagatcaagcgcctgcgctcccaggtccaggtgagcctcgaggactacatcaacgaccggcagtacgactcccgcggccggttcggggagctgctgctcctgctgcccacgctccagagcatcacctggcagatgatcgagcagatccagttcatcaagctgttcggcatggcgaagatcgacaacctgctccaggagatgctgctgggcgggtccccgagcgacgcgccccacgcccaccaccccctccacccccacctgatgcaggagcacatgggcaccaacgtgatcgtcgccaacaccatgccgacgcacctgtccaacgggcagatgtgcgagtggccccgcccccggggccaggccgccacccccgagaccccgcagcccagcccgcccgggggctccggcagcgagccctacaagctgctccccggggccgtggccaccatcgtgaagcccctgtccgccatcccccagccgacgatcaccaagcaggaggtcatctgaggactagtccctgttcccagagcccacttttttttctttttttgaaataaaatagcctgtctttcagatctaaaaaaaaaaaaaaaaaaaaaaaaaaaaaaaaaaaaaaaaaaaaaaaaaaaaaaaaaaaaaaaaaaaaaaaaaaaaaaaaaaaaaaaaaaaaaaaaaaaa

SEQ ID NO: 5130 - RNA, 1562 nt, synthetic construct
  misc_feature 1..1562: note = mRNA a-1 (A100) (opt1) from Homo sapiens__NP_000448.3__HNF4A(39-474)(S167A)
  source 1..1562: mol_type = other RNA
aggagagtcccgcagtcggcgtccagcggctctgcttgttcgtgtgtgtgtcgttgcaggccttattcaagcttaccatggacaccagcccgtccgaggggaccaacctgaacgcccccaacagcctgggcgtgtccgccctctgcgccatctgcggggaccgggcgacgggcaagcactacggggccagctcctgcgacggctgcaagggcttcttccgccggagcgtccgcaagaaccacatgtactcctgccggttcagccgccagtgcgtggtggacaaggacaagcggaaccagtgccgctactgccggctgaagaagtgcttccgcgccgggatgaagaaggaggccgtccagaacgagcgggaccgcatctccacccggcgcagctcctacgaggacagctccctgcccagcatcaacgcgctcctgcaggccgaggtgctgtcccggcagatcaccgcgcccgtgtccggcatcaacggggacatccgcgccaagaagatcgccagcatcgccgacgtctgcgagagcatgaaggagcagctcctggtgctggtggagtgggcgaagtacatcccggccttctgcgagctccccctggacgaccaggtcgccctgctccgggcccacgccggcgagcacctcctgctgggggcgaccaagcgctccatggtgttcaaggacgtgctgctgctcggcaacgactacatcgtcccccggcactgccccgagctggccgagatgagccgcgtgtccatccggatcctggacgagctcgtgctgccgttccaggagctgcagatcgacgacaacgagtacgcctacctcaaggccatcatcttcttcgaccccgacgccaagggcctgagcgaccccgggaagatcaagcgcctgcgctcccaggtccaggtgagcctcgaggactacatcaacgaccggcagtacgactcccgcggccggttcggggagctgctgctcctgctgcccacgctccagagcatcacctggcagatgatcgagcagatccagttcatcaagctgttcggcatggcgaagatcgacaacctgctccaggagatgctgctgggcgggtccccgagcgacgcgccccacgcccaccaccccctccacccccacctgatgcaggagcacatgggcaccaacgtgatcgtcgccaacaccatgccgacgcacctgtccaacgggcagatgtgcgagtggccccgcccccggggccaggccgccacccccgagaccccgcagcccagcccgcccgggggctccggcagcgagccctacaagctgctccccggggccgtggccaccatcgtgaagcccctgtccgccatcccccagccgacgatcaccaagcaggaggtcatctgaggactagtccctgttcccagagcccacttttttttctttttttgaaataaaatagcctgtctttcagatctaaaaaaaaaaaaaaaaaaaaaaaaaaaaaaaaaaaaaaaaaaaaaaaaaaaaaaaaaaaaaaaaaaaaaaaaaaaaaaaaaaaaaaaaaaaaaaaaaaaa

SEQ ID NO: 5131 - RNA, 1562 nt, synthetic construct
  misc_feature 1..1562: note = mRNA a-1 (A100) (opt1) from Homo sapiens__NP_000448.3__HNF4A(39-474)(S167A_S378A_T429A_T432A _S436A)
  source 1..1562: mol_type = other RNA
aggagagtcccgcagtcggcgtccagcggctctgcttgttcgtgtgtgtgtcgttgcaggccttattcaagcttaccatggacaccagcccgtccgaggggaccaacctgaacgcccccaacagcctgggcgtgtccgccctctgcgccatctgcggggaccgggcgacgggcaagcactacggggccagctcctgcgacggctgcaagggcttcttccgccggagcgtccgcaagaaccacatgtactcctgccggttcagccgccagtgcgtggtggacaaggacaagcggaaccagtgccgctactgccggctgaagaagtgcttccgcgccgggatgaagaaggaggccgtccagaacgagcgggaccgcatctccacccggcgcagctcctacgaggacagctccctgcccagcatcaacgcgctcctgcaggccgaggtgctgtcccggcagatcaccgcgcccgtgtccggcatcaacggggacatccgcgccaagaagatcgccagcatcgccgacgtctgcgagagcatgaaggagcagctcctggtgctggtggagtgggcgaagtacatcccggccttctgcgagctccccctggacgaccaggtcgccctgctccgggcccacgccggcgagcacctcctgctgggggcgaccaagcgctccatggtgttcaaggacgtgctgctgctcggcaacgactacatcgtcccccggcactgccccgagctggccgagatgagccgcgtgtccatccggatcctggacgagctcgtgctgccgttccaggagctgcagatcgacgacaacgagtacgcctacctcaaggccatcatcttcttcgaccccgacgccaagggcctgagcgaccccgggaagatcaagcgcctgcgctcccaggtccaggtgagcctcgaggactacatcaacgaccggcagtacgactcccgcggccggttcggggagctgctgctcctgctgcccacgctccagagcatcacctggcagatgatcgagcagatccagttcatcaagctgttcggcatggcgaagatcgacaacctgctccaggagatgctgctgggcggggcgccgagcgacgcgccccacgcccaccaccccctccacccccacctgatgcaggagcacatgggcaccaacgtgatcgtcgccaacaccatgccgacgcacctgtccaacgggcagatgtgcgagtggccccgcccccggggccaggccgccgcgcccgaggcgccgcagcccgcgccgcccgggggctccggcagcgagccctacaagctgctccccggggccgtggccaccatcgtgaagcccctgtccgccatcccccagccgacgatcaccaagcaggaggtcatctgaggactagtccctgttcccagagcccacttttttttctttttttgaaataaaatagcctgtctttcagatctaaaaaaaaaaaaaaaaaaaaaaaaaaaaaaaaaaaaaaaaaaaaaaaaaaaaaaaaaaaaaaaaaaaaaaaaaaaaaaaaaaaaaaaaaaaaaaaaaaaa

SEQ ID NO: 5132 - RNA, 1562 nt, synthetic construct
  misc_feature 1..1562: note = mRNA a-1 (A100) (opt1) from Homo sapiens__NP_000448.3__HNF4A(39-474)(S167E_S378E_T429E_T432E _S436E)
  source 1..1562: mol_type = other RNA
aggagagtcccgcagtcggcgtccagcggctctgcttgttcgtgtgtgtgtcgttgcaggccttattcaagcttaccatggacaccagcccgtccgaggggaccaacctgaacgcccccaacagcctgggcgtgtccgccctctgcgccatctgcggggaccgggcgacgggcaagcactacggggccagctcctgcgacggctgcaagggcttcttccgccggagcgtccgcaagaaccacatgtactcctgccggttcagccgccagtgcgtggtggacaaggacaagcggaaccagtgccgctactgccggctgaagaagtgcttccgcgccgggatgaagaaggaggccgtccagaacgagcgggaccgcatctccacccggcgcagctcctacgaggacagctccctgcccagcatcaacgcgctcctgcaggccgaggtgctgtcccggcagatcaccgagcccgtgtccggcatcaacggggacatccgcgccaagaagatcgccagcatcgccgacgtctgcgagagcatgaaggagcagctcctggtgctggtggagtgggcgaagtacatcccggccttctgcgagctccccctggacgaccaggtcgccctgctccgggcccacgccggcgagcacctcctgctgggggcgaccaagcgctccatggtgttcaaggacgtgctgctgctcggcaacgactacatcgtcccccggcactgccccgagctggccgagatgagccgcgtgtccatccggatcctggacgagctcgtgctgccgttccaggagctgcagatcgacgacaacgagtacgcctacctcaaggccatcatcttcttcgaccccgacgccaagggcctgagcgaccccgggaagatcaagcgcctgcgctcccaggtccaggtgagcctcgaggactacatcaacgaccggcagtacgactcccgcggccggttcggggagctgctgctcctgctgcccacgctccagagcatcacctggcagatgatcgagcagatccagttcatcaagctgttcggcatggcgaagatcgacaacctgctccaggagatgctgctgggcggggagccgagcgacgcgccccacgcccaccaccccctccacccccacctgatgcaggagcacatgggcaccaacgtgatcgtcgccaacaccatgccgacgcacctgtccaacgggcagatgtgcgagtggccccgcccccggggccaggccgccgagcccgaggagccgcagcccgagccgcccgggggctccggcagcgagccctacaagctgctccccggggccgtggccaccatcgtgaagcccctgtccgccatcccccagccgacgatcaccaagcaggaggtcatctgaggactagtccctgttcccagagcccacttttttttctttttttgaaataaaatagcctgtctttcagatctaaaaaaaaaaaaaaaaaaaaaaaaaaaaaaaaaaaaaaaaaaaaaaaaaaaaaaaaaaaaaaaaaaaaaaaaaaaaaaaaaaaaaaaaaaaaaaaaaaaa

SEQ ID NO: 5133 - RNA, 1562 nt, synthetic construct
  misc_feature 1..1562: note = mRNA a-1 (A100) (opt1) from Homo sapiens__NP_000448.3__HNF4A(39-474)(S87A)
  source 1..1562: mol_type = other RNA
aggagagtcccgcagtcggcgtccagcggctctgcttgttcgtgtgtgtgtcgttgcaggccttattcaagcttaccatggacaccagcccgtccgaggggaccaacctgaacgcccccaacagcctgggcgtgtccgccctctgcgccatctgcggggaccgggcgacgggcaagcactacggggccagctcctgcgacggctgcaagggcttcttccgccgggcggtccgcaagaaccacatgtactcctgccggttcagccgccagtgcgtggtggacaaggacaagcggaaccagtgccgctactgccggctgaagaagtgcttccgcgccgggatgaagaaggaggccgtccagaacgagcgggaccgcatctccacccggcgcagctcctacgaggacagctccctgcccagcatcaacgcgctcctgcaggccgaggtgctgtcccggcagatcaccagccccgtgtccggcatcaacggggacatccgcgccaagaagatcgccagcatcgccgacgtctgcgagagcatgaaggagcagctcctggtgctggtggagtgggcgaagtacatcccggccttctgcgagctccccctggacgaccaggtcgccctgctccgggcccacgccggcgagcacctcctgctgggggcgaccaagcgctccatggtgttcaaggacgtgctgctgctcggcaacgactacatcgtcccccggcactgccccgagctggccgagatgagccgcgtgtccatccggatcctggacgagctcgtgctgccgttccaggagctgcagatcgacgacaacgagtacgcctacctcaaggccatcatcttcttcgaccccgacgccaagggcctgagcgaccccgggaagatcaagcgcctgcgctcccaggtccaggtgagcctcgaggactacatcaacgaccggcagtacgactcccgcggccggttcggggagctgctgctcctgctgcccacgctccagagcatcacctggcagatgatcgagcagatccagttcatcaagctgttcggcatggcgaagatcgacaacctgctccaggagatgctgctgggcgggtccccgagcgacgcgccccacgcccaccaccccctccacccccacctgatgcaggagcacatgggcaccaacgtgatcgtcgccaacaccatgccgacgcacctgtccaacgggcagatgtgcgagtggccccgcccccggggccaggccgccacccccgagaccccgcagcccagcccgcccgggggctccggcagcgagccctacaagctgctccccggggccgtggccaccatcgtgaagcccctgtccgccatcccccagccgacgatcaccaagcaggaggtcatctgaggactagtccctgttcccagagcccacttttttttctttttttgaaataaaatagcctgtctttcagatctaaaaaaaaaaaaaaaaaaaaaaaaaaaaaaaaaaaaaaaaaaaaaaaaaaaaaaaaaaaaaaaaaaaaaaaaaaaaaaaaaaaaaaaaaaaaaaaaaaaa

SEQ ID NO: 5134 - RNA, 1562 nt, synthetic construct
  misc_feature 1..1562: note = mRNA a-1 (A100) (opt1) from Homo sapiens__NP_000448.3__HNF4A(39-474)(S87E)
  source 1..1562: mol_type = other RNA
aggagagtcccgcagtcggcgtccagcggctctgcttgttcgtgtgtgtgtcgttgcaggccttattcaagcttaccatggacaccagcccgtccgaggggaccaacctgaacgcccccaacagcctgggcgtgtccgccctctgcgccatctgcggggaccgggcgacgggcaagcactacggggccagctcctgcgacggctgcaagggcttcttccgccgggaggtccgcaagaaccacatgtactcctgccggttcagccgccagtgcgtggtggacaaggacaagcggaaccagtgccgctactgccggctgaagaagtgcttccgcgccgggatgaagaaggaggccgtccagaacgagcgggaccgcatctccacccggcgcagctcctacgaggacagctccctgcccagcatcaacgcgctcctgcaggccgaggtgctgtcccggcagatcaccagccccgtgtccggcatcaacggggacatccgcgccaagaagatcgccagcatcgccgacgtctgcgagagcatgaaggagcagctcctggtgctggtggagtgggcgaagtacatcccggccttctgcgagctccccctggacgaccaggtcgccctgctccgggcccacgccggcgagcacctcctgctgggggcgaccaagcgctccatggtgttcaaggacgtgctgctgctcggcaacgactacatcgtcccccggcactgccccgagctggccgagatgagccgcgtgtccatccggatcctggacgagctcgtgctgccgttccaggagctgcagatcgacgacaacgagtacgcctacctcaaggccatcatcttcttcgaccccgacgccaagggcctgagcgaccccgggaagatcaagcgcctgcgctcccaggtccaggtgagcctcgaggactacatcaacgaccggcagtacgactcccgcggccggttcggggagctgctgctcctgctgcccacgctccagagcatcacctggcagatgatcgagcagatccagttcatcaagctgttcggcatggcgaagatcgacaacctgctccaggagatgctgctgggcgggtccccgagcgacgcgccccacgcccaccaccccctccacccccacctgatgcaggagcacatgggcaccaacgtgatcgtcgccaacaccatgccgacgcacctgtccaacgggcagatgtgcgagtggccccgcccccggggccaggccgccacccccgagaccccgcagcccagcccgcccgggggctccggcagcgagccctacaagctgctccccggggccgtggccaccatcgtgaagcccctgtccgccatcccccagccgacgatcaccaagcaggaggtcatctgaggactagtccctgttcccagagcccacttttttttctttttttgaaataaaatagcctgtctttcagatctaaaaaaaaaaaaaaaaaaaaaaaaaaaaaaaaaaaaaaaaaaaaaaaaaaaaaaaaaaaaaaaaaaaaaaaaaaaaaaaaaaaaaaaaaaaaaaaaaaaa

SEQ ID NO: 5135 - RNA, 1562 nt, synthetic construct; identical to SEQ ID NO: 5122
  misc_feature 1..1562: note = mRNA a-1 (A100) (opt1) from Homo sapiens__NP_000448.3__HNF4A(39-474)(R2V)
  source 1..1562: mol_type = other RNA

SEQ ID NO: 5136 - RNA, 1562 nt, synthetic construct; identical to SEQ ID NO: 5122
  misc_feature 1..1562: note = mRNA a-1 (A100) (opt1) from Homo sapiens__NP_000448.3__HNF4A(39-474)(R2V_K5V)
  source 1..1562: mol_type = other RNA

SEQ ID NO: 5137 - RNA, 1562 nt, synthetic construct
  misc_feature 1..1562: note = mRNA a-1 (A100) (opt1) from Homo sapiens__NP_000448.3__HNF4A(39-474)(K179R_K180R)
  source 1..1562: mol_type = other RNA
aggagagtcccgcagtcggcgtccagcggctctgcttgttcgtgtgtgtgtcgttgcaggccttattcaagcttaccatggacaccagcccgtccgaggggaccaacctgaacgcccccaacagcctgggcgtgtccgccctctgcgccatctgcggggaccgggcgacgggcaagcactacggggccagctcctgcgacggctgcaagggcttcttccgccggagcgtccgcaagaaccacatgtactcctgccggttcagccgccagtgcgtggtggacaaggacaagcggaaccagtgccgctactgccggctgaagaagtgcttccgcgccgggatgaagaaggaggccgtccagaacgagcgggaccgcatctccacccggcgcagctcctacgaggacagctccctgcccagcatcaacgcgctcctgcaggccgaggtgctgtcccggcagatcaccagccccgtgtccggcatcaacggggacatccgcgcccggcgcatcgccagcatcgccgacgtctgcgagagcatgaaggagcagctcctggtgctggtggagtgggcgaagtacatcccggccttctgcgagctccccctggacgaccaggtcgccctgctccgggcccacgccggcgagcacctcctgctgggggcgaccaagcgctccatggtgttcaaggacgtgctgctgctcggcaacgactacatcgtcccccggcactgccccgagctggccgagatgagccgcgtgtccatccggatcctggacgagctcgtgctgccgttccaggagctgcagatcgacgacaacgagtacgcctacctcaaggccatcatcttcttcgaccccgacgccaagggcctgagcgaccccgggaagatcaagcgcctgcgctcccaggtccaggtgagcctcgaggactacatcaacgaccggcagtacgactcccgcggccggttcggggagctgctgctcctgctgcccacgctccagagcatcacctggcagatgatcgagcagatccagttcatcaagctgttcggcatggcgaagatcgacaacctgctccaggagatgctgctgggcgggtccccgagcgacgcgccccacgcccaccaccccctccacccccacctgatgcaggagcacatgggcaccaacgtgatcgtcgccaacaccatgccgacgcacctgtccaacgggcagatgtgcgagtggccccgcccccggggccaggccgccacccccgagaccccgcagcccagcccgcccgggggctccggcagcgagccctacaagctgctccccggggccgtggccaccatcgtgaagcccctgtccgccatcccccagccgacgatcaccaagcaggaggtcatctgaggactagtccctgttcccagagcccacttttttttctttttttgaaataaaatagcctgtctttcagatctaaaaaaaaaaaaaaaaaaaaaaaaaaaaaaaaaaaaaaaaaaaaaaaaaaaaaaaaaaaaaaaaaaaaaaaaaaaaaaaaaaaaaaaaaaaaaaaaaaaa

SEQ ID NO: 5138 - RNA, 1562 nt, synthetic construct
  misc_feature 1..1562: note = mRNA a-1 (A100) (opt1) from Homo sapiens__NP_000448.3__HNF4A(39-474)(K234R)
  source 1..1562: mol_type = other RNA
aggagagtcccgcagtcggcgtccagcggctctgcttgttcgtgtgtgtgtcgttgcaggccttattcaagcttaccatggacaccagcccgtccgaggggaccaacctgaacgcccccaacagcctgggcgtgtccgccctctgcgccatctgcggggaccgggcgacgggcaagcactacggggccagctcctgcgacggctgcaagggcttcttccgccggagcgtccgcaagaaccacatgtactcctgccggttcagccgccagtgcgtggtggacaaggacaagcggaaccagtgccgctactgccggctgaagaagtgcttccgcgccgggatgaagaaggaggccgtccagaacgagcgggaccgcatctccacccggcgcagctcctacgaggacagctccctgcccagcatcaacgcgctcctgcaggccgaggtgctgtcccggcagatcaccagccccgtgtccggcatcaacggggacatccgcgccaagaagatcgccagcatcgccgacgtctgcgagagcatgaaggagcagctcctggtgctggtggagtgggcgaagtacatcccggccttctgcgagctccccctggacgaccaggtcgccctgctccgggcccacgccggcgagcacctcctgctgggggcgacccgccgctccatggtgttcaaggacgtgctgctgctcggcaacgactacatcgtcccccggcactgccccgagctggccgagatgagccgcgtgtccatccggatcctggacgagctcgtgctgccgttccaggagctgcagatcgacgacaacgagtacgcctacctcaaggccatcatcttcttcgaccccgacgccaagggcctgagcgaccccgggaagatcaagcgcctgcgctcccaggtccaggtgagcctcgaggactacatcaacgaccggcagtacgactcccgcggccggttcggggagctgctgctcctgctgcccacgctccagagcatcacctggcagatgatcgagcagatccagttcatcaagctgttcggcatggcgaagatcgacaacctgctccaggagatgctgctgggcgggtccccgagcgacgcgccccacgcccaccaccccctccacccccacctgatgcaggagcacatgggcaccaacgtgatcgtcgccaacaccatgccgacgcacctgtccaacgggcagatgtgcgagtggccccgcccccggggccaggccgccacccccgagaccccgcagcccagcccgcccgggggctccggcagcgagccctacaagctgctccccggggccgtggccaccatcgtgaagcccctgtccgccatcccccagccgacgatcaccaagcaggaggtcatctgaggactagtccctgttcccagagcccacttttttttctttttttgaaataaaatagcctgtctttcagatctaaaaaaaaaaaaaaaaaaaaaaaaaaaaaaaaaaaaaaaaaaaaaaaaaaaaaaaaaaaaaaaaaaaaaaaaaaaaaaaaaaaaaaaaaaaaaaaaaaaa

SEQ ID NO: 5139 - RNA, 1562 nt, synthetic construct
  misc_feature 1..1562: note = mRNA a-1 (A100) (opt1) from Homo sapiens__NP_000448.3__HNF4A(39-474)(K300R)
  source 1..1562: mol_type = other RNA
aggagagtcccgcagtcggcgtccagcggctctgcttgttcgtgtgtgtgtcgttgcaggccttattcaagcttaccatggacaccagcccgtccgaggggaccaacctgaacgcccccaacagcctgggcgtgtccgccctctgcgccatctgcggggaccgggcgacgggcaagcactacggggccagctcctgcgacggctgcaagggcttcttccgccggagcgtccgcaagaaccacatgtactcctgccggttcagccgccagtgcgtggtggacaaggacaagcggaaccagtgccgctactgccggctgaagaagtgcttccgcgccgggatgaagaaggaggccgtccagaacgagcgggaccgcatctccacccggcgcagctcctacgaggacagctccctgcccagcatcaacgcgctcctgcaggccgaggtgctgtcccggcagatcaccagccccgtgtccggcatcaacggggacatccgcgccaagaagatcgccagcatcgccgacgtctgcgagagcatgaaggagcagctcctggtgctggtggagtgggcgaagtacatcccggccttctgcgagctccccctggacgaccaggtcgccctgctccgggcccacgccggcgagcacctcctgctgggggcgaccaagcgctccatggtgttcaaggacgtgctgctgctcggcaacgactacatcgtcccccggcactgccccgagctggccgagatgagccgcgtgtccatccggatcctggacgagctcgtgctgccgttccaggagctgcagatcgacgacaacgagtacgcctacctcaaggccatcatcttcttcgaccccgacgcccgcggcctgagcgaccccgggaagatcaagcgcctgcgctcccaggtccaggtgagcctcgaggactacatcaacgaccggcagtacgactcccgcggccggttcggggagctgctgctcctgctgcccacgctccagagcatcacctggcagatgatcgagcagatccagttcatcaagctgttcggcatggcgaagatcgacaacctgctccaggagatgctgctgggcgggtccccgagcgacgcgccccacgcccaccaccccctccacccccacctgatgcaggagcacatgggcaccaacgtgatcgtcgccaacaccatgccgacgcacctgtccaacgggcagatgtgcgagtggccccgcccccggggccaggccgccacccccgagaccccgcagcccagcccgcccgggggctccggcagcgagccctacaagctgctccccggggccgtggccaccatcgtgaagcccctgtccgccatcccccagccgacgatcaccaagcaggaggtcatctgaggactagtccctgttcccagagcccacttttttttctttttttgaaataaaatagcctgtctttcagatctaaaaaaaaaaaaaaaaaaaaaaaaaaaaaaaaaaaaaaaaaaaaaaaaaaaaaaaaaaaaaaaaaaaaaaaaaaaaaaaaaaaaaaaaaaaaaaaaaaaa

SEQ ID NO: 5140 - RNA, 1562 nt, synthetic construct
  misc_feature 1..1562: note = mRNA a-1 (A100) (opt1) from Homo sapiens__NP_000448.3__HNF4A(39-474)(K300R_K307R_K309R)
  source 1..1562: mol_type = other RNA
aggagagtcccgcagtcggcgtccagcggctctgcttgttcgtgtgtgtgtcgttgcaggccttattcaagcttaccatggacaccagcccgtccgaggggaccaacctgaacgcccccaacagcctgggcgtgtccgccctctgcgccatctgcggggaccgggcgacgggcaagcactacggggccagctcctgcgacggctgcaagggcttcttccgccggagcgtccgcaagaaccacatgtactcctgccggttcagccgccagtgcgtggtggacaaggacaagcggaaccagtgccgctactgccggctgaagaagtgcttccgcgccgggatgaagaaggaggccgtccagaacgagcgggaccgcatctccacccggcgcagctcctacgaggacagctccctgcccagcatcaacgcgctcctgcaggccgaggtgctgtcccggcagatcaccagccccgtgtccggcatcaacggggacatccgcgccaagaagatcgccagcatcgccgacgtctgcgagagcatgaaggagcagctcctggtgctggtggagtgggcgaagtacatcccggccttctgcgagctccccctggacgaccaggtcgccctgctccgggcccacgccggcgagcacctcctgctgggggcgaccaagcgctccatggtgttcaaggacgtgctgctgctcggcaacgactacatcgtcccccggcactgccccgagctggccgagatgagccgcgtgtccatccggatcctggacgagctcgtgctgccgttccaggagctgcagatcgacgacaacgagtacgcctacctcaaggccatcatcttcttcgaccccgacgcccgcggcctgagcgaccccgggcgcatccggcgcctgcgctcccaggtccaggtgagcctcgaggactacatcaacgaccggcagtacgactcccgcggccggttcggggagctgctgctcctgctgcccacgctccagagcatcacctggcagatgatcgagcagatccagttcatcaagctgttcggcatggcgaagatcgacaacctgctccaggagatgctgctgggcgggtccccgagcgacgcgccccacgcccaccaccccctccacccccacctgatgcaggagcacatgggcaccaacgtgatcgtcgccaacaccatgccgacgcacctgtccaacgggcagatgtgcgagtggccccgcccccggggccaggccgccacccccgagaccccgcagcccagcccgcccgggggctccggcagcgagccctacaagctgctccccggggccgtggccaccatcgtgaagcccctgtccgccatcccccagccgacgatcaccaagcaggaggtcatctgaggactagtccctgttcccagagcccacttttttttctttttttgaaataaaatagcctgtctttcagatctaaaaaaaaaaaaaaaaaaaaaaaaaaaaaaaaaaaaaaaaaaaaaaaaaaaaaaaaaaaaaaaaaaaaaaaaaaaaaaaaaaaaaaaaaaaaaaaaaaaa

SEQ ID NO: 5141 - RNA, 1562 nt, synthetic construct
  misc_feature 1..1562: note = mRNA a-1 (A100) (opt1) from Homo sapiens__NP_000448.3__HNF4A(39-474)(K447R_K470R)
  source 1..1562: mol_type = other RNA
aggagagtcccgcagtcggcgtccagcggctctgcttgttcgtgtgtgtgtcgttgcaggccttattcaagcttaccatggacaccagcccgtccgaggggaccaacctgaacgcccccaacagcctgggcgtgtccgccctctgcgccatctgcggggaccgggcgacgggcaagcactacggggccagctcctgcgacggctgcaagggcttcttccgccggagcgtccgcaagaaccacatgtactcctgccggttcagccgccagtgcgtggtggacaaggacaagcggaaccagtgccgctactgccggctgaagaagtgcttccgcgccgggatgaagaaggaggccgtccagaacgagcgggaccgcatctccacccggcgcagctcctacgaggacagctccctgcccagcatcaacgcgctcctgcaggccgaggtgctgtcccggcagatcaccagccccgtgtccggcatcaacggggacatccgcgccaagaagatcgccagcatcgccgacgtctgcgagagcatgaaggagcagctcctggtgctggtggagtgggcgaagtacatcccggccttctgcgagctccccctggacgaccaggtcgccctgctccgggcccacgccggcgagcacctcctgctgggggcgaccaagcgctccatggtgttcaaggacgtgctgctgctcggcaacgactacatcgtcccccggcactgccccgagctggccgagatgagccgcgtgtccatccggatcctggacgagctcgtgctgccgttccaggagctgcagatcgacgacaacgagtacgcctacctcaaggccatcatcttcttcgaccccgacgccaagggcctgagcgaccccgggaagatcaagcgcctgcgctcccaggtccaggtgagcctcgaggactacatcaacgaccggcagtacgactcccgcggccggttcggggagctgctgctcctgctgcccacgctccagagcatcacctggcagatgatcgagcagatccagttcatcaagctgttcggcatggcgaagatcgacaacctgctccaggagatgctgctgggcgggtccccgagcgacgcgccccacgcccaccaccccctccacccccacctgatgcaggagcacatgggcaccaacgtgatcgtcgccaacaccatgccgacgcacctgtccaacgggcagatgtgcgagtggccccgcccccggggccaggccgccacccccgagaccccgcagcccagcccgcccgggggctccggcagcgagccctaccggctgctccccggggccgtggccaccatcgtgaagcccctgtccgccatcccccagccgacgatcacccggcaggaggtcatctgaggactagtccctgttcccagagcccacttttttttctttttttgaaataaaatagcctgtctttcagatctaaaaaaaaaaaaaaaaaaaaaaaaaaaaaaaaaaaaaaaaaaaaaaaaaaaaaaaaaaaaaaaaaaaaaaaaaaaaaaaaaaaaaaaaaaaaaaaaaaaa

SEQ ID NO: 5142 - RNA, 1562 nt, synthetic construct
  misc_feature 1..1562: note = mRNA a-1 (A100) (opt1) from Homo sapiens__NP_000448.3__HNF4A(39-474)(K458R)
  source 1..1562: mol_type = other RNA
aggagagtcccgcagtcggcgtccagcggctctgcttgttcgtgtgtgtgtcgttgcaggccttattcaagcttaccatggacaccagcccgtccgaggggaccaacctgaacgcccccaacagcctgggcgtgtccgccctctgcgccatctgcggggaccgggcgacgggcaagcactacggggccagctcctgcgacggctgcaagggcttcttccgccggagcgtccgcaagaaccacatgtactcctgccggttcagccgccagtgcgtggtggacaaggacaagcggaaccagtgccgctactgccggctgaagaagtgcttccgcgccgggatgaagaaggaggccgtccagaacgagcgggaccgcatctccacccggcgcagctcctacgaggacagctccctgcccagcatcaacgcgctcctgcaggccgaggtgctgtcccggcagatcaccagccccgtgtccggcatcaacggggacatccgcgccaagaagatcgccagcatcgccgacgtctgcgagagcatgaaggagcagctcctggtgctggtggagtgggcgaagtacatcccggccttctgcgagctccccctggacgaccaggtcgccctgctccgggcccacgccggcgagcacctcctgctgggggcgaccaagcgctccatggtgttcaaggacgtgctgctgctcggcaacgactacatcgtcccccggcactgccccgagctggccgagatgagccgcgtgtccatccggatcctggacgagctcgtgctgccgttccaggagctgcagatcgacgacaacgagtacgcctacctcaaggccatcatcttcttcgaccccgacgccaagggcctgagcgaccccgggaagatcaagcgcctgcgctcccaggtccaggtgagcctcgaggactacatcaacgaccggcagtacgactcccgcggccggttcggggagctgctgctcctgctgcccacgctccagagcatcacctggcagatgatcgagcagatccagttcatcaagctgttcggcatggcgaagatcgacaacctgctccaggagatgctgctgggcgggtccccgagcgacgcgccccacgcccaccaccccctccacccccacctgatgcaggagcacatgggcaccaacgtgatcgtcgccaacaccatgccgacgcacctgtccaacgggcagatgtgcgagtggccccgcccccggggccaggccgccacccccgagaccccgcagcccagcccgcccgggggctccggcagcgagccctacaagctgctccccggggccgtggccaccatcgtgcggcccctgtccgccatcccccagccgacgatcaccaagcaggaggtcatctgaggactagtccctgttcccagagcccacttttttttctttttttgaaataaaatagcctgtctttcagatctaaaaaaaaaaaaaaaaaaaaaaaaaaaaaaaaaaaaaaaaaaaaaaaaaaaaaaaaaaaaaaaaaaaaaaaaaaaaaaaaaaaaaaaaaaaaaaaaaaaa

SEQ ID NO: 5143 - RNA, 1562 nt, synthetic construct
  misc_feature 1..1562: note = mRNA a-1 (A100) (opt1) from Homo sapiens__NP_000448.3__HNF4A(39-474)(K106R_K108R_K126R_K127R )
  source 1..1562: mol_type = other RNA
aggagagtcccgcagtcggcgtccagcggctctgcttgttcgtgtgtgtgtcgttgcaggccttattcaagcttaccatggacaccagcccgtccgaggggaccaacctgaacgcccccaacagcctgggcgtgtccgccctctgcgccatctgcggggaccgggcgacgggcaagcactacggggccagctcctgcgacggctgcaagggcttcttccgccggagcgtccgcaagaaccacatgtactcctgccggttcagccgccagtgcgtggtggaccgcgaccggcggaaccagtgccgctactgccggctgaagaagtgcttccgcgccgggatgcgccgcgaggccgtccagaacgagcgggaccgcatctccacccggcgcagctcctacgaggacagctccctgcccagcatcaacgcgctcctgcaggccgaggtgctgtcccggcagatcaccagccccgtgtccggcatcaacggggacatccgcgccaagaagatcgccagcatcgccgacgtctgcgagagcatgaaggagcagctcctggtgctggtggagtgggcgaagtacatcccggccttctgcgagctccccctggacgaccaggtcgccctgctccgggcccacgccggcgagcacctcctgctgggggcgaccaagcgctccatggtgttcaaggacgtgctgctgctcggcaacgactacatcgtcccccggcactgccccgagctggccgagatgagccgcgtgtccatccggatcctggacgagctcgtgctgccgttccaggagctgcagatcgacgacaacgagtacgcctacctcaaggccatcatcttcttcgaccccgacgccaagggcctgagcgaccccgggaagatcaagcgcctgcgctcccaggtccaggtgagcctcgaggactacatcaacgaccggcagtacgactcccgcggccggttcggggagctgctgctcctgctgcccacgctccagagcatcacctggcagatgatcgagcagatccagttcatcaagctgttcggcatggcgaagatcgacaacctgctccaggagatgctgctgggcgggtccccgagcgacgcgccccacgcccaccaccccctccacccccacctgatgcaggagcacatgggcaccaacgtgatcgtcgccaacaccatgccgacgcacctgtccaacgggcagatgtgcgagtggccccgcccccggggccaggccgccacccccgagaccccgcagcccagcccgcccgggggctccggcagcgagccctacaagctgctccccggggccgtggccaccatcgtgaagcccctgtccgccatcccccagccgacgatcaccaagcaggaggtcatctgaggactagtccctgttcccagagcccacttttttttctttttttgaaataaaatagcctgtctttcagatctaaaaaaaaaaaaaaaaaaaaaaaaaaaaaaaaaaaaaaaaaaaaaaaaaaaaaaaaaaaaaaaaaaaaaaaaaaaaaaaaaaaaaaaaaaaaaaaaaaaa

SEQ ID NO: 5144 - RNA, 1562 nt, synthetic construct
  misc_feature 1..1562: note = mRNA a-1 (A100) (opt1) from Homo sapiens__NP_000448.3__HNF4A(39-474)(E285Q)
  source 1..1562: mol_type = other RNA
aggagagtcccgcagtcggcgtccagcggctctgcttgttcgtgtgtgtgtcgttgcaggccttattcaagcttaccatggacaccagcccgtccgaggggaccaacctgaacgcccccaacagcctgggcgtgtccgccctctgcgccatctgcggggaccgggcgacgggcaagcactacggggccagctcctgcgacggctgcaagggcttcttccgccggagcgtccgcaagaaccacatgtactcctgccggttcagccgccagtgcgtggtggacaaggacaagcggaaccagtgccgctactgccggctgaagaagtgcttccgcgccgggatgaagaaggaggccgtccagaacgagcgggaccgcatctccacccggcgcagctcctacgaggacagctccctgcccagcatcaacgcgctcctgcaggccgaggtgctgtcccggcagatcaccagccccgtgtccggcatcaacggggacatccgcgccaagaagatcgccagcatcgccgacgtctgcgagagcatgaaggagcagctcctggtgctggtggagtgggcgaagtacatcccggccttctgcgagctccccctggacgaccaggtcgccctgctccgggcccacgccggcgagcacctcctgctgggggcgaccaagcgctccatggtgttcaaggacgtgctgctgctcggcaacgactacatcgtcccccggcactgccccgagctggccgagatgagccgcgtgtccatccggatcctggacgagctcgtgctgccgttccaggagctgcagatcgacgacaaccagtacgcctacctcaaggccatcatcttcttcgaccccgacgccaagggcctgagcgaccccgggaagatcaagcgcctgcgctcccaggtccaggtgagcctcgaggactacatcaacgaccggcagtacgactcccgcggccggttcggggagctgctgctcctgctgcccacgctccagagcatcacctggcagatgatcgagcagatccagttcatcaagctgttcggcatggcgaagatcgacaacctgctccaggagatgctgctgggcgggtccccgagcgacgcgccccacgcccaccaccccctccacccccacctgatgcaggagcacatgggcaccaacgtgatcgtcgccaacaccatgccgacgcacctgtccaacgggcagatgtgcgagtggccccgcccccggggccaggccgccacccccgagaccccgcagcccagcccgcccgggggctccggcagcgagccctacaagctgctccccggggccgtggccaccatcgtgaagcccctgtccgccatcccccagccgacgatcaccaagcaggaggtcatctgaggactagtccctgttcccagagcccacttttttttctttttttgaaataaaatagcctgtctttcagatctaaaaaaaaaaaaaaaaaaaaaaaaaaaaaaaaaaaaaaaaaaaaaaaaaaaaaaaaaaaaaaaaaaaaaaaaaaaaaaaaaaaaaaaaaaaaaaaaaaaa

SEQ ID NO: 5145 - RNA, 1562 nt, synthetic construct
  misc_feature 1..1562: note = mRNA a-1 (A100) (opt1) from Homo sapiens__NP_000448.3__HNF4A(39-474)(T166E)
  source 1..1562: mol_type = other RNA
aggagagtcccgcagtcggcgtccagcggctctgcttgttcgtgtgtgtgtcgttgcaggccttattcaagcttaccatggacaccagcccgtccgaggggaccaacctgaacgcccccaacagcctgggcgtgtccgccctctgcgccatctgcggggaccgggcgacgggcaagcactacggggccagctcctgcgacggctgcaagggcttcttccgccggagcgtccgcaagaaccacatgtactcctgccggttcagccgccagtgcgtggtggacaaggacaagcggaaccagtgccgctactgccggctgaagaagtgcttccgcgccgggatgaagaaggaggccgtccagaacgagcgggaccgcatctccacccggcgcagctcctacgaggacagctccctgcccagcatcaacgcgctcctgcaggccgaggtgctgtcccggcagatcgagagccccgtgtccggcatcaacggggacatccgcgccaagaagatcgccagcatcgccgacgtctgcgagagcatgaaggagcagctcctggtgctggtggagtgggcgaagtacatcccggccttctgcgagctccccctggacgaccaggtcgccctgctccgggcccacgccggcgagcacctcctgctgggggcgaccaagcgctccatggtgttcaaggacgtgctgctgctcggcaacgactacatcgtcccccggcactgccccgagctggccgagatgagccgcgtgtccatccggatcctggacgagctcgtgctgccgttccaggagctgcagatcgacgacaacgagtacgcctacctcaaggccatcatcttcttcgaccccgacgccaagggcctgagcgaccccgggaagatcaagcgcctgcgctcccaggtccaggtgagcctcgaggactacatcaacgaccggcagtacgactcccgcggccggttcggggagctgctgctcctgctgcccacgctccagagcatcacctggcagatgatcgagcagatccagttcatcaagctgttcggcatggcgaagatcgacaacctgctccaggagatgctgctgggcgggtccccgagcgacgcgccccacgcccaccaccccctccacccccacctgatgcaggagcacatgggcaccaacgtgatcgtcgccaacaccatgccgacgcacctgtccaacgggcagatgtgcgagtggccccgcccccggggccaggccgccacccccgagaccccgcagcccagcccgcccgggggctccggcagcgagccctacaagctgctccccggggccgtggccaccatcgtgaagcccctgtccgccatcccccagccgacgatcaccaagcaggaggtcatctgaggactagtccctgttcccagagcccacttttttttctttttttgaaataaaatagcctgtctttcagatctaaaaaaaaaaaaaaaaaaaaaaaaaaaaaaaaaaaaaaaaaaaaaaaaaaaaaaaaaaaaaaaaaaaaaaaaaaaaaaaaaaaaaaaaaaaaaaaaaaaa

SEQ ID NO: 5146 - RNA, 1562 nt, synthetic construct
  misc_feature 1..1562: note = mRNA a-1 (A100) (opt1) from Homo sapiens__NP_000448.3__HNF4A(39-474)(S148A)
  source 1..1562: mol_type = other RNA
aggagagtcccgcagtcggcgtccagcggctctgcttgttcgtgtgtgtgtcgttgcaggccttattcaagcttaccatggacaccagcccgtccgaggggaccaacctgaacgcccccaacagcctgggcgtgtccgccctctgcgccatctgcggggaccgggcgacgggcaagcactacggggccagctcctgcgacggctgcaagggcttcttccgccggagcgtccgcaagaaccacatgtactcctgccggttcagccgccagtgcgtggtggacaaggacaagcggaaccagtgccgctactgccggctgaagaagtgcttccgcgccgggatgaagaaggaggccgtccagaacgagcgggaccgcatctccacccggcgcagctcctacgaggacagcgcgctgcccagcatcaacgcgctcctgcaggccgaggtgctgtcccggcagatcaccagccccgtgtccggcatcaacggggacatccgcgccaagaagatcgccagcatcgccgacgtctgcgagagcatgaaggagcagctcctggtgctggtggagtgggcgaagtacatcccggccttctgcgagctccccctggacgaccaggtcgccctgctccgggcccacgccggcgagcacctcctgctgggggcgaccaagcgctccatggtgttcaaggacgtgctgctgctcggcaacgactacatcgtcccccggcactgccccgagctggccgagatgagccgcgtgtccatccggatcctggacgagctcgtgctgccgttccaggagctgcagatcgacgacaacgagtacgcctacctcaaggccatcatcttcttcgaccccgacgccaagggcctgagcgaccccgggaagatcaagcgcctgcgctcccaggtccaggtgagcctcgaggactacatcaacgaccggcagtacgactcccgcggccggttcggggagctgctgctcctgctgcccacgctccagagcatcacctggcagatgatcgagcagatccagttcatcaagctgttcggcatggcgaagatcgacaacctgctccaggagatgctgctgggcgggtccccgagcgacgcgccccacgcccaccaccccctccacccccacctgatgcaggagcacatgggcaccaacgtgatcgtcgccaacaccatgccgacgcacctgtccaacgggcagatgtgcgagtggccccgcccccggggccaggccgccacccccgagaccccgcagcccagcccgcccgggggctccggcagcgagccctacaagctgctccccggggccgtggccaccatcgtgaagcccctgtccgccatcccccagccgacgatcaccaagcaggaggtcatctgaggactagtccctgttcccagagcccacttttttttctttttttgaaataaaatagcctgtctttcagatctaaaaaaaaaaaaaaaaaaaaaaaaaaaaaaaaaaaaaaaaaaaaaaaaaaaaaaaaaaaaaaaaaaaaaaaaaaaaaaaaaaaaaaaaaaaaaaaaaaaa

SEQ ID NO: 5147 - RNA, 1562 nt, synthetic construct
  misc_feature 1..1562: note = mRNA a-1 (A100) (opt1) from Homo sapiens__NP_000448.3__HNF4A(39-474)(S148E)
  source 1..1562: mol_type = other RNA
aggagagtcccgcagtcggcgtccagcggctctgcttgttcgtgtgtgtgtcgttgcaggccttattcaagcttaccatggacaccagcccgtccgaggggaccaacctgaacgcccccaacagcctgggcgtgtccgccctctgcgccatctgcggggaccgggcgacgggcaagcactacggggccagctcctgcgacggctgcaagggcttcttccgccggagcgtccgcaagaaccacatgtactcctgccggttcagccgccagtgcgtggtggacaaggacaagcggaaccagtgccgctactgccggctgaagaagtgcttccgcgccgggatgaagaaggaggccgtccagaacgagcgggaccgcatctccacccggcgcagctcctacgaggacagcgagctgcccagcatcaacgcgctcctgcaggccgaggtgctgtcccggcagatcaccagccccgtgtccggcatcaacggggacatccgcgccaagaagatcgccagcatcgccgacgtctgcgagagcatgaaggagcagctcctggtgctggtggagtgggcgaagtacatcccggccttctgcgagctccccctggacgaccaggtcgccctgctccgggcccacgccggcgagcacctcctgctgggggcgaccaagcgctccatggtgttcaaggacgtgctgctgctcggcaacgactacatcgtcccccggcactgccccgagctggccgagatgagccgcgtgtccatccggatcctggacgagctcgtgctgccgttccaggagctgcagatcgacgacaacgagtacgcctacctcaaggccatcatcttcttcgaccccgacgccaagggcctgagcgaccccgggaagatcaagcgcctgcgctcccaggtccaggtgagcctcgaggactacatcaacgaccggcagtacgactcccgcggccggttcggggagctgctgctcctgctgcccacgctccagagcatcacctggcagatgatcgagcagatccagttcatcaagctgttcggcatggcgaagatcgacaacctgctccaggagatgctgctgggcgggtccccgagcgacgcgccccacgcccaccaccccctccacccccacctgatgcaggagcacatgggcaccaacgtgatcgtcgccaacaccatgccgacgcacctgtccaacgggcagatgtgcgagtggccccgcccccggggccaggccgccacccccgagaccccgcagcccagcccgcccgggggctccggcagcgagccctacaagctgctccccggggccgtggccaccatcgtgaagcccctgtccgccatcccccagccgacgatcaccaagcaggaggtcatctgaggactagtccctgttcccagagcccacttttttttctttttttgaaataaaatagcctgtctttcagatctaaaaaaaaaaaaaaaaaaaaaaaaaaaaaaaaaaaaaaaaaaaaaaaaaaaaaaaaaaaaaaaaaaaaaaaaaaaaaaaaaaaaaaaaaaaaaaaaaaaa

SEQ ID NO: 5148 - RNA, 1562 nt, synthetic construct
  misc_feature 1..1562: note = mRNA a-1 (A100) (opt1) from Homo sapiens__NP_000448.3__HNF4A(39-474)(S183A)
  source 1..1562: mol_type = other RNA
aggagagtcccgcagtcggcgtccagcggctctgcttgttcgtgtgtgtgtcgttgcaggccttattcaagcttaccatggacaccagcccgtccgaggggaccaacctgaacgcccccaacagcctgggcgtgtccgccctctgcgccatctgcggggaccgggcgacgggcaagcactacggggccagctcctgcgacggctgcaagggcttcttccgccggagcgtccgcaagaaccacatgtactcctgccggttcagccgccagtgcgtggtggacaaggacaagcggaaccagtgccgctactgccggctgaagaagtgcttccgcgccgggatgaagaaggaggccgtccagaacgagcgggaccgcatctccacccggcgcagctcctacgaggacagctccctgcccagcatcaacgcgctcctgcaggccgaggtgctgtcccggcagatcaccagccccgtgtccggcatcaacggggacatccgcgccaagaagatcgccgcgatcgccgacgtctgcgagagcatgaaggagcagctcctggtgctggtggagtgggcgaagtacatcccggccttctgcgagctccccctggacgaccaggtcgccctgctccgggcccacgccggcgagcacctcctgctgggggcgaccaagcgctccatggtgttcaaggacgtgctgctgctcggcaacgactacatcgtcccccggcactgccccgagctggccgagatgagccgcgtgtccatccggatcctggacgagctcgtgctgccgttccaggagctgcagatcgacgacaacgagtacgcctacctcaaggccatcatcttcttcgaccccgacgccaagggcctgagcgaccccgggaagatcaagcgcctgcgctcccaggtccaggtgagcctcgaggactacatcaacgaccggcagtacgactcccgcggccggttcggggagctgctgctcctgctgcccacgctccagagcatcacctggcagatgatcgagcagatccagttcatcaagctgttcggcatggcgaagatcgacaacctgctccaggagatgctgctgggcgggtccccgagcgacgcgccccacgcccaccaccccctccacccccacctgatgcaggagcacatgggcaccaacgtgatcgtcgccaacaccatgccgacgcacctgtccaacgggcagatgtgcgagtggccccgcccccggggccaggccgccacccccgagaccccgcagcccagcccgcccgggggctccggcagcgagccctacaagctgctccccggggccgtggccaccatcgtgaagcccctgtccgccatcccccagccgacgatcaccaagcaggaggtcatctgaggactagtccctgttcccagagcccacttttttttctttttttgaaataaaatagcctgtctttcagatctaaaaaaaaaaaaaaaaaaaaaaaaaaaaaaaaaaaaaaaaaaaaaaaaaaaaaaaaaaaaaaaaaaaaaaaaaaaaaaaaaaaaaaaaaaaaaaaaaaaa

SEQ ID NO: 5149 - RNA, 1562 nt, synthetic construct
  misc_feature 1..1562: note = mRNA a-1 (A100) (opt1) from Homo sapiens__NP_000448.3__HNF4A(39-474)(S183E)
  source 1..1562: mol_type = other RNA
aggagagtcccgcagtcggcgtccagcggctctgcttgttcgtgtgtgtgtcgttgcaggccttattcaagcttaccatggacaccagcccgtccgaggggaccaacctgaacgcccccaacagcctgggcgtgtccgccctctgcgccatctgcggggaccgggcgacgggcaagcactacggggccagctcctgcgacggctgcaagggcttcttccgccggagcgtccgcaagaaccacatgtactcctgccggttcagccgccagtgcgtggtggacaaggacaagcggaaccagtgccgctactgccggctgaagaagtgcttccgcgccgggatgaagaaggaggccgtccagaacgagcgggaccgcatctccacccggcgcagctcctacgaggacagctccctgcccagcatcaacgcgctcctgcaggccgaggtgctgtcccggcagatcaccagccccgtgtccggcatcaacggggacatccgcgccaagaagatcgccgagatcgccgacgtctgcgagagcatgaaggagcagctcctggtgctggtggagtgggcgaagtacatcccggccttctgcgagctccccctggacgaccaggtcgccctgctccgggcccacgccggcgagcacctcctgctgggggcgaccaagcgctccatggtgttcaaggacgtgctgctgctcggcaacgactacatcgtcccccggcactgccccgagctggccgagatgagccgcgtgtccatccggatcctggacgagctcgtgctgccgttccaggagctgcagatcgacgacaacgagtacgcctacctcaaggccatcatcttcttcgaccccgacgccaagggcctgagcgaccccgggaagatcaagcgcctgcgctcccaggtccaggtgagcctcgaggactacatcaacgaccggcagtacgactcccgcggccggttcggggagctgctgctcctgctgcccacgctccagagcatcacctggcagatgatcgagcagatccagttcatcaagctgttcggcatggcgaagatcgacaacctgctccaggagatgctgctgggcgggtccccgagcgacgcgccccacgcccaccaccccctccacccccacctgatgcaggagcacatgggcaccaacgtgatcgtcgccaacaccatgccgacgcacctgtccaacgggcagatgtgcgagtggccccgcccccggggccaggccgccacccccgagaccccgcagcccagcccgcccgggggctccggcagcgagccctacaagctgctccccggggccgtggccaccatcgtgaagcccctgtccgccatcccccagccgacgatcaccaagcaggaggtcatctgaggactagtccctgttcccagagcccacttttttttctttttttgaaataaaatagcctgtctttcagatctaaaaaaaaaaaaaaaaaaaaaaaaaaaaaaaaaaaaaaaaaaaaaaaaaaaaaaaaaaaaaaaaaaaaaaaaaaaaaaaaaaaaaaaaaaaaaaaaaaaa

SEQ ID NO: 5150 - RNA, 1562 nt, synthetic construct
  misc_feature 1..1562: note = mRNA a-1 (A100) (opt1) from Homo sapiens__NP_000448.3__HNF4A(39-474)(S461A)
  source 1..1562: mol_type = other RNA
aggagagtcccgcagtcggcgtccagcggctctgcttgttcgtgtgtgtgtcgttgcaggccttattcaagcttaccatggacaccagcccgtccgaggggaccaacctgaacgcccccaacagcctgggcgtgtccgccctctgcgccatctgcggggaccgggcgacgggcaagcactacggggccagctcctgcgacggctgcaagggcttcttccgccggagcgtccgcaagaaccacatgtactcctgccggttcagccgccagtgcgtggtggacaaggacaagcggaaccagtgccgctactgccggctgaagaagtgcttccgcgccgggatgaagaaggaggccgtccagaacgagcgggaccgcatctccacccggcgcagctcctacgaggacagctccctgcccagcatcaacgcgctcctgcaggccgaggtgctgtcccggcagatcaccagccccgtgtccggcatcaacggggacatccgcgccaagaagatcgccagcatcgccgacgtctgcgagagcatgaaggagcagctcctggtgctggtggagtgggcgaagtacatcccggccttctgcgagctccccctggacgaccaggtcgccctgctccgggcccacgccggcgagcacctcctgctgggggcgaccaagcgctccatggtgttcaaggacgtgctgctgctcggcaacgactacatcgtcccccggcactgccccgagctggccgagatgagccgcgtgtccatccggatcctggacgagctcgtgctgccgttccaggagctgcagatcgacgacaacgagtacgcctacctcaaggccatcatcttcttcgaccccgacgccaagggcctgagcgaccccgggaagatcaagcgcctgcgctcccaggtccaggtgagcctcgaggactacatcaacgaccggcagtacgactcccgcggccggttcggggagctgctgctcctgctgcccacgctccagagcatcacctggcagatgatcgagcagatccagttcatcaagctgttcggcatggcgaagatcgacaacctgctccaggagatgctgctgggcgggtccccgagcgacgcgccccacgcccaccaccccctccacccccacctgatgcaggagcacatgggcaccaacgtgatcgtcgccaacaccatgccgacgcacctgtccaacgggcagatgtgcgagtggccccgcccccggggccaggccgccacccccgagaccccgcagcccagcccgcccgggggctccggcagcgagccctacaagctgctccccggggccgtggccaccatcgtgaagcccctggcggccatcccccagccgacgatcaccaagcaggaggtcatctgaggactagtccctgttcccagagcccacttttttttctttttttgaaataaaatagcctgtctttcagatctaaaaaaaaaaaaaaaaaaaaaaaaaaaaaaaaaaaaaaaaaaaaaaaaaaaaaaaaaaaaaaaaaaaaaaaaaaaaaaaaaaaaaaaaaaaaaaaaaaaa

SEQ ID NO: 5151 - RNA, 1562 nt, synthetic construct
  misc_feature 1..1562: note = mRNA a-1 (A100) (opt1) from Homo sapiens__NP_000448.3__HNF4A(39-474)(S461E)
  source 1..1562: mol_type = other RNA
aggagagtcccgcagtcggcgtccagcggctctgcttgttcgtgtgtgtgtcgttgcaggccttattcaagcttaccatggacaccagcccgtccgaggggaccaacctgaacgcccccaacagcctgggcgtgtccgccctctgcgccatctgcggggaccgggcgacgggcaagcactacggggccagctcctgcgacggctgcaagggcttcttccgccggagcgtccgcaagaaccacatgtactcctgccggttcagccgccagtgcgtggtggacaaggacaagcggaaccagtgccgctactgccggctgaagaagtgcttccgcgccgggatgaagaaggaggccgtccagaacgagcgggaccgcatctccacccggcgcagctcctacgaggacagctccctgcccagcatcaacgcgctcctgcaggccgaggtgctgtcccggcagatcaccagccccgtgtccggcatcaacggggacatccgcgccaagaagatcgccagcatcgccgacgtctgcgagagcatgaaggagcagctcctggtgctggtggagtgggcgaagtacatcccggccttctgcgagctccccctggacgaccaggtcgccctgctccgggcccacgccggcgagcacctcctgctgggggcgaccaagcgctccatggtgttcaaggacgtgctgctgctcggcaacgactacatcgtcccccggcactgccccgagctggccgagatgagccgcgtgtccatccggatcctggacgagctcgtgctgccgttccaggagctgcagatcgacgacaacgagtacgcctacctcaaggccatcatcttcttcgaccccgacgccaagggcctgagcgaccccgggaagatcaagcgcctgcgctcccaggtccaggtgagcctcgaggactacatcaacgaccggcagtacgactcccgcggccggttcggggagctgctgctcctgctgcccacgctccagagcatcacctggcagatgatcgagcagatccagttcatcaagctgttcggcatggcgaagatcgacaacctgctccaggagatgctgctgggcgggtccccgagcgacgcgccccacgcccaccaccccctccacccccacctgatgcaggagcacatgggcaccaacgtgatcgtcgccaacaccatgccgacgcacctgtccaacgggcagatgtgcgagtggccccgcccccggggccaggccgccacccccgagaccccgcagcccagcccgcccgggggctccggcagcgagccctacaagctgctccccggggccgtggccaccatcgtgaagcccctggaggccatcccccagccgacgatcaccaagcaggaggtcatctgaggactagtccctgttcccagagcccacttttttttctttttttgaaataaaatagcctgtctttcagatctaaaaaaaaaaaaaaaaaaaaaaaaaaaaaaaaaaaaaaaaaaaaaaaaaaaaaaaaaaaaaaaaaaaaaaaaaaaaaaaaaaaaaaaaaaaaaaaaaaaa

SEQ ID NO: 5152 - RNA, 1562 nt, synthetic construct
  misc_feature 1..1562: note = mRNA a-1 (A100) (opt1) from Homo sapiens__NP_000448.3__HNF4A(39-474)(S142A_S143A_S313A)
  source 1..1562: mol_type = other RNA
aggagagtcccgcagtcggcgtccagcggctctgcttgttcgtgtgtgtgtcgttgcaggccttattcaagcttaccatggacaccagcccgtccgaggggaccaacctgaacgcccccaacagcctgggcgtgtccgccctctgcgccatctgcggggaccgggcgacgggcaagcactacggggccagctcctgcgacggctgcaagggcttcttccgccggagcgtccgcaagaaccacatgtactcctgccggttcagccgccagtgcgtggtggacaaggacaagcggaaccagtgccgctactgccggctgaagaagtgcttccgcgccgggatgaagaaggaggccgtccagaacgagcgggaccgcatctccacccggcgcgcggcctacgaggacagctccctgcccagcatcaacgcgctcctgcaggccgaggtgctgtcccggcagatcaccagccccgtgtccggcatcaacggggacatccgcgccaagaagatcgccagcatcgccgacgtctgcgagagcatgaaggagcagctcctggtgctggtggagtgggcgaagtacatcccggccttctgcgagctccccctggacgaccaggtcgccctgctccgggcccacgccggcgagcacctcctgctgggggcgaccaagcgctccatggtgttcaaggacgtgctgctgctcggcaacgactacatcgtcccccggcactgccccgagctggccgagatgagccgcgtgtccatccggatcctggacgagctcgtgctgccgttccaggagctgcagatcgacgacaacgagtacgcctacctcaaggccatcatcttcttcgaccccgacgccaagggcctgagcgaccccgggaagatcaagcgcctgcgcgcgcaggtccaggtgagcctcgaggactacatcaacgaccggcagtacgactcccgcggccggttcggggagctgctgctcctgctgcccacgctccagagcatcacctggcagatgatcgagcagatccagttcatcaagctgttcggcatggcgaagatcgacaacctgctccaggagatgctgctgggcgggtccccgagcgacgcgccccacgcccaccaccccctccacccccacctgatgcaggagcacatgggcaccaacgtgatcgtcgccaacaccatgccgacgcacctgtccaacgggcagatgtgcgagtggccccgcccccggggccaggccgccacccccgagaccccgcagcccagcccgcccgggggctccggcagcgagccctacaagctgctccccggggccgtggccaccatcgtgaagcccctgtccgccatcccccagccgacgatcaccaagcaggaggtcatctgaggactagtccctgttcccagagcccacttttttttctttttttgaaataaaatagcctgtctttcagatctaaaaaaaaaaaaaaaaaaaaaaaaaaaaaaaaaaaaaaaaaaaaaaaaaaaaaaaaaaaaaaaaaaaaaaaaaaaaaaaaaaaaaaaaaaaaaaaaaaaa

SEQ ID NO: 5153 - RNA, 1562 nt, synthetic construct
  misc_feature 1..1562: note = mRNA a-1 (A100) (opt1) from Homo sapiens__NP_000448.3__HNF4A(39-474)(S142A_S143A_S313A_K458R )
  source 1..1562: mol_type = other RNA
aggagagtcccgcagtcggcgtccagcggctctgcttgttcgtgtgtgtgtcgttgcaggccttattcaagcttaccatggacaccagcccgtccgaggggaccaacctgaacgcccccaacagcctgggcgtgtccgccctctgcgccatctgcggggaccgggcgacgggcaagcactacggggccagctcctgcgacggctgcaagggcttcttccgccggagcgtccgcaagaaccacatgtactcctgccggttcagccgccagtgcgtggtggacaaggacaagcggaaccagtgccgctactgccggctgaagaagtgcttccgcgccgggatgaagaaggaggccgtccagaacgagcgggaccgcatctccacccggcgcgcggcctacgaggacagctccctgcccagcatcaacgcgctcctgcaggccgaggtgctgtcccggcagatcaccagccccgtgtccggcatcaacggggacatccgcgccaagaagatcgccagcatcgccgacgtctgcgagagcatgaaggagcagctcctggtgctggtggagtgggcgaagtacatcccggccttctgcgagctccccctggacgaccaggtcgccctgctccgggcccacgccggcgagcacctcctgctgggggcgaccaagcgctccatggtgttcaaggacgtgctgctgctcggcaacgactacatcgtcccccggcactgccccgagctggccgagatgagccgcgtgtccatccggatcctggacgagctcgtgctgccgttccaggagctgcagatcgacgacaacgagtacgcctacctcaaggccatcatcttcttcgaccccgacgccaagggcctgagcgaccccgggaagatcaagcgcctgcgcgcgcaggtccaggtgagcctcgaggactacatcaacgaccggcagtacgactcccgcggccggttcggggagctgctgctcctgctgcccacgctccagagcatcacctggcagatgatcgagcagatccagttcatcaagctgttcggcatggcgaagatcgacaacctgctccaggagatgctgctgggcgggtccccgagcgacgcgccccacgcccaccaccccctccacccccacctgatgcaggagcacatgggcaccaacgtgatcgtcgccaacaccatgccgacgcacctgtccaacgggcagatgtgcgagtggccccgcccccggggccaggccgccacccccgagaccccgcagcccagcccgcccgggggctccggcagcgagccctacaagctgctccccggggccgtggccaccatcgtgcggcccctgtccgccatcccccagccgacgatcaccaagcaggaggtcatctgaggactagtccctgttcccagagcccacttttttttctttttttgaaataaaatagcctgtctttcagatctaaaaaaaaaaaaaaaaaaaaaaaaaaaaaaaaaaaaaaaaaaaaaaaaaaaaaaaaaaaaaaaaaaaaaaaaaaaaaaaaaaaaaaaaaaaaaaaaaaaa

SEQ ID NO: 5154 - RNA, 1562 nt, synthetic construct
  misc_feature 1..1562: note = mRNA a-1 (A100) (opt1) from Homo sapiens__NP_000448.3__HNF4A(39-474)(S142A_S143A_S167A_S313A _S378A_T429A_T432A_S436A_K458R)
  source 1..1562: mol_type = other RNA
aggagagtcccgcagtcggcgtccagcggctctgcttgttcgtgtgtgtgtcgttgcaggccttattcaagcttaccatggacaccagcccgtccgaggggaccaacctgaacgcccccaacagcctgggcgtgtccgccctctgcgccatctgcggggaccgggcgacgggcaagcactacggggccagctcctgcgacggctgcaagggcttcttccgccggagcgtccgcaagaaccacatgtactcctgccggttcagccgccagtgcgtggtggacaaggacaagcggaaccagtgccgctactgccggctgaagaagtgcttccgcgccgggatgaagaaggaggccgtccagaacgagcgggaccgcatctccacccggcgcgcggcctacgaggacagctccctgcccagcatcaacgcgctcctgcaggccgaggtgctgtcccggcagatcaccgcgcccgtgtccggcatcaacggggacatccgcgccaagaagatcgccagcatcgccgacgtctgcgagagcatgaaggagcagctcctggtgctggtggagtgggcgaagtacatcccggccttctgcgagctccccctggacgaccaggtcgccctgctccgggcccacgccggcgagcacctcctgctgggggcgaccaagcgctccatggtgttcaaggacgtgctgctgctcggcaacgactacatcgtcccccggcactgccccgagctggccgagatgagccgcgtgtccatccggatcctggacgagctcgtgctgccgttccaggagctgcagatcgacgacaacgagtacgcctacctcaaggccatcatcttcttcgaccccgacgccaagggcctgagcgaccccgggaagatcaagcgcctgcgcgcgcaggtccaggtgagcctcgaggactacatcaacgaccggcagtacgactcccgcggccggttcggggagctgctgctcctgctgcccacgctccagagcatcacctggcagatgatcgagcagatccagttcatcaagctgttcggcatggcgaagatcgacaacctgctccaggagatgctgctgggcggggcgccgagcgacgcgccccacgcccaccaccccctccacccccacctgatgcaggagcacatgggcaccaacgtgatcgtcgccaacaccatgccgacgcacctgtccaacgggcagatgtgcgagtggccccgcccccggggccaggccgccgcgcccgaggcgccgcagcccgcgccgcccgggggctccggcagcgagccctacaagctgctccccggggccgtggccaccatcgtgcggcccctgtccgccatcccccagccgacgatcaccaagcaggaggtcatctgaggactagtccctgttcccagagcccacttttttttctttttttgaaataaaatagcctgtctttcagatctaaaaaaaaaaaaaaaaaaaaaaaaaaaaaaaaaaaaaaaaaaaaaaaaaaaaaaaaaaaaaaaaaaaaaaaaaaaaaaaaaaaaaaaaaaaaaaaaaaaa

SEQ ID NO: 5155 - RNA, 1562 nt, synthetic construct
  misc_feature 1..1562: note = mRNA a-1 (A100) (opt1) from Homo sapiens__NP_000448.3__HNF4A(39-474)(S142A_S143A_S148A_S167A _S313A_S378A_T429A_T432A_S436A_K458R)
  source 1..1562: mol_type = other RNA
aggagagtcccgcagtcggcgtccagcggctctgcttgttcgtgtgtgtgtcgttgcaggccttattcaagcttaccatggacaccagcccgtccgaggggaccaacctgaacgcccccaacagcctgggcgtgtccgccctctgcgccatctgcggggaccgggcgacgggcaagcactacggggccagctcctgcgacggctgcaagggcttcttccgccggagcgtccgcaagaaccacatgtactcctgccggttcagccgccagtgcgtggtggacaaggacaagcggaaccagtgccgctactgccggctgaagaagtgcttccgcgccgggatgaagaaggaggccgtccagaacgagcgggaccgcatctccacccggcgcgcggcctacgaggacagcgcgctgcccagcatcaacgcgctcctgcaggccgaggtgctgtcccggcagatcaccgcgcccgtgtccggcatcaacggggacatccgcgccaagaagatcgccagcatcgccgacgtctgcgagagcatgaaggagcagctcctggtgctggtggagtgggcgaagtacatcccggccttctgcgagctccccctggacgaccaggtcgccctgctccgggcccacgccggcgagcacctcctgctgggggcgaccaagcgctccatggtgttcaaggacgtgctgctgctcggcaacgactacatcgtcccccggcactgccccgagctggccgagatgagccgcgtgtccatccggatcctggacgagctcgtgctgccgttccaggagctgcagatcgacgacaacgagtacgcctacctcaaggccatcatcttcttcgaccccgacgccaagggcctgagcgaccccgggaagatcaagcgcctgcgcgcgcaggtccaggtgagcctcgaggactacatcaacgaccggcagtacgactcccgcggccggttcggggagctgctgctcctgctgcccacgctccagagcatcacctggcagatgatcgagcagatccagttcatcaagctgttcggcatggcgaagatcgacaacctgctccaggagatgctgctgggcggggcgccgagcgacgcgccccacgcccaccaccccctccacccccacctgatgcaggagcacatgggcaccaacgtgatcgtcgccaacaccatgccgacgcacctgtccaacgggcagatgtgcgagtggccccgcccccggggccaggccgccgcgcccgaggcgccgcagcccgcgccgcccgggggctccggcagcgagccctacaagctgctccccggggccgtggccaccatcgtgcggcccctgtccgccatcccccagccgacgatcaccaagcaggaggtcatctgaggactagtccctgttcccagagcccacttttttttctttttttgaaataaaatagcctgtctttcagatctaaaaaaaaaaaaaaaaaaaaaaaaaaaaaaaaaaaaaaaaaaaaaaaaaaaaaaaaaaaaaaaaaaaaaaaaaaaaaaaaaaaaaaaaaaaaaaaaaaaa

SEQ ID NO: 5156 - RNA, 1562 nt, synthetic construct
  misc_feature 1..1562: note = mRNA a-1 (A100) (opt1) from Homo sapiens__NP_000448.3__HNF4A(39-474)(K106R_K108R_K126R_K127R _S142A_S143A_S148A_S167A_S313A_S378A_T429A_T432A_S436A_K458 R)
  source 1..1562: mol_type = other RNA
aggagagtcccgcagtcggcgtccagcggctctgcttgttcgtgtgtgtgtcgttgcaggccttattcaagcttaccatggacaccagcccgtccgaggggaccaacctgaacgcccccaacagcctgggcgtgtccgccctctgcgccatctgcggggaccgggcgacgggcaagcactacggggccagctcctgcgacggctgcaagggcttcttccgccggagcgtccgcaagaaccacatgtactcctgccggttcagccgccagtgcgtggtggaccgcgaccggcggaaccagtgccgctactgccggctgaagaagtgcttccgcgccgggatgcgccgcgaggccgtccagaacgagcgggaccgcatctccacccggcgcgcggcctacgaggacagcgcgctgcccagcatcaacgcgctcctgcaggccgaggtgctgtcccggcagatcaccgcgcccgtgtccggcatcaacggggacatccgcgccaagaagatcgccagcatcgccgacgtctgcgagagcatgaaggagcagctcctggtgctggtggagtgggcgaagtacatcccggccttctgcgagctccccctggacgaccaggtcgccctgctccgggcccacgccggcgagcacctcctgctgggggcgaccaagcgctccatggtgttcaaggacgtgctgctgctcggcaacgactacatcgtcccccggcactgccccgagctggccgagatgagccgcgtgtccatccggatcctggacgagctcgtgctgccgttccaggagctgcagatcgacgacaacgagtacgcctacctcaaggccatcatcttcttcgaccccgacgccaagggcctgagcgaccccgggaagatcaagcgcctgcgcgcgcaggtccaggtgagcctcgaggactacatcaacgaccggcagtacgactcccgcggccggttcggggagctgctgctcctgctgcccacgctccagagcatcacctggcagatgatcgagcagatccagttcatcaagctgttcggcatggcgaagatcgacaacctgctccaggagatgctgctgggcggggcgccgagcgacgcgccccacgcccaccaccccctccacccccacctgatgcaggagcacatgggcaccaacgtgatcgtcgccaacaccatgccgacgcacctgtccaacgggcagatgtgcgagtggccccgcccccggggccaggccgccgcgcccgaggcgccgcagcccgcgccgcccgggggctccggcagcgagccctacaagctgctccccggggccgtggccaccatcgtgcggcccctgtccgccatcccccagccgacgatcaccaagcaggaggtcatctgaggactagtccctgttcccagagcccacttttttttctttttttgaaataaaatagcctgtctttcagatctaaaaaaaaaaaaaaaaaaaaaaaaaaaaaaaaaaaaaaaaaaaaaaaaaaaaaaaaaaaaaaaaaaaaaaaaaaaaaaaaaaaaaaaaaaaaaaaaaaaa

SEQ ID NO: 5157 - RNA, 1562 nt, synthetic construct
  misc_feature 1..1562: note = mRNA a-1 (A100) (opt1) from Homo sapiens__NP_000448.3__HNF4A(39-474)(S142A_S143A_S148A_T166A _S167A_S313A_S378A_T429A_T432A_S436A_K458R)
  source 1..1562: mol_type = other RNA
aggagagtcccgcagtcggcgtccagcggctctgcttgttcgtgtgtgtgtcgttgcaggccttattcaagcttaccatggacaccagcccgtccgaggggaccaacctgaacgcccccaacagcctgggcgtgtccgccctctgcgccatctgcggggaccgggcgacgggcaagcactacggggccagctcctgcgacggctgcaagggcttcttccgccggagcgtccgcaagaaccacatgtactcctgccggttcagccgccagtgcgtggtggacaaggacaagcggaaccagtgccgctactgccggctgaagaagtgcttccgcgccgggatgaagaaggaggccgtccagaacgagcgggaccgcatctccacccggcgcgcggcctacgaggacagcgcgctgcccagcatcaacgcgctcctgcaggccgaggtgctgtcccggcagatcgcggcgcccgtgtccggcatcaacggggacatccgcgccaagaagatcgccagcatcgccgacgtctgcgagagcatgaaggagcagctcctggtgctggtggagtgggcgaagtacatcccggccttctgcgagctccccctggacgaccaggtcgccctgctccgggcccacgccggcgagcacctcctgctgggggcgaccaagcgctccatggtgttcaaggacgtgctgctgctcggcaacgactacatcgtcccccggcactgccccgagctggccgagatgagccgcgtgtccatccggatcctggacgagctcgtgctgccgttccaggagctgcagatcgacgacaacgagtacgcctacctcaaggccatcatcttcttcgaccccgacgccaagggcctgagcgaccccgggaagatcaagcgcctgcgcgcgcaggtccaggtgagcctcgaggactacatcaacgaccggcagtacgactcccgcggccggttcggggagctgctgctcctgctgcccacgctccagagcatcacctggcagatgatcgagcagatccagttcatcaagctgttcggcatggcgaagatcgacaacctgctccaggagatgctgctgggcggggcgccgagcgacgcgccccacgcccaccaccccctccacccccacctgatgcaggagcacatgggcaccaacgtgatcgtcgccaacaccatgccgacgcacctgtccaacgggcagatgtgcgagtggccccgcccccggggccaggccgccgcgcccgaggcgccgcagcccgcgccgcccgggggctccggcagcgagccctacaagctgctccccggggccgtggccaccatcgtgcggcccctgtccgccatcccccagccgacgatcaccaagcaggaggtcatctgaggactagtccctgttcccagagcccacttttttttctttttttgaaataaaatagcctgtctttcagatctaaaaaaaaaaaaaaaaaaaaaaaaaaaaaaaaaaaaaaaaaaaaaaaaaaaaaaaaaaaaaaaaaaaaaaaaaaaaaaaaaaaaaaaaaaaaaaaaaaaa

SEQ ID NO: 5158 - RNA, 1562 nt, synthetic construct
  misc_feature 1..1562: note = mRNA a-1 (A100) (opt1) from Homo sapiens__NP_000448.3__HNF4A(39-474)(S87A_S142A_S143A_S148A_ T166A_S167A_S313A_S378A_T429A_T432A_S436A_K458R)
  source 1..1562: mol_type = other RNA
aggagagtcccgcagtcggcgtccagcggctctgcttgttcgtgtgtgtgtcgttgcaggccttattcaagcttaccatggacaccagcccgtccgaggggaccaacctgaacgcccccaacagcctgggcgtgtccgccctctgcgccatctgcggggaccgggcgacgggcaagcactacggggccagctcctgcgacggctgcaagggcttcttccgccgggcggtccgcaagaaccacatgtactcctgccggttcagccgccagtgcgtggtggacaaggacaagcggaaccagtgccgctactgccggctgaagaagtgcttccgcgccgggatgaagaaggaggccgtccagaacgagcgggaccgcatctccacccggcgcgcggcctacgaggacagcgcgctgcccagcatcaacgcgctcctgcaggccgaggtgctgtcccggcagatcgcggcgcccgtgtccggcatcaacggggacatccgcgccaagaagatcgccagcatcgccgacgtctgcgagagcatgaaggagcagctcctggtgctggtggagtgggcgaagtacatcccggccttctgcgagctccccctggacgaccaggtcgccctgctccgggcccacgccggcgagcacctcctgctgggggcgaccaagcgctccatggtgttcaaggacgtgctgctgctcggcaacgactacatcgtcccccggcactgccccgagctggccgagatgagccgcgtgtccatccggatcctggacgagctcgtgctgccgttccaggagctgcagatcgacgacaacgagtacgcctacctcaaggccatcatcttcttcgaccccgacgccaagggcctgagcgaccccgggaagatcaagcgcctgcgcgcgcaggtccaggtgagcctcgaggactacatcaacgaccggcagtacgactcccgcggccggttcggggagctgctgctcctgctgcccacgctccagagcatcacctggcagatgatcgagcagatccagttcatcaagctgttcggcatggcgaagatcgacaacctgctccaggagatgctgctgggcggggcgccgagcgacgcgccccacgcccaccaccccctccacccccacctgatgcaggagcacatgggcaccaacgtgatcgtcgccaacaccatgccgacgcacctgtccaacgggcagatgtgcgagtggccccgcccccggggccaggccgccgcgcccgaggcgccgcagcccgcgccgcccgggggctccggcagcgagccctacaagctgctccccggggccgtggccaccatcgtgcggcccctgtccgccatcccccagccgacgatcaccaagcaggaggtcatctgaggactagtccctgttcccagagcccacttttttttctttttttgaaataaaatagcctgtctttcagatctaaaaaaaaaaaaaaaaaaaaaaaaaaaaaaaaaaaaaaaaaaaaaaaaaaaaaaaaaaaaaaaaaaaaaaaaaaaaaaaaaaaaaaaaaaaaaaaaaaaa

SEQ ID NO: 5159 - RNA, 1562 nt, synthetic construct
  misc_feature 1..1562: note = mRNA a-1 (A100) (opt1) from Homo sapiens__NP_000448.3__HNF4A(39-474)(S87A_K106R_K108R_K126R_ K127R_S142A_S143A_S148A_T166A_S167A_S313A_S378A_T429A_T432A _S436A_K458R)
  source 1..1562: mol_type = other RNA
aggagagtcccgcagtcggcgtccagcggctctgcttgttcgtgtgtgtgtcgttgcaggccttattcaagcttaccatggacaccagcccgtccgaggggaccaacctgaacgcccccaacagcctgggcgtgtccgccctctgcgccatctgcggggaccgggcgacgggcaagcactacggggccagctcctgcgacggctgcaagggcttcttccgccgggcggtccgcaagaaccacatgtactcctgccggttcagccgccagtgcgtggtggaccgcgaccggcggaaccagtgccgctactgccggctgaagaagtgcttccgcgccgggatgcgccgcgaggccgtccagaacgagcgggaccgcatctccacccggcgcgcggcctacgaggacagcgcgctgcccagcatcaacgcgctcctgcaggccgaggtgctgtcccggcagatcgcggcgcccgtgtccggcatcaacggggacatccgcgccaagaagatcgccagcatcgccgacgtctgcgagagcatgaaggagcagctcctggtgctggtggagtgggcgaagtacatcccggccttctgcgagctccccctggacgaccaggtcgccctgctccgggcccacgccggcgagcacctcctgctgggggcgaccaagcgctccatggtgttcaaggacgtgctgctgctcggcaacgactacatcgtcccccggcactgccccgagctggccgagatgagccgcgtgtccatccggatcctggacgagctcgtgctgccgttccaggagctgcagatcgacgacaacgagtacgcctacctcaaggccatcatcttcttcgaccccgacgccaagggcctgagcgaccccgggaagatcaagcgcctgcgcgcgcaggtccaggtgagcctcgaggactacatcaacgaccggcagtacgactcccgcggccggttcggggagctgctgctcctgctgcccacgctccagagcatcacctggcagatgatcgagcagatccagttcatcaagctgttcggcatggcgaagatcgacaacctgctccaggagatgctgctgggcggggcgccgagcgacgcgccccacgcccaccaccccctccacccccacctgatgcaggagcacatgggcaccaacgtgatcgtcgccaacaccatgccgacgcacctgtccaacgggcagatgtgcgagtggccccgcccccggggccaggccgccgcgcccgaggcgccgcagcccgcgccgcccgggggctccggcagcgagccctacaagctgctccccggggccgtggccaccatcgtgcggcccctgtccgccatcccccagccgacgatcaccaagcaggaggtcatctgaggactagtccctgttcccagagcccacttttttttctttttttgaaataaaatagcctgtctttcagatctaaaaaaaaaaaaaaaaaaaaaaaaaaaaaaaaaaaaaaaaaaaaaaaaaaaaaaaaaaaaaaaaaaaaaaaaaaaaaaaaaaaaaaaaaaaaaaaaaaaa

SEQ ID NO: 5160 - RNA, 1562 nt, synthetic construct
  misc_feature 1..1562: note = mRNA a-1 (A100) (opt1) from Homo sapiens__NP_000448.3__HNF4A(39-474)(S87A_K106R_K108R_K126R_ K127R)
  source 1..1562: mol_type = other RNA
aggagagtcccgcagtcggcgtccagcggctctgcttgttcgtgtgtgtgtcgttgcaggccttattcaagcttaccatggacaccagcccgtccgaggggaccaacctgaacgcccccaacagcctgggcgtgtccgccctctgcgccatctgcggggaccgggcgacgggcaagcactacggggccagctcctgcgacggctgcaagggcttcttccgccgggcggtccgcaagaaccacatgtactcctgccggttcagccgccagtgcgtggtggaccgcgaccggcggaaccagtgccgctactgccggctgaagaagtgcttccgcgccgggatgcgccgggaggccgtccagaacgagcgggaccgcatctccacccggcgcagctcctacgaggacagctccctgcccagcatcaacgcgctcctgcaggccgaggtgctgtcccggcagatcaccagccccgtgtccggcatcaacggggacatccgcgccaagaagatcgccagcatcgccgacgtctgcgagagcatgaaggagcagctcctggtgctggtggagtgggcgaagtacatcccggccttctgcgagctccccctggacgaccaggtcgccctgctccgggcccacgccggcgagcacctcctgctgggggcgaccaagcgctccatggtgttcaaggacgtgctgctgctcggcaacgactacatcgtcccccggcactgccccgagctggccgagatgagccgcgtgtccatccggatcctggacgagctcgtgctgccgttccaggagctgcagatcgacgacaacgagtacgcctacctcaaggccatcatcttcttcgaccccgacgccaagggcctgagcgaccccgggaagatcaagcgcctgcgctcccaggtccaggtgagcctcgaggactacatcaacgaccggcagtacgactcccgcggccggttcggggagctgctgctcctgctgcccacgctccagagcatcacctggcagatgatcgagcagatccagttcatcaagctgttcggcatggcgaagatcgacaacctgctccaggagatgctgctgggcgggtccccgagcgacgcgccccacgcccaccaccccctccacccccacctgatgcaggagcacatgggcaccaacgtgatcgtcgccaacaccatgccgacgcacctgtccaacgggcagatgtgcgagtggccccgcccccggggccaggccgccacccccgagaccccgcagcccagcccgcccgggggctccggcagcgagccctacaagctgctccccggggccgtggccaccatcgtgaagcccctgtccgccatcccccagccgacgatcaccaagcaggaggtcatctgaggactagtccctgttcccagagcccacttttttttctttttttgaaataaaatagcctgtctttcagatctaaaaaaaaaaaaaaaaaaaaaaaaaaaaaaaaaaaaaaaaaaaaaaaaaaaaaaaaaaaaaaaaaaaaaaaaaaaaaaaaaaaaaaaaaaaaaaaaaaaa

SEQ ID NO: 5161 - RNA, 1562 nt, synthetic construct
  misc_feature 1..1562: note = mRNA a-1 (A100) (opt1) from Homo sapiens__NP_000448.3__HNF4A(39-474)(S87A_K106R_K108R_K126R_ K127R_S142A_S143A_S148A_T166A_S167A_S313A_S378A_T429A_T432A _S436A_K458R_S461A)
  source 1..1562: mol_type = other RNA
aggagagtcccgcagtcggcgtccagcggctctgcttgttcgtgtgtgtgtcgttgcaggccttattcaagcttaccatggacaccagcccgtccgaggggaccaacctgaacgcccccaacagcctgggcgtgtccgccctctgcgccatctgcggggaccgggcgacgggcaagcactacggggccagctcctgcgacggctgcaagggcttcttccgccgggcggtccgcaagaaccacatgtactcctgccggttcagccgccagtgcgtggtggaccgcgaccggcggaaccagtgccgctactgccggctgaagaagtgcttccgcgccgggatgcgccgggaggccgtccagaacgagcgggaccgcatctccacccggcgcgccgcctacgaggacagcgccctgcccagcatcaacgcgctcctgcaggccgaggtgctgtcccggcagatcgccgcgcccgtgtccggcatcaacggggacatccgcgccaagaagatcgccagcatcgccgacgtctgcgagagcatgaaggagcagctcctggtgctggtggagtgggcgaagtacatcccggccttctgcgagctccccctggacgaccaggtcgccctgctccgggcccacgccggcgagcacctcctgctgggggcgaccaagcgctccatggtgttcaaggacgtgctgctgctcggcaacgactacatcgtcccccggcactgccccgagctggccgagatgagccgcgtgtccatccggatcctggacgagctcgtgctgccgttccaggagctgcagatcgacgacaacgagtacgcctacctcaaggccatcatcttcttcgaccccgacgccaagggcctgagcgaccccgggaagatcaagcgcctgcgcgcccaggtccaggtgagcctcgaggactacatcaacgaccggcagtacgactcccgcggccggttcggggagctgctgctcctgctgcccacgctccagagcatcacctggcagatgatcgagcagatccagttcatcaagctgttcggcatggcgaagatcgacaacctgctccaggagatgctgctgggcggggccccgagcgacgcgccccacgcccaccaccccctccacccccacctgatgcaggagcacatgggcaccaacgtgatcgtcgccaacaccatgccgacgcacctgtccaacgggcagatgtgcgagtggccccgcccccggggccaggccgccgcccccgaggccccgcagcccgcgccgcccgggggctccggcagcgagccctacaagctgctccccggggccgtggccaccatcgtgcggcccctggccgccatcccccagccgacgatcaccaagcaggaggtcatctgaggactagtccctgttcccagagcccacttttttttctttttttgaaataaaatagcctgtctttcagatctaaaaaaaaaaaaaaaaaaaaaaaaaaaaaaaaaaaaaaaaaaaaaaaaaaaaaaaaaaaaaaaaaaaaaaaaaaaaaaaaaaaaaaaaaaaaaaaaaaaa

SEQ ID NO: 5162 - RNA, 1562 nt, synthetic construct
  misc_feature 1..1562: note = mRNA a-1 (A100) (opt1) from Homo sapiens__NP_000448.3__HNF4A(39-474)(S87A_K106R_K108R_K126R_ K127R_S142A_S143A_S148A_T166A_S167A_S313A_S378A_T429A_T432A _S436A_K458R_S461E)
  source 1..1562: mol_type = other RNA
aggagagtcccgcagtcggcgtccagcggctctgcttgttcgtgtgtgtgtcgttgcaggccttattcaagcttaccatggacaccagcccgtccgaggggaccaacctgaacgcccccaacagcctgggcgtgtccgccctctgcgccatctgcggggaccgggcgacgggcaagcactacggggccagctcctgcgacggctgcaagggcttcttccgccgggcggtccgcaagaaccacatgtactcctgccggttcagccgccagtgcgtggtggaccgcgaccggcggaaccagtgccgctactgccggctgaagaagtgcttccgcgccgggatgcgccgggaggccgtccagaacgagcgggaccgcatctccacccggcgcgccgcctacgaggacagcgccctgcccagcatcaacgcgctcctgcaggccgaggtgctgtcccggcagatcgccgcgcccgtgtccggcatcaacggggacatccgcgccaagaagatcgccagcatcgccgacgtctgcgagagcatgaaggagcagctcctggtgctggtggagtgggcgaagtacatcccggccttctgcgagctccccctggacgaccaggtcgccctgctccgggcccacgccggcgagcacctcctgctgggggcgaccaagcgctccatggtgttcaaggacgtgctgctgctcggcaacgactacatcgtcccccggcactgccccgagctggccgagatgagccgcgtgtccatccggatcctggacgagctcgtgctgccgttccaggagctgcagatcgacgacaacgagtacgcctacctcaaggccatcatcttcttcgaccccgacgccaagggcctgagcgaccccgggaagatcaagcgcctgcgcgcccaggtccaggtgagcctcgaggactacatcaacgaccggcagtacgactcccgcggccggttcggggagctgctgctcctgctgcccacgctccagagcatcacctggcagatgatcgagcagatccagttcatcaagctgttcggcatggcgaagatcgacaacctgctccaggagatgctgctgggcggggccccgagcgacgcgccccacgcccaccaccccctccacccccacctgatgcaggagcacatgggcaccaacgtgatcgtcgccaacaccatgccgacgcacctgtccaacgggcagatgtgcgagtggccccgcccccggggccaggccgccgcccccgaggccccgcagcccgcgccgcccgggggctccggcagcgagccctacaagctgctccccggggccgtggccaccatcgtgcggcccctggaggccatcccccagccgacgatcaccaagcaggaggtcatctgaggactagtccctgttcccagagcccacttttttttctttttttgaaataaaatagcctgtctttcagatctaaaaaaaaaaaaaaaaaaaaaaaaaaaaaaaaaaaaaaaaaaaaaaaaaaaaaaaaaaaaaaaaaaaaaaaaaaaaaaaaaaaaaaaaaaaaaaaaaaaa

SEQ ID NO: 5163 - RNA, 1562 nt, synthetic construct
  misc_feature 1..1562: note = mRNA a-1 (A100) (opt1) from Homo sapiens__NP_000448.3__HNF4A(39-474)(S87A_K106R_K108R_K126R_ K127R_S142A_S143A_S148E_T166A_S167E_S313A_S378E_T429E_T432E _S436E_K458R_S461E)
  source 1..1562: mol_type = other RNA
aggagagtcccgcagtcggcgtccagcggctctgcttgttcgtgtgtgtgtcgttgcaggccttattcaagcttaccatggacaccagcccgtccgaggggaccaacctgaacgcccccaacagcctgggcgtgtccgccctctgcgccatctgcggggaccgggcgacgggcaagcactacggggccagctcctgcgacggctgcaagggcttcttccgccgggcggtccgcaagaaccacatgtactcctgccggttcagccgccagtgcgtggtggaccgcgaccggcggaaccagtgccgctactgccggctgaagaagtgcttccgcgccgggatgcgccgggaggccgtccagaacgagcgggaccgcatctccacccggcgcgccgcctacgaggacagcgagctgcccagcatcaacgcgctcctgcaggccgaggtgctgtcccggcagatcgccgagcccgtgtccggcatcaacggggacatccgcgccaagaagatcgccagcatcgccgacgtctgcgagagcatgaaggagcagctcctggtgctggtggagtgggcgaagtacatcccggccttctgcgagctccccctggacgaccaggtcgccctgctccgggcccacgccggcgagcacctcctgctgggggcgaccaagcgctccatggtgttcaaggacgtgctgctgctcggcaacgactacatcgtcccccggcactgccccgagctggccgagatgagccgcgtgtccatccggatcctggacgagctcgtgctgccgttccaggagctgcagatcgacgacaacgagtacgcctacctcaaggccatcatcttcttcgaccccgacgccaagggcctgagcgaccccgggaagatcaagcgcctgcgcgcccaggtccaggtgagcctcgaggactacatcaacgaccggcagtacgactcccgcggccggttcggggagctgctgctcctgctgcccacgctccagagcatcacctggcagatgatcgagcagatccagttcatcaagctgttcggcatggcgaagatcgacaacctgctccaggagatgctgctgggcggggagccgagcgacgcgccccacgcccaccaccccctccacccccacctgatgcaggagcacatgggcaccaacgtgatcgtcgccaacaccatgccgacgcacctgtccaacgggcagatgtgcgagtggccccgcccccggggccaggccgccgagcccgaggagccgcagcccgagccgcccgggggctccggcagcgagccctacaagctgctccccggggccgtggccaccatcgtgcggcccctggaggccatcccccagccgacgatcaccaagcaggaggtcatctgaggactagtccctgttcccagagcccacttttttttctttttttgaaataaaatagcctgtctttcagatctaaaaaaaaaaaaaaaaaaaaaaaaaaaaaaaaaaaaaaaaaaaaaaaaaaaaaaaaaaaaaaaaaaaaaaaaaaaaaaaaaaaaaaaaaaaaaaaaaaaa

SEQ ID NO: 5164 - RNA, 1562 nt, synthetic construct
  misc_feature 1..1562: note = mRNA a-1 (A100) (opt1) from Homo sapiens__NP_000448.3__HNF4A(39-474)(S87A_K106R_K108R_K126R_ K127R_S142A_S143A_S148A_T166A_S167A_K179R_K180R_S313A_S378A _T429A_T432A_S436A_K458R_S461E)
  source 1..1562: mol_type = other RNA
aggagagtcccgcagtcggcgtccagcggctctgcttgttcgtgtgtgtgtcgttgcaggccttattcaagcttaccatggacaccagcccgtccgaggggaccaacctgaacgcccccaacagcctgggcgtgtccgccctctgcgccatctgcggggaccgggcgacgggcaagcactacggggccagctcctgcgacggctgcaagggcttcttccgccgggcggtccgcaagaaccacatgtactcctgccggttcagccgccagtgcgtggtggaccgcgaccggcggaaccagtgccgctactgccggctgaagaagtgcttccgcgccgggatgcgccgggaggccgtccagaacgagcgggaccgcatctccacccggcgcgccgcctacgaggacagcgccctgcccagcatcaacgcgctcctgcaggccgaggtgctgtcccggcagatcgccgcgcccgtgtccggcatcaacggggacatccgcgcccgccggatcgccagcatcgccgacgtctgcgagagcatgaaggagcagctcctggtgctggtggagtgggcgaagtacatcccggccttctgcgagctccccctggacgaccaggtcgccctgctccgggcccacgccggcgagcacctcctgctgggggcgaccaagcgctccatggtgttcaaggacgtgctgctgctcggcaacgactacatcgtcccccggcactgccccgagctggccgagatgagccgcgtgtccatccggatcctggacgagctcgtgctgccgttccaggagctgcagatcgacgacaacgagtacgcctacctcaaggccatcatcttcttcgaccccgacgccaagggcctgagcgaccccgggaagatcaagcgcctgcgcgcccaggtccaggtgagcctcgaggactacatcaacgaccggcagtacgactcccgcggccggttcggggagctgctgctcctgctgcccacgctccagagcatcacctggcagatgatcgagcagatccagttcatcaagctgttcggcatggcgaagatcgacaacctgctccaggagatgctgctgggcggggccccgagcgacgcgccccacgcccaccaccccctccacccccacctgatgcaggagcacatgggcaccaacgtgatcgtcgccaacaccatgccgacgcacctgtccaacgggcagatgtgcgagtggccccgcccccggggccaggccgccgcccccgaggccccgcagcccgcgccgcccgggggctccggcagcgagccctacaagctgctccccggggccgtggccaccatcgtgcggcccctggaggccatcccccagccgacgatcaccaagcaggaggtcatctgaggactagtccctgttcccagagcccacttttttttctttttttgaaataaaatagcctgtctttcagatctaaaaaaaaaaaaaaaaaaaaaaaaaaaaaaaaaaaaaaaaaaaaaaaaaaaaaaaaaaaaaaaaaaaaaaaaaaaaaaaaaaaaaaaaaaaaaaaaaaaa

SEQ ID NO: 5165 - RNA, 1562 nt, synthetic construct
  misc_feature 1..1562: note = mRNA a-1 (A100) (opt1) from Homo sapiens__NP_000448.3__HNF4A(39-474)(S87A_K106R_K108R_K126R_ K127R_S142A_S143A_S148A_T166A_S167A_K300R_K307R_K309R_S313A _S378A_T429A_T432A_S436A_K458R_S461E)
  source 1..1562: mol_type = other RNA
aggagagtcccgcagtcggcgtccagcggctctgcttgttcgtgtgtgtgtcgttgcaggccttattcaagcttaccatggacaccagcccgtccgaggggaccaacctgaacgcccccaacagcctgggcgtgtccgccctctgcgccatctgcggggaccgggcgacgggcaagcactacggggccagctcctgcgacggctgcaagggcttcttccgccgggcggtccgcaagaaccacatgtactcctgccggttcagccgccagtgcgtggtggaccgcgaccggcggaaccagtgccgctactgccggctgaagaagtgcttccgcgccgggatgcgccgggaggccgtccagaacgagcgggaccgcatctccacccggcgcgccgcctacgaggacagcgccctgcccagcatcaacgcgctcctgcaggccgaggtgctgtcccggcagatcgccgcgcccgtgtccggcatcaacggggacatccgcgccaagaagatcgccagcatcgccgacgtctgcgagagcatgaaggagcagctcctggtgctggtggagtgggcgaagtacatcccggccttctgcgagctccccctggacgaccaggtcgccctgctccgggcccacgccggcgagcacctcctgctgggggcgaccaagcgctccatggtgttcaaggacgtgctgctgctcggcaacgactacatcgtcccccggcactgccccgagctggccgagatgagccgcgtgtccatccggatcctggacgagctcgtgctgccgttccaggagctgcagatcgacgacaacgagtacgcctacctcaaggccatcatcttcttcgaccccgacgcccgcggcctgagcgaccccgggcggatccgccgcctgcgcgcccaggtccaggtgagcctcgaggactacatcaacgaccggcagtacgactcccgcggccggttcggggagctgctgctcctgctgcccacgctccagagcatcacctggcagatgatcgagcagatccagttcatcaagctgttcggcatggcgaagatcgacaacctgctccaggagatgctgctgggcggggccccgagcgacgcgccccacgcccaccaccccctccacccccacctgatgcaggagcacatgggcaccaacgtgatcgtcgccaacaccatgccgacgcacctgtccaacgggcagatgtgcgagtggccccgcccccggggccaggccgccgcccccgaggccccgcagcccgcgccgcccgggggctccggcagcgagccctacaagctgctccccggggccgtggccaccatcgtgcggcccctggaggccatcccccagccgacgatcaccaagcaggaggtcatctgaggactagtccctgttcccagagcccacttttttttctttttttgaaataaaatagcctgtctttcagatctaaaaaaaaaaaaaaaaaaaaaaaaaaaaaaaaaaaaaaaaaaaaaaaaaaaaaaaaaaaaaaaaaaaaaaaaaaaaaaaaaaaaaaaaaaaaaaaaaaaa

SEQ ID NO: 5166 - RNA, 1562 nt, synthetic construct
  misc_feature 1..1562: note = mRNA a-1 (A100) (opt1) from Homo sapiens__NP_000448.3__HNF4A(39-474)(S87A_K106R_K108R_K126R_ K127R_S142A_S143A_S148A_T166A_S167A_S313A_S378A_T429A_T432A _S436A_K447R_K458R_S461E_K470R)
  source 1..1562: mol_type = other RNA
aggagagtcccgcagtcggcgtccagcggctctgcttgttcgtgtgtgtgtcgttgcaggccttattcaagcttaccatggacaccagcccgtccgaggggaccaacctgaacgcccccaacagcctgggcgtgtccgccctctgcgccatctgcggggaccgggcgacgggcaagcactacggggccagctcctgcgacggctgcaagggcttcttccgccgggcggtccgcaagaaccacatgtactcctgccggttcagccgccagtgcgtggtggaccgcgaccggcggaaccagtgccgctactgccggctgaagaagtgcttccgcgccgggatgcgccgggaggccgtccagaacgagcgggaccgcatctccacccggcgcgccgcctacgaggacagcgccctgcccagcatcaacgcgctcctgcaggccgaggtgctgtcccggcagatcgccgcgcccgtgtccggcatcaacggggacatccgcgccaagaagatcgccagcatcgccgacgtctgcgagagcatgaaggagcagctcctggtgctggtggagtgggcgaagtacatcccggccttctgcgagctccccctggacgaccaggtcgccctgctccgggcccacgccggcgagcacctcctgctgggggcgaccaagcgctccatggtgttcaaggacgtgctgctgctcggcaacgactacatcgtcccccggcactgccccgagctggccgagatgagccgcgtgtccatccggatcctggacgagctcgtgctgccgttccaggagctgcagatcgacgacaacgagtacgcctacctcaaggccatcatcttcttcgaccccgacgccaagggcctgagcgaccccgggaagatcaagcgcctgcgcgcccaggtccaggtgagcctcgaggactacatcaacgaccggcagtacgactcccgcggccggttcggggagctgctgctcctgctgcccacgctccagagcatcacctggcagatgatcgagcagatccagttcatcaagctgttcggcatggcgaagatcgacaacctgctccaggagatgctgctgggcggggccccgagcgacgcgccccacgcccaccaccccctccacccccacctgatgcaggagcacatgggcaccaacgtgatcgtcgccaacaccatgccgacgcacctgtccaacgggcagatgtgcgagtggccccgcccccggggccaggccgccgcccccgaggccccgcagcccgcgccgcccgggggctccggcagcgagccctaccgcctgctccccggggccgtggccaccatcgtgcggcccctggaggccatcccccagccgacgatcacccggcaggaggtcatctgaggactagtccctgttcccagagcccacttttttttctttttttgaaataaaatagcctgtctttcagatctaaaaaaaaaaaaaaaaaaaaaaaaaaaaaaaaaaaaaaaaaaaaaaaaaaaaaaaaaaaaaaaaaaaaaaaaaaaaaaaaaaaaaaaaaaaaaaaaaaaa

SEQ ID NO: 5167 - RNA, 1562 nt, synthetic construct
  misc_feature 1..1562: note = mRNA a-1 (A100) (opt1) from Homo sapiens__NP_000448.3__HNF4A(39-474)(S87A_K106R_K108R_K126R_ K127R_S142A_S143A_S148A_T166A_S167A_K179R_K180R_K234R_K300R _K307R_K309R_S313A_S378A_T429A_T432A_S436A_K447R_K458R_S461 E_K470R)
  source 1..1562: mol_type = other RNA
aggagagtcccgcagtcggcgtccagcggctctgcttgttcgtgtgtgtgtcgttgcaggccttattcaagcttaccatggacaccagcccgtccgaggggaccaacctgaacgcccccaacagcctgggcgtgtccgccctctgcgccatctgcggggaccgggcgacgggcaagcactacggggccagctcctgcgacggctgcaagggcttcttccgccgggcggtccgcaagaaccacatgtactcctgccggttcagccgccagtgcgtggtggaccgcgaccggcggaaccagtgccgctactgccggctgaagaagtgcttccgcgccgggatgcgccgggaggccgtccagaacgagcgggaccgcatctccacccggcgcgccgcctacgaggacagcgccctgcccagcatcaacgcgctcctgcaggccgaggtgctgtcccggcagatcgccgcgcccgtgtccggcatcaacggggacatccgcgcccgccggatcgccagcatcgccgacgtctgcgagagcatgaaggagcagctcctggtgctggtggagtgggcgaagtacatcccggccttctgcgagctccccctggacgaccaggtcgccctgctccgggcccacgccggcgagcacctcctgctgggggcgacccggcgctccatggtgttcaaggacgtgctgctgctcggcaacgactacatcgtcccccggcactgccccgagctggccgagatgagccgcgtgtccatccggatcctggacgagctcgtgctgccgttccaggagctgcagatcgacgacaacgagtacgcctacctcaaggccatcatcttcttcgaccccgacgcccgcggcctgagcgaccccgggcggatccgccgcctgcgcgcccaggtccaggtgagcctcgaggactacatcaacgaccggcagtacgactcccgcggccggttcggggagctgctgctcctgctgcccacgctccagagcatcacctggcagatgatcgagcagatccagttcatcaagctgttcggcatggcgaagatcgacaacctgctccaggagatgctgctgggcggggccccgagcgacgcgccccacgcccaccaccccctccacccccacctgatgcaggagcacatgggcaccaacgtgatcgtcgccaacaccatgccgacgcacctgtccaacgggcagatgtgcgagtggccccgcccccggggccaggccgccgcccccgaggccccgcagcccgcgccgcccgggggctccggcagcgagccctaccgcctgctccccggggccgtggccaccatcgtgcggcccctggaggccatcccccagccgacgatcacccggcaggaggtcatctgaggactagtccctgttcccagagcccacttttttttctttttttgaaataaaatagcctgtctttcagatctaaaaaaaaaaaaaaaaaaaaaaaaaaaaaaaaaaaaaaaaaaaaaaaaaaaaaaaaaaaaaaaaaaaaaaaaaaaaaaaaaaaaaaaaaaaaaaaaaaaa

SEQ ID NO: 5168 - RNA, 1562 nt, synthetic construct
  misc_feature 1..1562: note = mRNA a-1 (A100) (opt1) from Homo sapiens__NP_000448.3__HNF4A(39-474)(S87A_S95A_S99A_K106R_K1 08R_K126R_K127R_S142A_S143A_S148A_T166A_S167A_S313A_S378A_T 429A_T432A_S436A_K458R_S461E)
  source 1..1562: mol_type = other RNA
aggagagtcccgcagtcggcgtccagcggctctgcttgttcgtgtgtgtgtcgttgcaggccttattcaagcttaccatggacaccagcccgtccgaggggaccaacctgaacgcccccaacagcctgggcgtgtccgccctctgcgccatctgcggggaccgggcgacgggcaagcactacggggccagctcctgcgacggctgcaagggcttcttccgccgggcggtccgcaagaaccacatgtacgcctgccggttcgcccgccagtgcgtggtggaccgcgaccggcggaaccagtgccgctactgccggctgaagaagtgcttccgcgccgggatgcgccgggaggccgtccagaacgagcgggaccgcatctccacccggcgcgccgcctacgaggacagcgccctgcccagcatcaacgcgctcctgcaggccgaggtgctgtcccggcagatcgccgcgcccgtgtccggcatcaacggggacatccgcgccaagaagatcgccagcatcgccgacgtctgcgagagcatgaaggagcagctcctggtgctggtggagtgggcgaagtacatcccggccttctgcgagctccccctggacgaccaggtcgccctgctccgggcccacgccggcgagcacctcctgctgggggcgaccaagcgctccatggtgttcaaggacgtgctgctgctcggcaacgactacatcgtcccccggcactgccccgagctggccgagatgagccgcgtgtccatccggatcctggacgagctcgtgctgccgttccaggagctgcagatcgacgacaacgagtacgcctacctcaaggccatcatcttcttcgaccccgacgccaagggcctgagcgaccccgggaagatcaagcgcctgcgcgcccaggtccaggtgagcctcgaggactacatcaacgaccggcagtacgactcccgcggccggttcggggagctgctgctcctgctgcccacgctccagagcatcacctggcagatgatcgagcagatccagttcatcaagctgttcggcatggcgaagatcgacaacctgctccaggagatgctgctgggcggggccccgagcgacgcgccccacgcccaccaccccctccacccccacctgatgcaggagcacatgggcaccaacgtgatcgtcgccaacaccatgccgacgcacctgtccaacgggcagatgtgcgagtggccccgcccccggggccaggccgccgcccccgaggccccgcagcccgcgccgcccgggggctccggcagcgagccctacaagctgctccccggggccgtggccaccatcgtgcggcccctggaggccatcccccagccgacgatcaccaagcaggaggtcatctgaggactagtccctgttcccagagcccacttttttttctttttttgaaataaaatagcctgtctttcagatctaaaaaaaaaaaaaaaaaaaaaaaaaaaaaaaaaaaaaaaaaaaaaaaaaaaaaaaaaaaaaaaaaaaaaaaaaaaaaaaaaaaaaaaaaaaaaaaaaaaa

SEQ ID NO: 5169 - RNA, 1562 nt, synthetic construct
  misc_feature 1..1562: note = mRNA a-1 (A100) (opt1) from Homo sapiens__NP_000448.3__HNF4A(39-474)(S87A_K106R_K108R_K126R_ K127R_S138A_T139A_S142A_S143A_S148A_T166A_S167A_S313A_S378A _T429A_T432A_S436A_K458R_S461E)
  source 1..1562: mol_type = other RNA
aggagagtcccgcagtcggcgtccagcggctctgcttgttcgtgtgtgtgtcgttgcaggccttattcaagcttaccatggacaccagcccgtccgaggggaccaacctgaacgcccccaacagcctgggcgtgtccgccctctgcgccatctgcggggaccgggcgacgggcaagcactacggggccagctcctgcgacggctgcaagggcttcttccgccgggcggtccgcaagaaccacatgtactcctgccggttcagccgccagtgcgtggtggaccgcgaccggcggaaccagtgccgctactgccggctgaagaagtgcttccgcgccgggatgcgccgggaggccgtccagaacgagcgggaccgcatcgccgcccggcgcgccgcctacgaggacagcgccctgcccagcatcaacgcgctcctgcaggccgaggtgctgtcccggcagatcgccgcgcccgtgtccggcatcaacggggacatccgcgccaagaagatcgccagcatcgccgacgtctgcgagagcatgaaggagcagctcctggtgctggtggagtgggcgaagtacatcccggccttctgcgagctccccctggacgaccaggtcgccctgctccgggcccacgccggcgagcacctcctgctgggggcgaccaagcgctccatggtgttcaaggacgtgctgctgctcggcaacgactacatcgtcccccggcactgccccgagctggccgagatgagccgcgtgtccatccggatcctggacgagctcgtgctgccgttccaggagctgcagatcgacgacaacgagtacgcctacctcaaggccatcatcttcttcgaccccgacgccaagggcctgagcgaccccgggaagatcaagcgcctgcgcgcccaggtccaggtgagcctcgaggactacatcaacgaccggcagtacgactcccgcggccggttcggggagctgctgctcctgctgcccacgctccagagcatcacctggcagatgatcgagcagatccagttcatcaagctgttcggcatggcgaagatcgacaacctgctccaggagatgctgctgggcggggccccgagcgacgcgccccacgcccaccaccccctccacccccacctgatgcaggagcacatgggcaccaacgtgatcgtcgccaacaccatgccgacgcacctgtccaacgggcagatgtgcgagtggccccgcccccggggccaggccgccgcccccgaggccccgcagcccgcgccgcccgggggctccggcagcgagccctacaagctgctccccggggccgtggccaccatcgtgcggcccctggaggccatcccccagccgacgatcaccaagcaggaggtcatctgaggactagtccctgttcccagagcccacttttttttctttttttgaaataaaatagcctgtctttcagatctaaaaaaaaaaaaaaaaaaaaaaaaaaaaaaaaaaaaaaaaaaaaaaaaaaaaaaaaaaaaaaaaaaaaaaaaaaaaaaaaaaaaaaaaaaaaaaaaaaaa

SEQ ID NO: 5170 - RNA, 1562 nt, synthetic construct
  misc_feature 1..1562: note = mRNA a-1 (A100) (opt1) from Homo sapiens__NP_000448.3__HNF4A(39-474)(S87A_S95A_S99A_K106R_K1 08R_K126R_K127R_S138A_T139A_S142A_S143A_S148A_T166A_S167A_S 313A_S378A_T429A_T432A_S436A_K458R_S461E)
  source 1..1562: mol_type = other RNA
aggagagtcccgcagtcggcgtccagcggctctgcttgttcgtgtgtgtgtcgttgcaggccttattcaagcttaccatggacaccagcccgtccgaggggaccaacctgaacgcccccaacagcctgggcgtgtccgccctctgcgccatctgcggggaccgggcgacgggcaagcactacggggccagctcctgcgacggctgcaagggcttcttccgccgggcggtccgcaagaaccacatgtacgcctgccggttcgcccgccagtgcgtggtggaccgcgaccggcggaaccagtgccgctactgccggctgaagaagtgcttccgcgccgggatgcgccgggaggccgtccagaacgagcgggaccgcatcgccgcccggcgcgccgcctacgaggacagcgccctgcccagcatcaacgcgctcctgcaggccgaggtgctgtcccggcagatcgccgcgcccgtgtccggcatcaacggggacatccgcgccaagaagatcgccagcatcgccgacgtctgcgagagcatgaaggagcagctcctggtgctggtggagtgggcgaagtacatcccggccttctgcgagctccccctggacgaccaggtcgccctgctccgggcccacgccggcgagcacctcctgctgggggcgaccaagcgctccatggtgttcaaggacgtgctgctgctcggcaacgactacatcgtcccccggcactgccccgagctggccgagatgagccgcgtgtccatccggatcctggacgagctcgtgctgccgttccaggagctgcagatcgacgacaacgagtacgcctacctcaaggccatcatcttcttcgaccccgacgccaagggcctgagcgaccccgggaagatcaagcgcctgcgcgcccaggtccaggtgagcctcgaggactacatcaacgaccggcagtacgactcccgcggccggttcggggagctgctgctcctgctgcccacgctccagagcatcacctggcagatgatcgagcagatccagttcatcaagctgttcggcatggcgaagatcgacaacctgctccaggagatgctgctgggcggggccccgagcgacgcgccccacgcccaccaccccctccacccccacctgatgcaggagcacatgggcaccaacgtgatcgtcgccaacaccatgccgacgcacctgtccaacgggcagatgtgcgagtggccccgcccccggggccaggccgccgcccccgaggccccgcagcccgcgccgcccgggggctccggcagcgagccctacaagctgctccccggggccgtggccaccatcgtgcggcccctggaggccatcccccagccgacgatcaccaagcaggaggtcatctgaggactagtccctgttcccagagcccacttttttttctttttttgaaataaaatagcctgtctttcagatctaaaaaaaaaaaaaaaaaaaaaaaaaaaaaaaaaaaaaaaaaaaaaaaaaaaaaaaaaaaaaaaaaaaaaaaaaaaaaaaaaaaaaaaaaaaaaaaaaaaa

SEQ ID NO: 5171 - RNA, 1562 nt, synthetic construct
  misc_feature 1..1562: note = mRNA a-1 (A100) (opt1) from Homo sapiens__NP_000448.3__HNF4A(39-474)
  source 1..1562: mol_type = other RNA
aggagagtcccgcagtcggcgtccagcggctctgcttgttcgtgtgtgtgtcgttgcaggccttattcaagcttaccatggacaccagcccgtccgaggggaccaacctgaacgcccccaacagcctgggcgtgtccgccctctgcgccatctgcggggaccgggcgacgggcaagcactacggggccagctcctgcgacggctgcaagggcttcttccgccggagcgtccgcaagaaccacatgtactcctgccggttcagccgccagtgcgtggtggacaaggacaagcggaaccagtgccgctactgccggctgaagaagtgcttccgcgccgggatgaagaaggaggccgtccagaacgagcgggaccgcatctccacccggcgcagctcctacgaggacagctccctgcccagcatcaacgcgctcctgcaggccgaggtgctgtcccggcagatcaccagccccgtgtccggcatcaacggggacatccgcgccaagaagatcgccagcatcgccgacgtctgcgagagcatgaaggagcagctcctggtgctggtggagtgggcgaagtacatcccggccttctgcgagctccccctggacgaccaggtcgccctgctccgggcccacgccggcgagcacctcctgctgggggcgaccaagcgctccatggtgttcaaggacgtgctgctgctcggcaacgactacatcgtcccccggcactgccccgagctggccgagatgagccgcgtgtccatccggatcctggacgagctcgtgctgccgttccaggagctgcagatcgacgacaacgagtacgcctacctcaaggccatcatcttcttcgaccccgacgccaagggcctgagcgaccccgggaagatcaagcgcctgcgctcccaggtccaggtgagcctcgaggactacatcaacgaccggcagtacgactcccgcggccggttcggggagctgctgctcctgctgcccacgctccagagcatcacctggcagatgatcgagcagatccagttcatcaagctgttcggcatggcgaagatcgacaacctgctccaggagatgctgctgggcgggtccccgagcgacgcgccccacgcccaccaccccctccacccccacctgatgcaggagcacatgggcaccaacgtgatcgtcgccaacaccatgccgacgcacctgtccaacgggcagatgtgcgagtggccccgcccccggggccaggccgccacccccgagaccccgcagcccagcccgcccgggggctccggcagcgagccctacaagctcctgcccggggccgtggccaccatcgtgaagcccctgtccgccatcccccagccgacgatcaccaagcaggaggtcatctgaggactagtccctgttcccagagcccacttttttttctttttttgaaataaaatagcctgtctttcagatctaaaaaaaaaaaaaaaaaaaaaaaaaaaaaaaaaaaaaaaaaaaaaaaaaaaaaaaaaaaaaaaaaaaaaaaaaaaaaaaaaaaaaaaaaaaaaaaaaaaa

SEQ ID NO: 5172 - RNA, 1562 nt, synthetic construct
  misc_feature 1..1562: note = mRNA a-1 (A100) (opt1) from Homo sapiens__NP_000448.3__HNF4A(39-474)(S313A)
  source 1..1562: mol_type = other RNA
aggagagtcccgcagtcggcgtccagcggctctgcttgttcgtgtgtgtgtcgttgcaggccttattcaagcttaccatggacaccagcccgtccgaggggaccaacctgaacgcccccaacagcctgggcgtgtccgccctctgcgccatctgcggggaccgggcgacgggcaagcactacggggccagctcctgcgacggctgcaagggcttcttccgccggagcgtccgcaagaaccacatgtactcctgccggttcagccgccagtgcgtggtggacaaggacaagcggaaccagtgccgctactgccggctgaagaagtgcttccgcgccgggatgaagaaggaggccgtccagaacgagcgggaccgcatctccacccggcgcagctcctacgaggacagctccctgcccagcatcaacgcgctcctgcaggccgaggtgctgtcccggcagatcaccagccccgtgtccggcatcaacggggacatccgcgccaagaagatcgccagcatcgccgacgtctgcgagagcatgaaggagcagctcctggtgctggtggagtgggcgaagtacatcccggccttctgcgagctccccctggacgaccaggtcgccctgctccgggcccacgccggcgagcacctcctgctgggggcgaccaagcgctccatggtgttcaaggacgtgctgctgctcggcaacgactacatcgtcccccggcactgccccgagctggccgagatgagccgcgtgtccatccggatcctggacgagctcgtgctgccgttccaggagctgcagatcgacgacaacgagtacgcctacctcaaggccatcatcttcttcgaccccgacgccaagggcctgagcgaccccgggaagatcaagcgcctgcgcgcgcaggtccaggtgtccctcgaggactacatcaacgaccggcagtacgacagccgcggccggttcggggagctgctgctcctgctgcccacgctccagtccatcacctggcagatgatcgagcagatccagttcatcaagctgttcggcatggccaagatcgacaacctgctccaggagatgctgctgggcgggagcccgtccgacgcgccccacgcccaccaccccctccacccccacctgatgcaggagcacatgggcaccaacgtgatcgtcgccaacaccatgccgacgcacctgagcaacgggcagatgtgcgagtggccccgcccccggggccaggccgccacccccgagaccccgcagccctccccgcccgggggcagcggctccgagccctacaagctgctccccggggccgtggccaccatcgtgaagcccctgagcgcgatcccccagccgacgatcaccaagcaggaggtcatctgaggactagtccctgttcccagagcccacttttttttctttttttgaaataaaatagcctgtctttcagatctaaaaaaaaaaaaaaaaaaaaaaaaaaaaaaaaaaaaaaaaaaaaaaaaaaaaaaaaaaaaaaaaaaaaaaaaaaaaaaaaaaaaaaaaaaaaaaaaaaaa

SEQ ID NO: 5173 - RNA, 1562 nt, synthetic construct
  misc_feature 1..1562: note = mRNA a-1 (A100) (opt1) from Homo sapiens__NP_000448.3__HNF4A(39-474)(S313E)
  source 1..1562: mol_type = other RNA
aggagagtcccgcagtcggcgtccagcggctctgcttgttcgtgtgtgtgtcgttgcaggccttattcaagcttaccatggacaccagcccgtccgaggggaccaacctgaacgcccccaacagcctgggcgtgtccgccctctgcgccatctgcggggaccgggcgacgggcaagcactacggggccagctcctgcgacggctgcaagggcttcttccgccggagcgtccgcaagaaccacatgtactcctgccggttcagccgccagtgcgtggtggacaaggacaagcggaaccagtgccgctactgccggctgaagaagtgcttccgcgccgggatgaagaaggaggccgtccagaacgagcgggaccgcatctccacccggcgcagctcctacgaggacagctccctgcccagcatcaacgcgctcctgcaggccgaggtgctgtcccggcagatcaccagccccgtgtccggcatcaacggggacatccgcgccaagaagatcgccagcatcgccgacgtctgcgagagcatgaaggagcagctcctggtgctggtggagtgggcgaagtacatcccggccttctgcgagctccccctggacgaccaggtcgccctgctccgggcccacgccggcgagcacctcctgctgggggcgaccaagcgctccatggtgttcaaggacgtgctgctgctcggcaacgactacatcgtcccccggcactgccccgagctggccgagatgagccgcgtgtccatccggatcctggacgagctcgtgctgccgttccaggagctgcagatcgacgacaacgagtacgcctacctcaaggccatcatcttcttcgaccccgacgccaagggcctgagcgaccccgggaagatcaagcgcctgcgcgagcaggtccaggtgtccctcgaggactacatcaacgaccggcagtacgacagccgcggccggttcggggagctgctgctcctgctgcccacgctccagtccatcacctggcagatgatcgagcagatccagttcatcaagctgttcggcatggcgaagatcgacaacctgctccaggagatgctgctgggcgggagcccgtccgacgcgccccacgcccaccaccccctccacccccacctgatgcaggagcacatgggcaccaacgtgatcgtcgccaacaccatgccgacgcacctgagcaacgggcagatgtgcgagtggccccgcccccggggccaggccgccacccccgagaccccgcagccctccccgcccgggggcagcggctccgagccctacaagctgctccccggggccgtggccaccatcgtgaagcccctgagcgccatcccccagccgacgatcaccaagcaggaggtcatctgaggactagtccctgttcccagagcccacttttttttctttttttgaaataaaatagcctgtctttcagatctaaaaaaaaaaaaaaaaaaaaaaaaaaaaaaaaaaaaaaaaaaaaaaaaaaaaaaaaaaaaaaaaaaaaaaaaaaaaaaaaaaaaaaaaaaaaaaaaaaaa

SEQ ID NO: 5174 - RNA, 1562 nt, synthetic construct
  misc_feature 1..1562: note = mRNA a-1 (A100) (opt1) from Homo sapiens__NP_000448.3__HNF4A(39-474)(S142A_S143A)
  source 1..1562: mol_type = other RNA
aggagagtcccgcagtcggcgtccagcggctctgcttgttcgtgtgtgtgtcgttgcaggccttattcaagcttaccatggacaccagcccgtccgaggggaccaacctgaacgcccccaacagcctgggcgtgtccgccctctgcgccatctgcggggaccgggcgacgggcaagcactacggggccagctcctgcgacggctgcaagggcttcttccgccggagcgtccgcaagaaccacatgtactcctgccggttcagccgccagtgcgtggtggacaaggacaagcggaaccagtgccgctactgccggctgaagaagtgcttccgcgccgggatgaagaaggaggccgtccagaacgagcgggaccgcatctccacccggcgcgcggcctacgaggacagctccctgcccagcatcaacgccctcctgcaggccgaggtgctgtcccggcagatcaccagccccgtgtccggcatcaacggggacatccgcgccaagaagatcgcgagcatcgccgacgtctgcgagtccatgaaggagcagctcctggtgctggtggagtgggccaagtacatcccggccttctgcgagctccccctggacgaccaggtcgccctgctccgggcgcacgccggcgagcacctcctgctgggggccaccaagcgcagcatggtgttcaaggacgtgctgctgctcggcaacgactacatcgtcccccggcactgccccgagctggccgagatgagccgcgtgtccatccggatcctggacgagctcgtgctgccgttccaggagctgcagatcgacgacaacgagtacgcctacctcaaggcgatcatcttcttcgaccccgacgccaagggcctgagcgaccccgggaagatcaagcgcctgcgctcccaggtccaggtgagcctcgaggactacatcaacgaccggcagtacgactcccgcggccggttcggggagctgctgctcctgctgcccacgctccagagcatcacctggcagatgatcgagcagatccagttcatcaagctgttcggcatggccaagatcgacaacctgctccaggagatgctgctgggcgggtccccgagcgacgcgccccacgcccaccaccccctccacccccacctgatgcaggagcacatgggcaccaacgtgatcgtcgccaacaccatgccgacgcacctgtccaacgggcagatgtgcgagtggccccgcccccggggccaggccgccacccccgagaccccgcagcccagcccgcccgggggctccggcagcgagccctacaagctgctccccggggccgtggcgaccatcgtgaagcccctgtccgccatcccccagccgacgatcaccaagcaggaggtcatctgaggactagtccctgttcccagagcccacttttttttctttttttgaaataaaatagcctgtctttcagatctaaaaaaaaaaaaaaaaaaaaaaaaaaaaaaaaaaaaaaaaaaaaaaaaaaaaaaaaaaaaaaaaaaaaaaaaaaaaaaaaaaaaaaaaaaaaaaaaaaaa

SEQ ID NO: 5175 - RNA, 1562 nt, synthetic construct
  misc_feature 1..1562: note = mRNA a-1 (A100) (opt1) from Homo sapiens__NP_000448.3__HNF4A(39-474)(S142E_S143E)
  source 1..1562: mol_type = other RNA
aggagagtcccgcagtcggcgtccagcggctctgcttgttcgtgtgtgtgtcgttgcaggccttattcaagcttaccatggacaccagcccgtccgaggggaccaacctgaacgcccccaacagcctgggcgtgtccgccctctgcgccatctgcggggaccgggcgacgggcaagcactacggggccagctcctgcgacggctgcaagggcttcttccgccggagcgtccgcaagaaccacatgtactcctgccggttcagccgccagtgcgtggtggacaaggacaagcggaaccagtgccgctactgccggctgaagaagtgcttccgcgccgggatgaagaaggaggccgtccagaacgagcgggaccgcatctccacccggcgcgaggagtacgaggacagctccctgcccagcatcaacgcgctcctgcaggccgaggtgctgtcccggcagatcaccagccccgtgtccggcatcaacggggacatccgcgccaagaagatcgccagcatcgccgacgtctgcgagtccatgaaggagcagctcctggtgctggtggagtgggcgaagtacatcccggccttctgcgagctccccctggacgaccaggtcgccctgctccgggcccacgccggcgagcacctcctgctgggggcgaccaagcgcagcatggtgttcaaggacgtgctgctgctcggcaacgactacatcgtcccccggcactgccccgagctggccgagatgagccgcgtgtccatccggatcctggacgagctcgtgctgccgttccaggagctgcagatcgacgacaacgagtacgcctacctcaaggccatcatcttcttcgaccccgacgccaagggcctgagcgaccccgggaagatcaagcgcctgcgctcccaggtccaggtgagcctcgaggactacatcaacgaccggcagtacgactcccgcggccggttcggggagctgctgctcctgctgcccacgctccagagcatcacctggcagatgatcgagcagatccagttcatcaagctgttcggcatggcgaagatcgacaacctgctccaggagatgctgctgggcgggtccccgagcgacgcgccccacgcccaccaccccctccacccccacctgatgcaggagcacatgggcaccaacgtgatcgtcgccaacaccatgccgacgcacctgtccaacgggcagatgtgcgagtggccccgcccccggggccaggccgccacccccgagaccccgcagcccagcccgcccgggggctccggcagcgagccctacaagctgctccccggggccgtggccaccatcgtgaagcccctgtccgccatcccccagccgacgatcaccaagcaggaggtcatctgaggactagtccctgttcccagagcccacttttttttctttttttgaaataaaatagcctgtctttcagatctaaaaaaaaaaaaaaaaaaaaaaaaaaaaaaaaaaaaaaaaaaaaaaaaaaaaaaaaaaaaaaaaaaaaaaaaaaaaaaaaaaaaaaaaaaaaaaaaaaaa

SEQ ID NO: 5176 - RNA, 1562 nt, synthetic construct
  misc_feature 1..1562: note = mRNA a-1 (A100) (opt1) from Homo sapiens__NP_000448.3__HNF4A(39-474)(S143A)
  source 1..1562: mol_type = other RNA
aggagagtcccgcagtcggcgtccagcggctctgcttgttcgtgtgtgtgtcgttgcaggccttattcaagcttaccatggacaccagcccgtccgaggggaccaacctgaacgcccccaacagcctgggcgtgtccgccctctgcgccatctgcggggaccgggcgacgggcaagcactacggggccagctcctgcgacggctgcaagggcttcttccgccggagcgtccgcaagaaccacatgtactcctgccggttcagccgccagtgcgtggtggacaaggacaagcggaaccagtgccgctactgccggctgaagaagtgcttccgcgccgggatgaagaaggaggccgtccagaacgagcgggaccgcatctccacccggcgcagcgcgtacgaggactccagcctgccctccatcaacgccctcctgcaggccgaggtgctgagccggcagatcacctcccccgtgagcggcatcaacggggacatccgcgccaagaagatcgcctccatcgcggacgtctgcgagagcatgaaggagcagctcctggtgctggtggagtgggccaagtacatcccggccttctgcgagctccccctggacgaccaggtcgccctgctccgggcccacgcgggcgagcacctcctgctgggggccaccaagcgcagcatggtgttcaaggacgtgctgctgctcggcaacgactacatcgtcccccggcactgccccgagctggccgagatgtcccgcgtgagcatccggatcctggacgagctcgtgctgccgttccaggagctgcagatcgacgacaacgagtacgcctacctcaaggccatcatcttcttcgaccccgacgcgaagggcctgtccgaccccgggaagatcaagcgcctgcgcagccaggtccaggtgtccctcgaggactacatcaacgaccggcagtacgacagccgcggccggttcggggagctgctgctcctgctgcccacgctccagtccatcacctggcagatgatcgagcagatccagttcatcaagctgttcggcatggccaagatcgacaacctgctccaggagatgctgctgggcgggagcccgtccgacgcgccccacgcccaccaccccctccacccccacctgatgcaggagcacatgggcaccaacgtgatcgtcgccaacaccatgccgacgcacctgagcaacgggcagatgtgcgagtggccccgcccccggggccaggccgccacccccgagaccccgcagccctccccgcccgggggcagcggctccgagccctacaagctgctccccggggccgtggccaccatcgtgaagcccctgagcgcgatcccccagccgacgatcaccaagcaggaggtcatctgaggactagtccctgttcccagagcccacttttttttctttttttgaaataaaatagcctgtctttcagatctaaaaaaaaaaaaaaaaaaaaaaaaaaaaaaaaaaaaaaaaaaaaaaaaaaaaaaaaaaaaaaaaaaaaaaaaaaaaaaaaaaaaaaaaaaaaaaaaaaaa

SEQ ID NO: 5177 - RNA, 1562 nt, synthetic construct
  misc_feature 1..1562: note = mRNA a-1 (A100) (opt1) from Homo sapiens__NP_000448.3__HNF4A(39-474)(T166A)
  source 1..1562: mol_type = other RNA
aggagagtcccgcagtcggcgtccagcggctctgcttgttcgtgtgtgtgtcgttgcaggccttattcaagcttaccatggacaccagcccgtccgaggggaccaacctgaacgcccccaacagcctgggcgtgtccgccctctgcgccatctgcggggaccgggcgacgggcaagcactacggggccagctcctgcgacggctgcaagggcttcttccgccggagcgtccgcaagaaccacatgtactcctgccggttcagccgccagtgcgtggtggacaaggacaagcggaaccagtgccgctactgccggctgaagaagtgcttccgcgccgggatgaagaaggaggccgtccagaacgagcgggaccgcatctccacccggcgcagctcctacgaggacagctccctgcccagcatcaacgcgctcctgcaggccgaggtgctgtcccggcagatcgccagccccgtgtccggcatcaacggggacatccgcgccaagaagatcgccagcatcgcggacgtctgcgagagcatgaaggagcagctcctggtgctggtggagtgggccaagtacatcccggccttctgcgagctccccctggacgaccaggtcgccctgctccgggcccacgcgggcgagcacctcctgctgggggccaccaagcgctccatggtgttcaaggacgtgctgctgctcggcaacgactacatcgtcccccggcactgccccgagctggccgagatgagccgcgtgtccatccggatcctggacgagctcgtgctgccgttccaggagctgcagatcgacgacaacgagtacgcctacctcaaggccatcatcttcttcgaccccgacgcgaagggcctgagcgaccccgggaagatcaagcgcctgcgctcccaggtccaggtgagcctcgaggactacatcaacgaccggcagtacgactcccgcggccggttcggggagctgctgctcctgctgcccaccctccagagcatcacgtggcagatgatcgagcagatccagttcatcaagctgttcggcatggccaagatcgacaacctgctccaggagatgctgctgggcgggtccccgagcgacgcgccccacgcccaccaccccctccacccccacctgatgcaggagcacatgggcaccaacgtgatcgtcgccaacaccatgccgacccacctgtccaacgggcagatgtgcgagtggccccgcccccggggccaggccgccacgcccgagaccccgcagcccagcccgcccgggggctccggcagcgagccctacaagctgctccccggggccgtggccaccatcgtgaagcccctgtccgcgatcccccagccgaccatcacgaagcaggaggtcatctgaggactagtccctgttcccagagcccacttttttttctttttttgaaataaaatagcctgtctttcagatctaaaaaaaaaaaaaaaaaaaaaaaaaaaaaaaaaaaaaaaaaaaaaaaaaaaaaaaaaaaaaaaaaaaaaaaaaaaaaaaaaaaaaaaaaaaaaaaaaaaa

SEQ ID NO: 5178 - RNA, 1562 nt, synthetic construct
  misc_feature 1..1562: note = mRNA a-1 (A100) (opt1) from Homo sapiens__NP_000448.3__HNF4A(39-474)(S167E)
  source 1..1562: mol_type = other RNA
aggagagtcccgcagtcggcgtccagcggctctgcttgttcgtgtgtgtgtcgttgcaggccttattcaagcttaccatggacaccagcccgtccgaggggaccaacctgaacgcccccaacagcctgggcgtgtccgccctctgcgccatctgcggggaccgggcgacgggcaagcactacggggccagctcctgcgacggctgcaagggcttcttccgccggagcgtccgcaagaaccacatgtactcctgccggttcagccgccagtgcgtggtggacaaggacaagcggaaccagtgccgctactgccggctgaagaagtgcttccgcgccgggatgaagaaggaggccgtccagaacgagcgggaccgcatctccacccggcgcagctcctacgaggacagctccctgcccagcatcaacgcgctcctgcaggccgaggtgctgtcccggcagatcaccgagcccgtgagcggcatcaacggggacatccgcgccaagaagatcgcctccatcgccgacgtctgcgagagcatgaaggagcagctcctggtgctggtggagtgggcgaagtacatcccggccttctgcgagctccccctggacgaccaggtcgccctgctccgggcccacgccggcgagcacctcctgctgggggcgaccaagcgcagcatggtgttcaaggacgtgctgctgctcggcaacgactacatcgtcccccggcactgccccgagctggccgagatgtcccgcgtgagcatccggatcctggacgagctcgtgctgccgttccaggagctgcagatcgacgacaacgagtacgcctacctcaaggccatcatcttcttcgaccccgacgccaagggcctgtccgaccccgggaagatcaagcgcctgcgcagccaggtccaggtgtccctcgaggactacatcaacgaccggcagtacgacagccgcggccggttcggggagctgctgctcctgctgcccacgctccagtccatcacctggcagatgatcgagcagatccagttcatcaagctgttcggcatggcgaagatcgacaacctgctccaggagatgctgctgggcgggagcccgtccgacgcgccccacgcccaccaccccctccacccccacctgatgcaggagcacatgggcaccaacgtgatcgtcgccaacaccatgccgacgcacctgagcaacgggcagatgtgcgagtggccccgcccccggggccaggccgccacccccgagaccccgcagccctccccgcccgggggcagcggctccgagccctacaagctgctccccggggccgtggccaccatcgtgaagcccctgagcgccatcccccagccgacgatcaccaagcaggaggtcatctgaggactagtccctgttcccagagcccacttttttttctttttttgaaataaaatagcctgtctttcagatctaaaaaaaaaaaaaaaaaaaaaaaaaaaaaaaaaaaaaaaaaaaaaaaaaaaaaaaaaaaaaaaaaaaaaaaaaaaaaaaaaaaaaaaaaaaaaaaaaaaa

SEQ ID NO: 5179 - RNA, 1562 nt, synthetic construct
  misc_feature 1..1562: note = mRNA a-1 (A100) (opt1) from Homo sapiens__NP_000448.3__HNF4A(39-474)(S167A)
  source 1..1562: mol_type = other RNA
aggagagtcccgcagtcggcgtccagcggctctgcttgttcgtgtgtgtgtcgttgcaggccttattcaagcttaccatggacaccagcccgtccgaggggaccaacctgaacgcccccaacagcctgggcgtgtccgccctctgcgccatctgcggggaccgggcgacgggcaagcactacggggccagctcctgcgacggctgcaagggcttcttccgccggagcgtccgcaagaaccacatgtactcctgccggttcagccgccagtgcgtggtggacaaggacaagcggaaccagtgccgctactgccggctgaagaagtgcttccgcgccgggatgaagaaggaggccgtccagaacgagcgggaccgcatctccacccggcgcagctcctacgaggacagctccctgcccagcatcaacgcgctcctgcaggccgaggtgctgtcccggcagatcaccgcccccgtgagcggcatcaacggggacatccgcgccaagaagatcgcctccatcgcggacgtctgcgagagcatgaaggagcagctcctggtgctggtggagtgggccaagtacatcccggccttctgcgagctccccctggacgaccaggtcgccctgctccgggcccacgcgggcgagcacctcctgctgggggccaccaagcgcagcatggtgttcaaggacgtgctgctgctcggcaacgactacatcgtcccccggcactgccccgagctggccgagatgtcccgcgtgagcatccggatcctggacgagctcgtgctgccgttccaggagctgcagatcgacgacaacgagtacgcctacctcaaggccatcatcttcttcgaccccgacgcgaagggcctgtccgaccccgggaagatcaagcgcctgcgcagccaggtccaggtgtccctcgaggactacatcaacgaccggcagtacgacagccgcggccggttcggggagctgctgctcctgctgcccacgctccagtccatcacctggcagatgatcgagcagatccagttcatcaagctgttcggcatggccaagatcgacaacctgctccaggagatgctgctgggcgggagcccgtccgacgcgccccacgcccaccaccccctccacccccacctgatgcaggagcacatgggcaccaacgtgatcgtcgccaacaccatgccgacgcacctgagcaacgggcagatgtgcgagtggccccgcccccggggccaggccgccacccccgagaccccgcagccctccccgcccgggggcagcggctccgagccctacaagctgctccccggggccgtggccaccatcgtgaagcccctgagcgcgatcccccagccgacgatcaccaagcaggaggtcatctgaggactagtccctgttcccagagcccacttttttttctttttttgaaataaaatagcctgtctttcagatctaaaaaaaaaaaaaaaaaaaaaaaaaaaaaaaaaaaaaaaaaaaaaaaaaaaaaaaaaaaaaaaaaaaaaaaaaaaaaaaaaaaaaaaaaaaaaaaaaaaa

SEQ ID NO: 5180 - RNA, 1562 nt, synthetic construct
  misc_feature 1..1562: note = mRNA a-1 (A100) (opt1) from Homo sapiens__NP_000448.3__HNF4A(39-474)(S167A_S378A_T429A_T432A _S436A)
  source 1..1562: mol_type = other RNA
aggagagtcccgcagtcggcgtccagcggctctgcttgttcgtgtgtgtgtcgttgcaggccttattcaagcttaccatggacaccagcccgtccgaggggaccaacctgaacgcccccaacagcctgggcgtgtccgccctctgcgccatctgcggggaccgggcgacgggcaagcactacggggccagctcctgcgacggctgcaagggcttcttccgccggagcgtccgcaagaaccacatgtactcctgccggttcagccgccagtgcgtggtggacaaggacaagcggaaccagtgccgctactgccggctgaagaagtgcttccgcgccgggatgaagaaggaggccgtccagaacgagcgggaccgcatctccacccggcgcagctcctacgaggacagctccctgcccagcatcaacgcgctcctgcaggccgaggtgctgtcccggcagatcaccgcccccgtgagcggcatcaacggggacatccgcgccaagaagatcgcctccatcgcggacgtctgcgagagcatgaaggagcagctcctggtgctggtggagtgggccaagtacatcccggccttctgcgagctccccctggacgaccaggtcgccctgctccgggcccacgcgggcgagcacctcctgctgggggccaccaagcgcagcatggtgttcaaggacgtgctgctgctcggcaacgactacatcgtcccccggcactgccccgagctggccgagatgtcccgcgtgagcatccggatcctggacgagctcgtgctgccgttccaggagctgcagatcgacgacaacgagtacgcctacctcaaggccatcatcttcttcgaccccgacgcgaagggcctgtccgaccccgggaagatcaagcgcctgcgcagccaggtccaggtgtccctcgaggactacatcaacgaccggcagtacgacagccgcggccggttcggggagctgctgctcctgctgcccacgctccagtccatcacctggcagatgatcgagcagatccagttcatcaagctgttcggcatggccaagatcgacaacctgctccaggagatgctgctgggcggggccccgagcgacgcgccccacgcccaccaccccctccacccccacctgatgcaggagcacatgggcaccaacgtgatcgtcgccaacaccatgccgacgcacctgtccaacgggcagatgtgcgagtggccccgcccccggggccaggccgccgcccccgaggcgccgcagcccgccccgcccgggggcagcggctccgagccctacaagctgctccccggggccgtggccaccatcgtgaagcccctgagcgccatcccccagccgaccatcaccaagcaggaggtcatctgaggactagtccctgttcccagagcccacttttttttctttttttgaaataaaatagcctgtctttcagatctaaaaaaaaaaaaaaaaaaaaaaaaaaaaaaaaaaaaaaaaaaaaaaaaaaaaaaaaaaaaaaaaaaaaaaaaaaaaaaaaaaaaaaaaaaaaaaaaaaaa

SEQ ID NO: 5181 - RNA, 1562 nt, synthetic construct
  misc_feature 1..1562: note = mRNA a-1 (A100) (opt1) from Homo sapiens__NP_000448.3__HNF4A(39-474)(S167E_S378E_T429E_T432E _S436E)
  source 1..1562: mol_type = other RNA
aggagagtcccgcagtcggcgtccagcggctctgcttgttcgtgtgtgtgtcgttgcaggccttattcaagcttaccatggacaccagcccgtccgaggggaccaacctgaacgcccccaacagcctgggcgtgtccgccctctgcgccatctgcggggaccgggcgacgggcaagcactacggggccagctcctgcgacggctgcaagggcttcttccgccggagcgtccgcaagaaccacatgtactcctgccggttcagccgccagtgcgtggtggacaaggacaagcggaaccagtgccgctactgccggctgaagaagtgcttccgcgccgggatgaagaaggaggccgtccagaacgagcgggaccgcatctccacccggcgcagctcctacgaggacagctccctgcccagcatcaacgcgctcctgcaggccgaggtgctgtcccggcagatcaccgagcccgtgagcggcatcaacggggacatccgcgccaagaagatcgcctccatcgccgacgtctgcgagagcatgaaggagcagctcctggtgctggtggagtgggcgaagtacatcccggccttctgcgagctccccctggacgaccaggtcgccctgctccgggcccacgccggcgagcacctcctgctgggggcgaccaagcgcagcatggtgttcaaggacgtgctgctgctcggcaacgactacatcgtcccccggcactgccccgagctggccgagatgtcccgcgtgagcatccggatcctggacgagctcgtgctgccgttccaggagctgcagatcgacgacaacgagtacgcctacctcaaggccatcatcttcttcgaccccgacgccaagggcctgtccgaccccgggaagatcaagcgcctgcgcagccaggtccaggtgtccctcgaggactacatcaacgaccggcagtacgacagccgcggccggttcggggagctgctgctcctgctgcccacgctccagtccatcacctggcagatgatcgagcagatccagttcatcaagctgttcggcatggcgaagatcgacaacctgctccaggagatgctgctgggcggggagccgagcgacgcgccccacgcccaccaccccctccacccccacctgatgcaggagcacatgggcaccaacgtgatcgtcgccaacaccatgccgacgcacctgtccaacgggcagatgtgcgagtggccccgcccccggggccaggccgccgagcccgaggagccgcagcccgagccgcccgggggcagcggctccgagccctacaagctgctccccggggccgtggccaccatcgtgaagcccctgagcgccatcccccagccgaccatcaccaagcaggaggtcatctgaggactagtccctgttcccagagcccacttttttttctttttttgaaataaaatagcctgtctttcagatctaaaaaaaaaaaaaaaaaaaaaaaaaaaaaaaaaaaaaaaaaaaaaaaaaaaaaaaaaaaaaaaaaaaaaaaaaaaaaaaaaaaaaaaaaaaaaaaaaaaa

SEQ ID NO: 5182 - RNA, 1562 nt, synthetic construct
  misc_feature 1..1562: note = mRNA a-1 (A100) (opt1) from Homo sapiens__NP_000448.3__HNF4A(39-474)(S87A)
  source 1..1562: mol_type = other RNA
aggagagtcccgcagtcggcgtccagcggctctgcttgttcgtgtgtgtgtcgttgcaggccttattcaagcttaccatggacaccagcccgtccgaggggaccaacctgaacgcccccaacagcctgggcgtgtccgccctctgcgccatctgcggggaccgggcgacgggcaagcactacggggccagctcctgcgacggctgcaagggcttcttccgccgggccgtccgcaagaaccacatgtacagctgccggttctcccgccagtgcgtggtggacaaggacaagcggaaccagtgccgctactgccggctgaagaagtgcttccgcgccgggatgaagaaggaggcggtccagaacgagcgggaccgcatcagcacccggcgctccagctacgaggactccagcctgccctccatcaacgccctcctgcaggccgaggtgctgagccggcagatcacctcccccgtgagcggcatcaacggggacatccgcgccaagaagatcgcctccatcgcggacgtctgcgagagcatgaaggagcagctcctggtgctggtggagtgggccaagtacatcccggccttctgcgagctccccctggacgaccaggtcgccctgctccgggcccacgcgggcgagcacctcctgctgggggccaccaagcgcagcatggtgttcaaggacgtgctgctgctcggcaacgactacatcgtcccccggcactgccccgagctggccgagatgtcccgcgtgagcatccggatcctggacgagctcgtgctgccgttccaggagctgcagatcgacgacaacgagtacgcctacctcaaggccatcatcttcttcgaccccgacgcgaagggcctgtccgaccccgggaagatcaagcgcctgcgcagccaggtccaggtgtccctcgaggactacatcaacgaccggcagtacgacagccgcggccggttcggggagctgctgctcctgctgcccacgctccagtccatcacctggcagatgatcgagcagatccagttcatcaagctgttcggcatggccaagatcgacaacctgctccaggagatgctgctgggcgggagcccgtccgacgcgccccacgcccaccaccccctccacccccacctgatgcaggagcacatgggcaccaacgtgatcgtcgccaacaccatgccgacgcacctgagcaacgggcagatgtgcgagtggccccgcccccggggccaggccgccacccccgagaccccgcagccctccccgcccgggggcagcggctccgagccctacaagctgctccccggggccgtggccaccatcgtgaagcccctgagcgcgatcccccagccgacgatcaccaagcaggaggtcatctgaggactagtccctgttcccagagcccacttttttttctttttttgaaataaaatagcctgtctttcagatctaaaaaaaaaaaaaaaaaaaaaaaaaaaaaaaaaaaaaaaaaaaaaaaaaaaaaaaaaaaaaaaaaaaaaaaaaaaaaaaaaaaaaaaaaaaaaaaaaaaa

SEQ ID NO: 5183 - RNA, 1562 nt, synthetic construct
  misc_feature 1..1562: note = mRNA a-1 (A100) (opt1) from Homo sapiens__NP_000448.3__HNF4A(39-474)(S87E)
  source 1..1562: mol_type = other RNA
aggagagtcccgcagtcggcgtccagcggctctgcttgttcgtgtgtgtgtcgttgcaggccttattcaagcttaccatggacaccagcccgtccgaggggaccaacctgaacgcccccaacagcctgggcgtgtccgccctctgcgccatctgcggggaccgggcgacgggcaagcactacggggccagctcctgcgacggctgcaagggcttcttccgccgggaggtccgcaagaaccacatgtacagctgccggttctcccgccagtgcgtggtggacaaggacaagcggaaccagtgccgctactgccggctgaagaagtgcttccgcgccgggatgaagaaggaggccgtccagaacgagcgggaccgcatcagcacccggcgctccagctacgaggactccagcctgccctccatcaacgcgctcctgcaggccgaggtgctgagccggcagatcacctcccccgtgagcggcatcaacggggacatccgcgccaagaagatcgcctccatcgccgacgtctgcgagagcatgaaggagcagctcctggtgctggtggagtgggcgaagtacatcccggccttctgcgagctccccctggacgaccaggtcgccctgctccgggcccacgccggcgagcacctcctgctgggggcgaccaagcgcagcatggtgttcaaggacgtgctgctgctcggcaacgactacatcgtcccccggcactgccccgagctggccgagatgtcccgcgtgagcatccggatcctggacgagctcgtgctgccgttccaggagctgcagatcgacgacaacgagtacgcctacctcaaggccatcatcttcttcgaccccgacgccaagggcctgtccgaccccgggaagatcaagcgcctgcgcagccaggtccaggtgtccctcgaggactacatcaacgaccggcagtacgacagccgcggccggttcggggagctgctgctcctgctgcccacgctccagtccatcacctggcagatgatcgagcagatccagttcatcaagctgttcggcatggcgaagatcgacaacctgctccaggagatgctgctgggcgggagcccgtccgacgcgccccacgcccaccaccccctccacccccacctgatgcaggagcacatgggcaccaacgtgatcgtcgccaacaccatgccgacgcacctgagcaacgggcagatgtgcgagtggccccgcccccggggccaggccgccacccccgagaccccgcagccctccccgcccgggggcagcggctccgagccctacaagctgctccccggggccgtggccaccatcgtgaagcccctgagcgccatcccccagccgacgatcaccaagcaggaggtcatctgaggactagtccctgttcccagagcccacttttttttctttttttgaaataaaatagcctgtctttcagatctaaaaaaaaaaaaaaaaaaaaaaaaaaaaaaaaaaaaaaaaaaaaaaaaaaaaaaaaaaaaaaaaaaaaaaaaaaaaaaaaaaaaaaaaaaaaaaaaaaaa

SEQ ID NO: 5184 - RNA, 1562 nt, synthetic construct
  misc_feature 1..1562: note = mRNA a-1 (A100) (opt1) from Homo sapiens__NP_000448.3__HNF4A(39-474)(R2V)
  source 1..1562: mol_type = other RNA
aggagagtcccgcagtcggcgtccagcggctctgcttgttcgtgtgtgtgtcgttgcaggccttattcaagcttaccatggacaccagcccgtccgaggggaccaacctgaacgcccccaacagcctgggcgtgtccgccctctgcgccatctgcggggaccgcgcgacgggcaagcactacggggccagctcctgcgacggctgcaagggcttcttccggcgcagcgtgcggaagaaccacatgtactcctgccgcttcagccggcagtgcgtggtcgacaaggacaagcgcaaccagtgccggtactgccgcctgaagaagtgcttccgggccgggatgaagaaggaggccgtgcagaacgagcgcgaccggatctccacccgccggagctcctacgaggacagctccctgcccagcatcaacgcgctcctgcaggccgaggtgctgtcccgccagatcaccagccccgtctccggcatcaacggggacatccgggccaagaagatcgccagcatcgccgacgtgtgcgagagcatgaaggagcagctcctggtgctggtcgagtgggcgaagtacatcccggccttctgcgagctccccctggacgaccaggtggccctgctccgcgcccacgccggcgagcacctcctgctgggggcgaccaagcggtccatggtgttcaaggacgtcctgctgctcggcaacgactacatcgtgccccgccactgccccgagctggccgagatgagccgggtgtccatccgcatcctggacgagctcgtcctgccgttccaggagctgcagatcgacgacaacgagtacgcctacctcaaggccatcatcttcttcgaccccgacgccaagggcctgagcgaccccgggaagatcaagcggctgcgctcccaggtccaggtgagcctcgaggactacatcaacgaccgccagtacgactcccggggccgcttcggggagctgctgctcctgctgcccacgctccagagcatcacctggcagatgatcgagcagatccagttcatcaagctgttcggcatggcgaagatcgacaacctgctccaggagatgctgctgggcgggtccccgagcgacgcgccccacgcccaccaccccctccacccccacctgatgcaggagcacatgggcaccaacgtgatcgtggccaacaccatgccgacgcacctgtccaacgggcagatgtgcgagtggccccggccccgcggccaggccgccacccccgagaccccgcagcccagcccgcccgggggctccggcagcgagccctacaagctgctccccggggccgtggccaccatcgtcaagcccctgtccgccatcccccagccgacgatcaccaagcaggaggtgatctgaggactagtccctgttcccagagcccacttttttttctttttttgaaataaaatagcctgtctttcagatctaaaaaaaaaaaaaaaaaaaaaaaaaaaaaaaaaaaaaaaaaaaaaaaaaaaaaaaaaaaaaaaaaaaaaaaaaaaaaaaaaaaaaaaaaaaaaaaaaaaa

SEQ ID NO: 5185 - RNA, 1562 nt, synthetic construct
  misc_feature 1..1562: note = mRNA a-1 (A100) (opt1) from Homo sapiens__NP_000448.3__HNF4A(39-474)(R2V_K5V)
  source 1..1562: mol_type = other RNA
aggagagtcccgcagtcggcgtccagcggctctgcttgttcgtgtgtgtgtcgttgcaggccttattcaagcttaccatggacaccagcccgtccgaggggaccaacctgaacgcccccaacagcctgggcgtgtccgccctctgcgccatctgcggggaccgcgcgacgggcaagcactacggggccagctcctgcgacggctgcaagggcttcttccggcgcagcgtgcggaagaaccacatgtactcctgccgcttcagccggcagtgcgtcgtggacaaggacaagcgcaaccagtgccggtactgccgcctgaagaagtgcttccgggccgggatgaagaaggaggccgtgcagaacgagcgcgaccggatctccacccgccggagctcctacgaggacagctccctgcccagcatcaacgcgctcctgcaggccgaggtcctgtcccgccagatcaccagccccgtgtccggcatcaacggggacatccgggccaagaagatcgccagcatcgccgacgtgtgcgagagcatgaaggagcagctcctggtcctggtggagtgggcgaagtacatcccggccttctgcgagctccccctggacgaccaggtggccctgctccgcgcccacgccggcgagcacctcctgctgggggcgaccaagcggtccatggtcttcaaggacgtgctgctgctcggcaacgactacatcgtgccccgccactgccccgagctggccgagatgagccgggtctccatccgcatcctggacgagctcgtgctgccgttccaggagctgcagatcgacgacaacgagtacgcctacctcaaggccatcatcttcttcgaccccgacgccaagggcctgagcgaccccgggaagatcaagcggctgcgctcccaggtgcaggtcagcctcgaggactacatcaacgaccgccagtacgactcccggggccgcttcggggagctgctgctcctgctgcccacgctccagagcatcacctggcagatgatcgagcagatccagttcatcaagctgttcggcatggcgaagatcgacaacctgctccaggagatgctgctgggcgggtccccgagcgacgcgccccacgcccaccaccccctccacccccacctgatgcaggagcacatgggcaccaacgtgatcgtggccaacaccatgccgacgcacctgtccaacgggcagatgtgcgagtggccccggccccgcggccaggccgccacccccgagaccccgcagcccagcccgcccgggggctccggcagcgagccctacaagctgctccccggggccgtcgccaccatcgtgaagcccctgtccgccatcccccagccgacgatcaccaagcaggaggtcatctgaggactagtccctgttcccagagcccacttttttttctttttttgaaataaaatagcctgtctttcagatctaaaaaaaaaaaaaaaaaaaaaaaaaaaaaaaaaaaaaaaaaaaaaaaaaaaaaaaaaaaaaaaaaaaaaaaaaaaaaaaaaaaaaaaaaaaaaaaaaaaa

SEQ ID NO: 5186 - RNA, 1562 nt, synthetic construct
  misc_feature 1..1562: note = mRNA a-1 (A100) (opt1) from Homo sapiens__NP_000448.3__HNF4A(39-474)(K179R_K180R)
  source 1..1562: mol_type = other RNA
aggagagtcccgcagtcggcgtccagcggctctgcttgttcgtgtgtgtgtcgttgcaggccttattcaagcttaccatggacaccagcccgtccgaggggaccaacctgaacgcccccaacagcctgggcgtgtccgccctctgcgccatctgcggggaccgggcgacgggcaagcactacggggccagctcctgcgacggctgcaagggcttcttccgccggagcgtccgcaagaaccacatgtactcctgccggttcagccgccagtgcgtggtggacaaggacaagcggaaccagtgccgctactgccggctgaagaagtgcttccgcgccgggatgaagaaggaggccgtccagaacgagcgggaccgcatctccacccggcgcagctcctacgaggacagctccctgcccagcatcaacgcgctcctgcaggccgaggtgctgtcccggcagatcaccagccccgtgtccggcatcaacggggacatccgcgcccggcgcatcgccagcatcgccgacgtctgcgagagcatgaaggagcagctcctggtgctggtggagtgggcgaagtacatcccggccttctgcgagctccccctggacgaccaggtcgccctgctccgggcccacgccggcgagcacctcctgctgggggcgaccaagcgctccatggtgttcaaggacgtgctgctgctcggcaacgactacatcgtcccccggcactgccccgagctggccgagatgagccgcgtgtccatccgcatcctggacgagctcgtgctgccgttccaggagctgcagatcgacgacaacgagtacgcctacctcaaggccatcatcttcttcgaccccgacgccaagggcctgagcgaccccgggaagatcaagcggctgcgctcccaggtccaggtgagcctcgaggactacatcaacgaccggcagtacgactcccgcggccggttcggggagctgctgctcctgctgcccacgctccagagcatcacctggcagatgatcgagcagatccagttcatcaagctgttcggcatggcgaagatcgacaacctgctccaggagatgctgctgggcgggtccccgagcgacgcgccccacgcccaccaccccctccacccccacctgatgcaggagcacatgggcaccaacgtgatcgtcgccaacaccatgccgacgcacctgtccaacgggcagatgtgcgagtggccccgcccccggggccaggccgccacccccgagaccccgcagcccagcccgcccgggggctccggcagcgagccctacaagctgctccccggggccgtggccaccatcgtgaagcccctgtccgccatcccccagccgacgatcaccaagcaggaggtcatctgaggactagtccctgttcccagagcccacttttttttctttttttgaaataaaatagcctgtctttcagatctaaaaaaaaaaaaaaaaaaaaaaaaaaaaaaaaaaaaaaaaaaaaaaaaaaaaaaaaaaaaaaaaaaaaaaaaaaaaaaaaaaaaaaaaaaaaaaaaaaaa

SEQ ID NO: 5187 - RNA, 1562 nt, synthetic construct
  misc_feature 1..1562: note = mRNA a-1 (A100) (opt1) from Homo sapiens__NP_000448.3__HNF4A(39-474)(K234R)
  source 1..1562: mol_type = other RNA
aggagagtcccgcagtcggcgtccagcggctctgcttgttcgtgtgtgtgtcgttgcaggccttattcaagcttaccatggacaccagcccgtccgaggggaccaacctgaacgcccccaacagcctgggcgtgtccgccctctgcgccatctgcggggaccgggcgacgggcaagcactacggggccagctcctgcgacggctgcaagggcttcttccgccggagcgtccgcaagaaccacatgtactcctgccggttcagccgccagtgcgtggtggacaaggacaagcggaaccagtgccgctactgccggctgaagaagtgcttccgcgccgggatgaagaaggaggccgtccagaacgagcgggaccgcatctccacccggcgcagctcctacgaggacagctccctgcccagcatcaacgcgctcctgcaggccgaggtgctgtcccggcagatcaccagccccgtgtccggcatcaacggggacatccgcgccaagaagatcgccagcatcgccgacgtctgcgagagcatgaaggagcagctcctggtgctggtggagtgggcgaagtacatcccggccttctgcgagctccccctggacgaccaggtcgccctgctccgggcccacgccggcgagcacctcctgctgggggcgacccgccggtccatggtgttcaaggacgtgctgctgctcggcaacgactacatcgtcccccgccactgccccgagctggccgagatgagccgggtgtccatccgcatcctggacgagctcgtgctgccgttccaggagctgcagatcgacgacaacgagtacgcctacctcaaggccatcatcttcttcgaccccgacgccaagggcctgagcgaccccgggaagatcaagcgcctgcggtcccaggtccaggtgagcctcgaggactacatcaacgaccgccagtacgactcccggggccgcttcggggagctgctgctcctgctgcccacgctccagagcatcacctggcagatgatcgagcagatccagttcatcaagctgttcggcatggcgaagatcgacaacctgctccaggagatgctgctgggcgggtccccgagcgacgcgccccacgcccaccaccccctccacccccacctgatgcaggagcacatgggcaccaacgtgatcgtcgccaacaccatgccgacgcacctgtccaacgggcagatgtgcgagtggccccggccccgcggccaggccgccacccccgagaccccgcagcccagcccgcccgggggctccggcagcgagccctacaagctgctccccggggccgtggccaccatcgtgaagcccctgtccgccatcccccagccgacgatcaccaagcaggaggtcatctgaggactagtccctgttcccagagcccacttttttttctttttttgaaataaaatagcctgtctttcagatctaaaaaaaaaaaaaaaaaaaaaaaaaaaaaaaaaaaaaaaaaaaaaaaaaaaaaaaaaaaaaaaaaaaaaaaaaaaaaaaaaaaaaaaaaaaaaaaaaaaa

SEQ ID NO: 5188 - RNA, 1562 nt, synthetic construct
  misc_feature 1..1562: note = mRNA a-1 (A100) (opt1) from Homo sapiens__NP_000448.3__HNF4A(39-474)(K300R)
  source 1..1562: mol_type = other RNA
aggagagtcccgcagtcggcgtccagcggctctgcttgttcgtgtgtgtgtcgttgcaggccttattcaagcttaccatggacaccagcccgtccgaggggaccaacctgaacgcccccaacagcctgggcgtgtccgccctctgcgccatctgcggggaccgggcgacgggcaagcactacggggccagctcctgcgacggctgcaagggcttcttccgccggagcgtccgcaagaaccacatgtactcctgccggttcagccgccagtgcgtggtggacaaggacaagcggaaccagtgccgctactgccggctgaagaagtgcttccgcgccgggatgaagaaggaggccgtccagaacgagcgggaccgcatctccacccggcgcagctcctacgaggacagctccctgcccagcatcaacgcgctcctgcaggccgaggtgctgtcccggcagatcaccagccccgtgtccggcatcaacggggacatccgcgccaagaagatcgccagcatcgccgacgtctgcgagagcatgaaggagcagctcctggtgctggtggagtgggcgaagtacatcccggccttctgcgagctccccctggacgaccaggtcgccctgctccgggcccacgccggcgagcacctcctgctgggggcgaccaagcgctccatggtgttcaaggacgtgctgctgctcggcaacgactacatcgtcccccggcactgccccgagctggccgagatgagccgcgtgtccatccggatcctggacgagctcgtgctgccgttccaggagctgcagatcgacgacaacgagtacgcctacctcaaggccatcatcttcttcgaccccgacgcccgcggcctgagcgaccccgggaagatcaagcgcctgcggtcccaggtccaggtgagcctcgaggactacatcaacgaccgccagtacgactcccggggccgcttcggggagctgctgctcctgctgcccacgctccagagcatcacctggcagatgatcgagcagatccagttcatcaagctgttcggcatggcgaagatcgacaacctgctccaggagatgctgctgggcgggtccccgagcgacgcgccccacgcccaccaccccctccacccccacctgatgcaggagcacatgggcaccaacgtgatcgtcgccaacaccatgccgacgcacctgtccaacgggcagatgtgcgagtggccccggccccgcggccaggccgccacccccgagaccccgcagcccagcccgcccgggggctccggcagcgagccctacaagctgctccccggggccgtggccaccatcgtgaagcccctgtccgccatcccccagccgacgatcaccaagcaggaggtcatctgaggactagtccctgttcccagagcccacttttttttctttttttgaaataaaatagcctgtctttcagatctaaaaaaaaaaaaaaaaaaaaaaaaaaaaaaaaaaaaaaaaaaaaaaaaaaaaaaaaaaaaaaaaaaaaaaaaaaaaaaaaaaaaaaaaaaaaaaaaaaaa

SEQ ID NO: 5189 - RNA, 1562 nt, synthetic construct
  misc_feature 1..1562: note = mRNA a-1 (A100) (opt1) from Homo sapiens__NP_000448.3__HNF4A(39-474)(K300R_K307R_K309R)
  source 1..1562: mol_type = other RNA
aggagagtcccgcagtcggcgtccagcggctctgcttgttcgtgtgtgtgtcgttgcaggccttattcaagcttaccatggacaccagcccgtccgaggggaccaacctgaacgcccccaacagcctgggcgtgtccgccctctgcgccatctgcggggaccgggcgacgggcaagcactacggggccagctcctgcgacggctgcaagggcttcttccgccggagcgtccgcaagaaccacatgtactcctgccggttcagccgccagtgcgtggtggacaaggacaagcggaaccagtgccgctactgccggctgaagaagtgcttccgcgccgggatgaagaaggaggccgtccagaacgagcgggaccgcatctccacccggcgcagctcctacgaggacagctccctgcccagcatcaacgcgctcctgcaggccgaggtgctgtcccggcagatcaccagccccgtgtccggcatcaacggggacatccgcgccaagaagatcgccagcatcgccgacgtctgcgagagcatgaaggagcagctcctggtgctggtggagtgggcgaagtacatcccggccttctgcgagctccccctggacgaccaggtcgccctgctccgggcccacgccggcgagcacctcctgctgggggcgaccaagcgctccatggtgttcaaggacgtgctgctgctcggcaacgactacatcgtcccccggcactgccccgagctggccgagatgagccgcgtgtccatccggatcctggacgagctcgtgctgccgttccaggagctgcagatcgacgacaacgagtacgcctacctcaaggccatcatcttcttcgaccccgacgcccgcggcctgagcgaccccgggcgcatccggcgcctgcggtcccaggtccaggtgagcctcgaggactacatcaacgaccgccagtacgactcccggggccgcttcggggagctgctgctcctgctgcccacgctccagagcatcacctggcagatgatcgagcagatccagttcatcaagctgttcggcatggcgaagatcgacaacctgctccaggagatgctgctgggcgggtccccgagcgacgcgccccacgcccaccaccccctccacccccacctgatgcaggagcacatgggcaccaacgtgatcgtcgccaacaccatgccgacgcacctgtccaacgggcagatgtgcgagtggccccggccccgcggccaggccgccacccccgagaccccgcagcccagcccgcccgggggctccggcagcgagccctacaagctgctccccggggccgtggccaccatcgtgaagcccctgtccgccatcccccagccgacgatcaccaagcaggaggtcatctgaggactagtccctgttcccagagcccacttttttttctttttttgaaataaaatagcctgtctttcagatctaaaaaaaaaaaaaaaaaaaaaaaaaaaaaaaaaaaaaaaaaaaaaaaaaaaaaaaaaaaaaaaaaaaaaaaaaaaaaaaaaaaaaaaaaaaaaaaaaaaa

SEQ ID NO: 5190 - RNA, 1562 nt, synthetic construct
  misc_feature 1..1562: note = mRNA a-1 (A100) (opt1) from Homo sapiens__NP_000448.3__HNF4A(39-474)(K447R_K470R)
  source 1..1562: mol_type = other RNA
aggagagtcccgcagtcggcgtccagcggctctgcttgttcgtgtgtgtgtcgttgcaggccttattcaagcttaccatggacaccagcccgtccgaggggaccaacctgaacgcccccaacagcctgggcgtgtccgccctctgcgccatctgcggggaccgggcgacgggcaagcactacggggccagctcctgcgacggctgcaagggcttcttccgccggagcgtccgcaagaaccacatgtactcctgccggttcagccgccagtgcgtggtggacaaggacaagcggaaccagtgccgctactgccggctgaagaagtgcttccgcgccgggatgaagaaggaggccgtccagaacgagcgggaccgcatctccacccggcgcagctcctacgaggacagctccctgcccagcatcaacgcgctcctgcaggccgaggtgctgtcccggcagatcaccagccccgtgtccggcatcaacggggacatccgcgccaagaagatcgccagcatcgccgacgtctgcgagagcatgaaggagcagctcctggtgctggtggagtgggcgaagtacatcccggccttctgcgagctccccctggacgaccaggtcgccctgctccgggcccacgccggcgagcacctcctgctgggggcgaccaagcgctccatggtgttcaaggacgtgctgctgctcggcaacgactacatcgtcccccggcactgccccgagctggccgagatgagccgcgtgtccatccggatcctggacgagctcgtgctgccgttccaggagctgcagatcgacgacaacgagtacgcctacctcaaggccatcatcttcttcgaccccgacgccaagggcctgagcgaccccgggaagatcaagcgcctgcgctcccaggtccaggtgagcctcgaggactacatcaacgaccggcagtacgactcccgcggccggttcggggagctgctgctcctgctgcccacgctccagagcatcacctggcagatgatcgagcagatccagttcatcaagctgttcggcatggcgaagatcgacaacctgctccaggagatgctgctgggcgggtccccgagcgacgcgccccacgcccaccaccccctccacccccacctgatgcaggagcacatgggcaccaacgtgatcgtcgccaacaccatgccgacgcacctgtccaacgggcagatgtgcgagtggccccgcccccggggccaggccgccacccccgagaccccgcagcccagcccgcccgggggctccggcagcgagccctaccgcctgctccccggggccgtggccaccatcgtgaagcccctgtccgccatcccccagccgacgatcacccggcaggaggtcatctgaggactagtccctgttcccagagcccacttttttttctttttttgaaataaaatagcctgtctttcagatctaaaaaaaaaaaaaaaaaaaaaaaaaaaaaaaaaaaaaaaaaaaaaaaaaaaaaaaaaaaaaaaaaaaaaaaaaaaaaaaaaaaaaaaaaaaaaaaaaaaa

SEQ ID NO: 5191 - RNA, 1562 nt, synthetic construct
  misc_feature 1..1562: note = mRNA a-1 (A100) (opt1) from Homo sapiens__NP_000448.3__HNF4A(39-474)(K458R)
  source 1..1562: mol_type = other RNA
aggagagtcccgcagtcggcgtccagcggctctgcttgttcgtgtgtgtgtcgttgcaggccttattcaagcttaccatggacaccagcccgtccgaggggaccaacctgaacgcccccaacagcctgggcgtgtccgccctctgcgccatctgcggggaccgggcgacgggcaagcactacggggccagctcctgcgacggctgcaagggcttcttccgccggagcgtccgcaagaaccacatgtactcctgccggttcagccgccagtgcgtggtggacaaggacaagcggaaccagtgccgctactgccggctgaagaagtgcttccgcgccgggatgaagaaggaggccgtccagaacgagcgggaccgcatctccacccggcgcagctcctacgaggacagctccctgcccagcatcaacgcgctcctgcaggccgaggtgctgtcccggcagatcaccagccccgtgtccggcatcaacggggacatccgcgccaagaagatcgccagcatcgccgacgtctgcgagagcatgaaggagcagctcctggtgctggtggagtgggcgaagtacatcccggccttctgcgagctccccctggacgaccaggtcgccctgctccgggcccacgccggcgagcacctcctgctgggggcgaccaagcgctccatggtgttcaaggacgtgctgctgctcggcaacgactacatcgtcccccggcactgccccgagctggccgagatgagccgcgtgtccatccggatcctggacgagctcgtgctgccgttccaggagctgcagatcgacgacaacgagtacgcctacctcaaggccatcatcttcttcgaccccgacgccaagggcctgagcgaccccgggaagatcaagcgcctgcgctcccaggtccaggtgagcctcgaggactacatcaacgaccggcagtacgactcccgcggccggttcggggagctgctgctcctgctgcccacgctccagagcatcacctggcagatgatcgagcagatccagttcatcaagctgttcggcatggcgaagatcgacaacctgctccaggagatgctgctgggcgggtccccgagcgacgcgccccacgcccaccaccccctccacccccacctgatgcaggagcacatgggcaccaacgtgatcgtcgccaacaccatgccgacgcacctgtccaacgggcagatgtgcgagtggccccgcccccggggccaggccgccacccccgagaccccgcagcccagcccgcccgggggctccggcagcgagccctacaagctgctccccggggccgtggccaccatcgtgcgccccctgtccgccatcccccagccgacgatcaccaagcaggaggtcatctgaggactagtccctgttcccagagcccacttttttttctttttttgaaataaaatagcctgtctttcagatctaaaaaaaaaaaaaaaaaaaaaaaaaaaaaaaaaaaaaaaaaaaaaaaaaaaaaaaaaaaaaaaaaaaaaaaaaaaaaaaaaaaaaaaaaaaaaaaaaaaa

SEQ ID NO: 5192 - RNA, 1562 nt, synthetic construct
  misc_feature 1..1562: note = mRNA a-1 (A100) (opt1) from Homo sapiens__NP_000448.3__HNF4A(39-474)(K106R_K108R_K126R_K127R )
  source 1..1562: mol_type = other RNA
aggagagtcccgcagtcggcgtccagcggctctgcttgttcgtgtgtgtgtcgttgcaggccttattcaagcttaccatggacaccagcccgtccgaggggaccaacctgaacgcccccaacagcctgggcgtgtccgccctctgcgccatctgcggggaccgggcgacgggcaagcactacggggccagctcctgcgacggctgcaagggcttcttccgccggagcgtccgcaagaaccacatgtactcctgccggttcagccgccagtgcgtggtggaccgggaccgccggaaccagtgccgctactgccggctgaagaagtgcttccgcgccgggatgcggcgcgaggccgtccagaacgagcgggaccgcatctccacccggcgcagctcctacgaggacagctccctgcccagcatcaacgcgctcctgcaggccgaggtgctgtcccggcagatcaccagccccgtgtccggcatcaacggggacatccgcgccaagaagatcgccagcatcgccgacgtctgcgagagcatgaaggagcagctcctggtgctggtggagtgggcgaagtacatcccggccttctgcgagctccccctggacgaccaggtcgccctgctccgggcccacgccggcgagcacctcctgctgggggcgaccaagcgctccatggtgttcaaggacgtgctgctgctcggcaacgactacatcgtcccccgccactgccccgagctggccgagatgagccgggtgtccatccgcatcctggacgagctcgtgctgccgttccaggagctgcagatcgacgacaacgagtacgcctacctcaaggccatcatcttcttcgaccccgacgccaagggcctgagcgaccccgggaagatcaagcggctgcgctcccaggtccaggtgagcctcgaggactacatcaacgaccggcagtacgactcccgcggccggttcggggagctgctgctcctgctgcccacgctccagagcatcacctggcagatgatcgagcagatccagttcatcaagctgttcggcatggcgaagatcgacaacctgctccaggagatgctgctgggcgggtccccgagcgacgcgccccacgcccaccaccccctccacccccacctgatgcaggagcacatgggcaccaacgtgatcgtcgccaacaccatgccgacgcacctgtccaacgggcagatgtgcgagtggccccgcccccggggccaggccgccacccccgagaccccgcagcccagcccgcccgggggctccggcagcgagccctacaagctgctccccggggccgtggccaccatcgtgaagcccctgtccgccatcccccagccgacgatcaccaagcaggaggtcatctgaggactagtccctgttcccagagcccacttttttttctttttttgaaataaaatagcctgtctttcagatctaaaaaaaaaaaaaaaaaaaaaaaaaaaaaaaaaaaaaaaaaaaaaaaaaaaaaaaaaaaaaaaaaaaaaaaaaaaaaaaaaaaaaaaaaaaaaaaaaaaa

SEQ ID NO: 5193 - RNA, 1562 nt, synthetic construct; identical to SEQ ID NO: 5144
  misc_feature 1..1562: note = mRNA a-1 (A100) (opt1) from Homo sapiens__NP_000448.3__HNF4A(39-474)(E285Q)
  source 1..1562: mol_type = other RNA

SEQ ID NO: 5194 - RNA, 1562 nt, synthetic construct
  misc_feature 1..1562: note = mRNA a-1 (A100) (opt1) from Homo sapiens__NP_000448.3__HNF4A(39-474)(T166E)
  source 1..1562: mol_type = other RNA
aggagagtcccgcagtcggcgtccagcggctctgcttgttcgtgtgtgtgtcgttgcaggccttattcaagcttaccatggacaccagcccgtccgaggggaccaacctgaacgcccccaacagcctgggcgtgtccgccctctgcgccatctgcggggaccgggcgacgggcaagcactacggggccagctcctgcgacggctgcaagggcttcttccgccggagcgtccgcaagaaccacatgtactcctgccggttcagccgccagtgcgtggtggacaaggacaagcggaaccagtgccgctactgccggctgaagaagtgcttccgcgccgggatgaagaaggaggccgtccagaacgagcgggaccgcatctccacccggcgcagctcctacgaggacagctccctgcccagcatcaacgcgctcctgcaggccgaggtgctgtcccggcagatcgagagccccgtgtccggcatcaacggggacatccgcgccaagaagatcgccagcatcgccgacgtctgcgagagcatgaaggagcagctcctggtgctggtggagtgggcgaagtacatcccggccttctgcgagctccccctggacgaccaggtcgccctgctccgggcccacgccggcgagcacctcctgctgggggcgaccaagcgctccatggtgttcaaggacgtgctgctgctcggcaacgactacatcgtcccccggcactgccccgagctggccgagatgagccgcgtgtccatccggatcctggacgagctcgtgctgccgttccaggagctgcagatcgacgacaacgagtacgcctacctcaaggccatcatcttcttcgaccccgacgccaagggcctgagcgaccccgggaagatcaagcgcctgcgctcccaggtccaggtgagcctcgaggactacatcaacgaccggcagtacgactcccgcggccggttcggggagctgctgctcctgctgcccaccctccagagcatcacgtggcagatgatcgagcagatccagttcatcaagctgttcggcatggcgaagatcgacaacctgctccaggagatgctgctgggcgggtccccgagcgacgcgccccacgcccaccaccccctccacccccacctgatgcaggagcacatgggcaccaacgtgatcgtcgccaacaccatgccgacccacctgtccaacgggcagatgtgcgagtggccccgcccccggggccaggccgccacgcccgagaccccgcagcccagcccgcccgggggctccggcagcgagccctacaagctgctccccggggccgtggccaccatcgtgaagcccctgtccgccatcccccagccgaccatcacgaagcaggaggtcatctgaggactagtccctgttcccagagcccacttttttttctttttttgaaataaaatagcctgtctttcagatctaaaaaaaaaaaaaaaaaaaaaaaaaaaaaaaaaaaaaaaaaaaaaaaaaaaaaaaaaaaaaaaaaaaaaaaaaaaaaaaaaaaaaaaaaaaaaaaaaaaa

SEQ ID NO: 5195 - RNA, 1562 nt, synthetic construct
  misc_feature 1..1562: note = mRNA a-1 (A100) (opt1) from Homo sapiens__NP_000448.3__HNF4A(39-474)(S148A)
  source 1..1562: mol_type = other RNA
aggagagtcccgcagtcggcgtccagcggctctgcttgttcgtgtgtgtgtcgttgcaggccttattcaagcttaccatggacaccagcccgtccgaggggaccaacctgaacgcccccaacagcctgggcgtgtccgccctctgcgccatctgcggggaccgggcgacgggcaagcactacggggccagctcctgcgacggctgcaagggcttcttccgccggagcgtccgcaagaaccacatgtactcctgccggttcagccgccagtgcgtggtggacaaggacaagcggaaccagtgccgctactgccggctgaagaagtgcttccgcgccgggatgaagaaggaggccgtccagaacgagcgggaccgcatctccacccggcgcagctcctacgaggacagcgcgctgccctccatcaacgccctcctgcaggccgaggtgctgagccggcagatcacctcccccgtgagcggcatcaacggggacatccgcgccaagaagatcgcctccatcgcggacgtctgcgagagcatgaaggagcagctcctggtgctggtggagtgggccaagtacatcccggccttctgcgagctccccctggacgaccaggtcgccctgctccgggcccacgcgggcgagcacctcctgctgggggccaccaagcgcagcatggtgttcaaggacgtgctgctgctcggcaacgactacatcgtcccccggcactgccccgagctggccgagatgtcccgcgtgagcatccggatcctggacgagctcgtgctgccgttccaggagctgcagatcgacgacaacgagtacgcctacctcaaggccatcatcttcttcgaccccgacgcgaagggcctgtccgaccccgggaagatcaagcgcctgcgcagccaggtccaggtgtccctcgaggactacatcaacgaccggcagtacgacagccgcggccggttcggggagctgctgctcctgctgcccacgctccagtccatcacctggcagatgatcgagcagatccagttcatcaagctgttcggcatggccaagatcgacaacctgctccaggagatgctgctgggcgggagcccgtccgacgcgccccacgcccaccaccccctccacccccacctgatgcaggagcacatgggcaccaacgtgatcgtcgccaacaccatgccgacgcacctgagcaacgggcagatgtgcgagtggccccgcccccggggccaggccgccacccccgagaccccgcagccctccccgcccgggggcagcggctccgagccctacaagctgctccccggggccgtggccaccatcgtgaagcccctgagcgcgatcccccagccgacgatcaccaagcaggaggtcatctgaggactagtccctgttcccagagcccacttttttttctttttttgaaataaaatagcctgtctttcagatctaaaaaaaaaaaaaaaaaaaaaaaaaaaaaaaaaaaaaaaaaaaaaaaaaaaaaaaaaaaaaaaaaaaaaaaaaaaaaaaaaaaaaaaaaaaaaaaaaaaa

SEQ ID NO: 5196 - RNA, 1562 nt, synthetic construct
  misc_feature 1..1562: note = mRNA a-1 (A100) (opt1) from Homo sapiens__NP_000448.3__HNF4A(39-474)(S148E)
  source 1..1562: mol_type = other RNA
aggagagtcccgcagtcggcgtccagcggctctgcttgttcgtgtgtgtgtcgttgcaggccttattcaagcttaccatggacaccagcccgtccgaggggaccaacctgaacgcccccaacagcctgggcgtgtccgccctctgcgccatctgcggggaccgggcgacgggcaagcactacggggccagctcctgcgacggctgcaagggcttcttccgccggagcgtccgcaagaaccacatgtactcctgccggttcagccgccagtgcgtggtggacaaggacaagcggaaccagtgccgctactgccggctgaagaagtgcttccgcgccgggatgaagaaggaggccgtccagaacgagcgggaccgcatctccacccggcgcagctcctacgaggacagcgagctgccctccatcaacgcgctcctgcaggccgaggtgctgagccggcagatcacctcccccgtgagcggcatcaacggggacatccgcgccaagaagatcgcctccatcgccgacgtctgcgagagcatgaaggagcagctcctggtgctggtggagtgggcgaagtacatcccggccttctgcgagctccccctggacgaccaggtcgccctgctccgggcccacgccggcgagcacctcctgctgggggcgaccaagcgcagcatggtgttcaaggacgtgctgctgctcggcaacgactacatcgtcccccggcactgccccgagctggccgagatgtcccgcgtgagcatccggatcctggacgagctcgtgctgccgttccaggagctgcagatcgacgacaacgagtacgcctacctcaaggccatcatcttcttcgaccccgacgccaagggcctgtccgaccccgggaagatcaagcgcctgcgcagccaggtccaggtgtccctcgaggactacatcaacgaccggcagtacgacagccgcggccggttcggggagctgctgctcctgctgcccacgctccagtccatcacctggcagatgatcgagcagatccagttcatcaagctgttcggcatggcgaagatcgacaacctgctccaggagatgctgctgggcgggagcccgtccgacgcgccccacgcccaccaccccctccacccccacctgatgcaggagcacatgggcaccaacgtgatcgtcgccaacaccatgccgacgcacctgagcaacgggcagatgtgcgagtggccccgcccccggggccaggccgccacccccgagaccccgcagccctccccgcccgggggcagcggctccgagccctacaagctgctccccggggccgtggccaccatcgtgaagcccctgagcgccatcccccagccgacgatcaccaagcaggaggtcatctgaggactagtccctgttcccagagcccacttttttttctttttttgaaataaaatagcctgtctttcagatctaaaaaaaaaaaaaaaaaaaaaaaaaaaaaaaaaaaaaaaaaaaaaaaaaaaaaaaaaaaaaaaaaaaaaaaaaaaaaaaaaaaaaaaaaaaaaaaaaaaa

SEQ ID NO: 5197 - RNA, 1562 nt, synthetic construct
  misc_feature 1..1562: note = mRNA a-1 (A100) (opt1) from Homo sapiens__NP_000448.3__HNF4A(39-474)(S183A)
  source 1..1562: mol_type = other RNA
aggagagtcccgcagtcggcgtccagcggctctgcttgttcgtgtgtgtgtcgttgcaggccttattcaagcttaccatggacaccagcccgtccgaggggaccaacctgaacgcccccaacagcctgggcgtgtccgccctctgcgccatctgcggggaccgggcgacgggcaagcactacggggccagctcctgcgacggctgcaagggcttcttccgccggagcgtccgcaagaaccacatgtactcctgccggttcagccgccagtgcgtggtggacaaggacaagcggaaccagtgccgctactgccggctgaagaagtgcttccgcgccgggatgaagaaggaggccgtccagaacgagcgggaccgcatctccacccggcgcagctcctacgaggacagctccctgcccagcatcaacgcgctcctgcaggccgaggtgctgtcccggcagatcaccagccccgtgtccggcatcaacggggacatccgcgccaagaagatcgccgccatcgcggacgtctgcgagagcatgaaggagcagctcctggtgctggtggagtgggccaagtacatcccggccttctgcgagctccccctggacgaccaggtcgccctgctccgggcccacgcgggcgagcacctcctgctgggggccaccaagcgcagcatggtgttcaaggacgtgctgctgctcggcaacgactacatcgtcccccggcactgccccgagctggccgagatgtcccgcgtgagcatccggatcctggacgagctcgtgctgccgttccaggagctgcagatcgacgacaacgagtacgcctacctcaaggccatcatcttcttcgaccccgacgcgaagggcctgtccgaccccgggaagatcaagcgcctgcgcagccaggtccaggtgtccctcgaggactacatcaacgaccggcagtacgacagccgcggccggttcggggagctgctgctcctgctgcccacgctccagtccatcacctggcagatgatcgagcagatccagttcatcaagctgttcggcatggccaagatcgacaacctgctccaggagatgctgctgggcgggagcccgtccgacgcgccccacgcccaccaccccctccacccccacctgatgcaggagcacatgggcaccaacgtgatcgtcgccaacaccatgccgacgcacctgagcaacgggcagatgtgcgagtggccccgcccccggggccaggccgccacccccgagaccccgcagccctccccgcccgggggcagcggctccgagccctacaagctgctccccggggccgtggccaccatcgtgaagcccctgagcgcgatcccccagccgacgatcaccaagcaggaggtcatctgaggactagtccctgttcccagagcccacttttttttctttttttgaaataaaatagcctgtctttcagatctaaaaaaaaaaaaaaaaaaaaaaaaaaaaaaaaaaaaaaaaaaaaaaaaaaaaaaaaaaaaaaaaaaaaaaaaaaaaaaaaaaaaaaaaaaaaaaaaaaaa

SEQ ID NO: 5198 - RNA, 1562 nt, synthetic construct
  misc_feature 1..1562: note = mRNA a-1 (A100) (opt1) from Homo sapiens__NP_000448.3__HNF4A(39-474)(S183E)
  source 1..1562: mol_type = other RNA
aggagagtcccgcagtcggcgtccagcggctctgcttgttcgtgtgtgtgtcgttgcaggccttattcaagcttaccatggacaccagcccgtccgaggggaccaacctgaacgcccccaacagcctgggcgtgtccgccctctgcgccatctgcggggaccgggcgacgggcaagcactacggggccagctcctgcgacggctgcaagggcttcttccgccggagcgtccgcaagaaccacatgtactcctgccggttcagccgccagtgcgtggtggacaaggacaagcggaaccagtgccgctactgccggctgaagaagtgcttccgcgccgggatgaagaaggaggccgtccagaacgagcgggaccgcatctccacccggcgcagctcctacgaggacagctccctgcccagcatcaacgcgctcctgcaggccgaggtgctgtcccggcagatcaccagccccgtgtccggcatcaacggggacatccgcgccaagaagatcgccgagatcgccgacgtctgcgagagcatgaaggagcagctcctggtgctggtggagtgggcgaagtacatcccggccttctgcgagctccccctggacgaccaggtcgccctgctccgggcccacgccggcgagcacctcctgctgggggcgaccaagcgcagcatggtgttcaaggacgtgctgctgctcggcaacgactacatcgtcccccggcactgccccgagctggccgagatgtcccgcgtgagcatccggatcctggacgagctcgtgctgccgttccaggagctgcagatcgacgacaacgagtacgcctacctcaaggccatcatcttcttcgaccccgacgccaagggcctgtccgaccccgggaagatcaagcgcctgcgcagccaggtccaggtgtccctcgaggactacatcaacgaccggcagtacgacagccgcggccggttcggggagctgctgctcctgctgcccacgctccagtccatcacctggcagatgatcgagcagatccagttcatcaagctgttcggcatggcgaagatcgacaacctgctccaggagatgctgctgggcgggagcccgtccgacgcgccccacgcccaccaccccctccacccccacctgatgcaggagcacatgggcaccaacgtgatcgtcgccaacaccatgccgacgcacctgagcaacgggcagatgtgcgagtggccccgcccccggggccaggccgccacccccgagaccccgcagccctccccgcccgggggcagcggctccgagccctacaagctgctccccggggccgtggccaccatcgtgaagcccctgagcgccatcccccagccgacgatcaccaagcaggaggtcatctgaggactagtccctgttcccagagcccacttttttttctttttttgaaataaaatagcctgtctttcagatctaaaaaaaaaaaaaaaaaaaaaaaaaaaaaaaaaaaaaaaaaaaaaaaaaaaaaaaaaaaaaaaaaaaaaaaaaaaaaaaaaaaaaaaaaaaaaaaaaaaa

SEQ ID NO: 5199 - RNA, 1562 nt, synthetic construct
  misc_feature 1..1562: note = mRNA a-1 (A100) (opt1) from Homo sapiens__NP_000448.3__HNF4A(39-474)(S461A)
  source 1..1562: mol_type = other RNA
aggagagtcccgcagtcggcgtccagcggctctgcttgttcgtgtgtgtgtcgttgcaggccttattcaagcttaccatggacaccagcccgtccgaggggaccaacctgaacgcccccaacagcctgggcgtgtccgccctctgcgccatctgcggggaccgggcgacgggcaagcactacggggccagctcctgcgacggctgcaagggcttcttccgccggagcgtccgcaagaaccacatgtactcctgccggttcagccgccagtgcgtggtggacaaggacaagcggaaccagtgccgctactgccggctgaagaagtgcttccgcgccgggatgaagaaggaggccgtccagaacgagcgggaccgcatctccacccggcgcagctcctacgaggacagctccctgcccagcatcaacgcgctcctgcaggccgaggtgctgtcccggcagatcaccagccccgtgtccggcatcaacggggacatccgcgccaagaagatcgccagcatcgccgacgtctgcgagagcatgaaggagcagctcctggtgctggtggagtgggcgaagtacatcccggccttctgcgagctccccctggacgaccaggtcgccctgctccgggcccacgccggcgagcacctcctgctgggggcgaccaagcgctccatggtgttcaaggacgtgctgctgctcggcaacgactacatcgtcccccggcactgccccgagctggccgagatgagccgcgtgtccatccggatcctggacgagctcgtgctgccgttccaggagctgcagatcgacgacaacgagtacgcctacctcaaggccatcatcttcttcgaccccgacgccaagggcctgagcgaccccgggaagatcaagcgcctgcgctcccaggtccaggtgagcctcgaggactacatcaacgaccggcagtacgactcccgcggccggttcggggagctgctgctcctgctgcccacgctccagagcatcacctggcagatgatcgagcagatccagttcatcaagctgttcggcatggcgaagatcgacaacctgctccaggagatgctgctgggcgggtccccgagcgacgcgccccacgcccaccaccccctccacccccacctgatgcaggagcacatgggcaccaacgtgatcgtcgccaacaccatgccgacgcacctgtccaacgggcagatgtgcgagtggccccgcccccggggccaggccgccacccccgagaccccgcagcccagcccgcccgggggctccggcagcgagccctacaagctgctccccggggccgtggccaccatcgtgaagcccctggccgcgatcccccagccgacgatcaccaagcaggaggtcatctgaggactagtccctgttcccagagcccacttttttttctttttttgaaataaaatagcctgtctttcagatctaaaaaaaaaaaaaaaaaaaaaaaaaaaaaaaaaaaaaaaaaaaaaaaaaaaaaaaaaaaaaaaaaaaaaaaaaaaaaaaaaaaaaaaaaaaaaaaaaaaa

SEQ ID NO: 5200 - RNA, 1562 nt, synthetic construct; identical to SEQ ID NO: 5151
  misc_feature 1..1562: note = mRNA a-1 (A100) (opt1) from Homo sapiens__NP_000448.3__HNF4A(39-474)(S461E)
  source 1..1562: mol_type = other RNA

SEQ ID NO: 5201 - RNA, 1562 nt, synthetic construct
  misc_feature 1..1562: note = mRNA a-1 (A100) (opt1) from Homo sapiens__NP_000448.3__HNF4A(39-474)(S142A_S143A_S313A)
  source 1..1562: mol_type = other RNA
aggagagtcccgcagtcggcgtccagcggctctgcttgttcgtgtgtgtgtcgttgcaggccttattcaagcttaccatggacaccagcccgtccgaggggaccaacctgaacgcccccaacagcctgggcgtgtccgccctctgcgccatctgcggggaccgggcgacgggcaagcactacggggccagctcctgcgacggctgcaagggcttcttccgccggagcgtccgcaagaaccacatgtactcctgccggttcagccgccagtgcgtggtggacaaggacaagcggaaccagtgccgctactgccggctgaagaagtgcttccgcgccgggatgaagaaggaggccgtccagaacgagcgggaccgcatctccacccggcgcgcggcctacgaggacagctccctgcccagcatcaacgccctcctgcaggccgaggtgctgtcccggcagatcaccagccccgtgtccggcatcaacggggacatccgcgccaagaagatcgcgagcatcgccgacgtctgcgagtccatgaaggagcagctcctggtgctggtggagtgggccaagtacatcccggccttctgcgagctccccctggacgaccaggtcgccctgctccgggcgcacgccggcgagcacctcctgctgggggccaccaagcgcagcatggtgttcaaggacgtgctgctgctcggcaacgactacatcgtcccccggcactgccccgagctggccgagatgagccgcgtgtccatccggatcctggacgagctcgtgctgccgttccaggagctgcagatcgacgacaacgagtacgcctacctcaaggcgatcatcttcttcgaccccgacgccaagggcctgagcgaccccgggaagatcaagcgcctgcgcgcccaggtccaggtgtccctcgaggactacatcaacgaccggcagtacgacagccgcggccggttcggggagctgctgctcctgctgcccacgctccagtccatcacctggcagatgatcgagcagatccagttcatcaagctgttcggcatggccaagatcgacaacctgctccaggagatgctgctgggcgggagcccgtccgacgcgccccacgcccaccaccccctccacccccacctgatgcaggagcacatgggcaccaacgtgatcgtcgccaacaccatgccgacgcacctgagcaacgggcagatgtgcgagtggccccgcccccggggccaggccgccacccccgagaccccgcagccctccccgcccgggggcagcggctccgagccctacaagctgctccccggggcggtggccaccatcgtgaagcccctgagcgccatcccccagccgacgatcaccaagcaggaggtcatctgaggactagtccctgttcccagagcccacttttttttctttttttgaaataaaatagcctgtctttcagatctaaaaaaaaaaaaaaaaaaaaaaaaaaaaaaaaaaaaaaaaaaaaaaaaaaaaaaaaaaaaaaaaaaaaaaaaaaaaaaaaaaaaaaaaaaaaaaaaaaaa

SEQ ID NO: 5202 - RNA, 1562 nt, synthetic construct
  misc_feature 1..1562: note = mRNA a-1 (A100) (opt1) from Homo sapiens__NP_000448.3__HNF4A(39-474)(S142A_S143A_S313A_K458R )
  source 1..1562: mol_type = other RNA
aggagagtcccgcagtcggcgtccagcggctctgcttgttcgtgtgtgtgtcgttgcaggccttattcaagcttaccatggacaccagcccgtccgaggggaccaacctgaacgcccccaacagcctgggcgtgtccgccctctgcgccatctgcggggaccgggcgacgggcaagcactacggggccagctcctgcgacggctgcaagggcttcttccgccggagcgtccgcaagaaccacatgtactcctgccggttcagccgccagtgcgtggtggacaaggacaagcggaaccagtgccgctactgccggctgaagaagtgcttccgcgccgggatgaagaaggaggccgtccagaacgagcgggaccgcatctccacccggcgcgcggcctacgaggacagctccctgcccagcatcaacgccctcctgcaggccgaggtgctgtcccggcagatcaccagccccgtgtccggcatcaacggggacatccgcgccaagaagatcgcgagcatcgccgacgtctgcgagtccatgaaggagcagctcctggtgctggtggagtgggccaagtacatcccggccttctgcgagctccccctggacgaccaggtcgccctgctccgggcgcacgccggcgagcacctcctgctgggggccaccaagcgcagcatggtgttcaaggacgtgctgctgctcggcaacgactacatcgtcccccggcactgccccgagctggccgagatgagccgcgtgtccatccggatcctggacgagctcgtgctgccgttccaggagctgcagatcgacgacaacgagtacgcctacctcaaggcgatcatcttcttcgaccccgacgccaagggcctgagcgaccccgggaagatcaagcgcctgcgcgcccaggtccaggtgtccctcgaggactacatcaacgaccggcagtacgacagccgcggccggttcggggagctgctgctcctgctgcccacgctccagtccatcacctggcagatgatcgagcagatccagttcatcaagctgttcggcatggccaagatcgacaacctgctccaggagatgctgctgggcgggagcccgtccgacgcgccccacgcccaccaccccctccacccccacctgatgcaggagcacatgggcaccaacgtgatcgtcgccaacaccatgccgacgcacctgagcaacgggcagatgtgcgagtggccccgcccccggggccaggccgccacccccgagaccccgcagccctccccgcccgggggcagcggctccgagccctacaagctgctccccggggcggtggccaccatcgtgcgccccctgagcgccatcccccagccgacgatcaccaagcaggaggtcatctgaggactagtccctgttcccagagcccacttttttttctttttttgaaataaaatagcctgtctttcagatctaaaaaaaaaaaaaaaaaaaaaaaaaaaaaaaaaaaaaaaaaaaaaaaaaaaaaaaaaaaaaaaaaaaaaaaaaaaaaaaaaaaaaaaaaaaaaaaaaaaa

SEQ ID NO: 5203 - RNA, 1562 nt, synthetic construct
  misc_feature 1..1562: note = mRNA a-1 (A100) (opt1) from Homo sapiens__NP_000448.3__HNF4A(39-474)(S142A_S143A_S167A_S313A _S378A_T429A_T432A_S436A_K458R)
  source 1..1562: mol_type = other RNA
aggagagtcccgcagtcggcgtccagcggctctgcttgttcgtgtgtgtgtcgttgcaggccttattcaagcttaccatggacaccagcccgtccgaggggaccaacctgaacgcccccaacagcctgggcgtgtccgccctctgcgccatctgcggggaccgggcgacgggcaagcactacggggccagctcctgcgacggctgcaagggcttcttccgccggagcgtccgcaagaaccacatgtactcctgccggttcagccgccagtgcgtggtggacaaggacaagcggaaccagtgccgctactgccggctgaagaagtgcttccgcgccgggatgaagaaggaggccgtccagaacgagcgggaccgcatctccacccggcgcgcggcctacgaggacagctccctgcccagcatcaacgccctcctgcaggccgaggtgctgtcccggcagatcaccgcccccgtgagcggcatcaacggggacatccgcgcgaagaagatcgcctccatcgccgacgtctgcgagagcatgaaggagcagctcctggtgctggtggagtgggccaagtacatcccggccttctgcgagctccccctggacgaccaggtcgcgctgctccgggcccacgccggcgagcacctcctgctgggggccaccaagcgctccatggtgttcaaggacgtgctgctgctcggcaacgactacatcgtcccccggcactgccccgagctggccgagatgagccgcgtgagcatccggatcctggacgagctcgtgctgccgttccaggagctgcagatcgacgacaacgagtacgcgtacctcaaggccatcatcttcttcgaccccgacgccaagggcctgtccgaccccgggaagatcaagcgcctgcgcgcccaggtccaggtgagcctcgaggactacatcaacgaccggcagtacgactcccgcggccggttcggggagctgctgctcctgctgcccacgctccagagcatcacctggcagatgatcgagcagatccagttcatcaagctgttcggcatggccaagatcgacaacctgctccaggagatgctgctgggcggggcgccgtccgacgcgccccacgcccaccaccccctccacccccacctgatgcaggagcacatgggcaccaacgtgatcgtcgccaacaccatgccgacgcacctgagcaacgggcagatgtgcgagtggccccgcccccggggccaggccgccgcccccgaggccccgcagcccgccccgcccgggggctccggcagcgagccctacaagctgctccccggggcggtggccaccatcgtgcgccccctgtccgccatcccccagccgaccatcaccaagcaggaggtcatctgaggactagtccctgttcccagagcccacttttttttctttttttgaaataaaatagcctgtctttcagatctaaaaaaaaaaaaaaaaaaaaaaaaaaaaaaaaaaaaaaaaaaaaaaaaaaaaaaaaaaaaaaaaaaaaaaaaaaaaaaaaaaaaaaaaaaaaaaaaaaaa

SEQ ID NO: 5204 - RNA, 1562 nt, synthetic construct
  misc_feature 1..1562: note = mRNA a-1 (A100) (opt1) from Homo sapiens__NP_000448.3__HNF4A(39-474)(S142A_S143A_S148A_S167A _S313A_S378A_T429A_T432A_S436A_K458R)
  source 1..1562: mol_type = other RNA
aggagagtcccgcagtcggcgtccagcggctctgcttgttcgtgtgtgtgtcgttgcaggccttattcaagcttaccatggacaccagcccgtccgaggggaccaacctgaacgcccccaacagcctgggcgtgtccgccctctgcgccatctgcggggaccgggcgacgggcaagcactacggggccagctcctgcgacggctgcaagggcttcttccgccggagcgtccgcaagaaccacatgtactcctgccggttcagccgccagtgcgtggtggacaaggacaagcggaaccagtgccgctactgccggctgaagaagtgcttccgcgccgggatgaagaaggaggccgtccagaacgagcgggaccgcatctccacccggcgcgcggcctacgaggacagcgccctgccctccatcaacgccctcctgcaggccgaggtgctgagccggcagatcaccgcgcccgtgtccggcatcaacggggacatccgcgccaagaagatcgccagcatcgccgacgtctgcgagtccatgaaggagcagctcctggtgctggtggagtgggccaagtacatcccggcgttctgcgagctccccctggacgaccaggtcgccctgctccgggcccacgccggcgagcacctcctgctgggggccaccaagcgcagcatggtgttcaaggacgtgctgctgctcggcaacgactacatcgtcccccggcactgccccgagctggcggagatgtcccgcgtgagcatccggatcctggacgagctcgtgctgccgttccaggagctgcagatcgacgacaacgagtacgcctacctcaaggccatcatcttcttcgaccccgacgccaagggcctgagcgaccccgggaagatcaagcgcctgcgcgcccaggtccaggtgtccctcgaggactacatcaacgaccggcagtacgacagccgcggccggttcggggagctgctgctcctgctgcccacgctccagtccatcacctggcagatgatcgagcagatccagttcatcaagctgttcggcatggcgaagatcgacaacctgctccaggagatgctgctgggcggggccccgagcgacgcgccccacgcccaccaccccctccacccccacctgatgcaggagcacatgggcaccaacgtgatcgtcgccaacaccatgccgacgcacctgtccaacgggcagatgtgcgagtggccccgcccccggggccaggccgccgcccccgaggccccgcagcccgcgccgcccgggggcagcggctccgagccctacaagctgctccccggggccgtggccaccatcgtgcgccccctgagcgccatcccccagccgaccatcaccaagcaggaggtcatctgaggactagtccctgttcccagagcccacttttttttctttttttgaaataaaatagcctgtctttcagatctaaaaaaaaaaaaaaaaaaaaaaaaaaaaaaaaaaaaaaaaaaaaaaaaaaaaaaaaaaaaaaaaaaaaaaaaaaaaaaaaaaaaaaaaaaaaaaaaaaaa

SEQ ID NO: 5205 - RNA, 1562 nt, synthetic construct
  misc_feature 1..1562: note = mRNA a-1 (A100) (opt1) from Homo sapiens__NP_000448.3__HNF4A(39-474)(K106R_K108R_K126R_K127R _S142A_S143A_S148A_S167A_S313A_S378A_T429A_T432A_S436A_K458 R)
  source 1..1562: mol_type = other RNA
aggagagtcccgcagtcggcgtccagcggctctgcttgttcgtgtgtgtgtcgttgcaggccttattcaagcttaccatggacaccagcccgtccgaggggaccaacctgaacgcccccaacagcctgggcgtgtccgccctctgcgccatctgcggggaccgggcgacgggcaagcactacggggccagctcctgcgacggctgcaagggcttcttccgccggagcgtccgcaagaaccacatgtactcctgccggttcagccgccagtgcgtggtggaccgggaccgccggaaccagtgccgctactgccggctgaagaagtgcttccgcgccgggatgcggcgcgaggccgtccagaacgagcgggaccgcatctccacccggcgcgcggcctacgaggacagcgccctgccctccatcaacgccctcctgcaggccgaggtgctgagccggcagatcaccgcgcccgtgtccggcatcaacggggacatccgcgccaagaagatcgccagcatcgccgacgtctgcgagtccatgaaggagcagctcctggtgctggtggagtgggccaagtacatcccggcgttctgcgagctccccctggacgaccaggtcgccctgctccgggcccacgccggcgagcacctcctgctgggggccaccaagcgcagcatggtgttcaaggacgtgctgctgctcggcaacgactacatcgtcccccgccactgccccgagctggcggagatgtcccgggtgagcatccgcatcctggacgagctcgtgctgccgttccaggagctgcagatcgacgacaacgagtacgcctacctcaaggccatcatcttcttcgaccccgacgccaagggcctgagcgaccccgggaagatcaagcggctgcgcgcccaggtccaggtgtccctcgaggactacatcaacgaccggcagtacgacagccgcggccggttcggggagctgctgctcctgctgcccacgctccagtccatcacctggcagatgatcgagcagatccagttcatcaagctgttcggcatggcgaagatcgacaacctgctccaggagatgctgctgggcggggccccgagcgacgcgccccacgcccaccaccccctccacccccacctgatgcaggagcacatgggcaccaacgtgatcgtcgccaacaccatgccgacgcacctgtccaacgggcagatgtgcgagtggccccgcccccggggccaggccgccgcccccgaggccccgcagcccgcgccgcccgggggcagcggctccgagccctacaagctgctccccggggccgtggccaccatcgtgcgccccctgagcgccatcccccagccgaccatcaccaagcaggaggtcatctgaggactagtccctgttcccagagcccacttttttttctttttttgaaataaaatagcctgtctttcagatctaaaaaaaaaaaaaaaaaaaaaaaaaaaaaaaaaaaaaaaaaaaaaaaaaaaaaaaaaaaaaaaaaaaaaaaaaaaaaaaaaaaaaaaaaaaaaaaaaaaa

SEQ ID NO: 5206 - RNA, 1562 nt, synthetic construct
  misc_feature 1..1562: note = mRNA a-1 (A100) (opt1) from Homo sapiens__NP_000448.3__HNF4A(39-474)(S142A_S143A_S148A_T166A _S167A_S313A_S378A_T429A_T432A_S436A_K458R)
  source 1..1562: mol_type = other RNA
aggagagtcccgcagtcggcgtccagcggctctgcttgttcgtgtgtgtgtcgttgcaggccttattcaagcttaccatggacaccagcccgtccgaggggaccaacctgaacgcccccaacagcctgggcgtgtccgccctctgcgccatctgcggggaccgggcgacgggcaagcactacggggccagctcctgcgacggctgcaagggcttcttccgccggagcgtccgcaagaaccacatgtactcctgccggttcagccgccagtgcgtggtggacaaggacaagcggaaccagtgccgctactgccggctgaagaagtgcttccgcgccgggatgaagaaggaggccgtccagaacgagcgggaccgcatctccacccggcgcgcggcctacgaggacagcgccctgccctccatcaacgccctcctgcaggccgaggtgctgagccggcagatcgcggcccccgtgtccggcatcaacggggacatccgcgccaagaagatcgccagcatcgccgacgtctgcgagtccatgaaggagcagctcctggtgctggtggagtgggcgaagtacatcccggccttctgcgagctccccctggacgaccaggtcgccctgctccgggcccacgccggcgagcacctcctgctgggggcgaccaagcgcagcatggtgttcaaggacgtgctgctgctcggcaacgactacatcgtcccccggcactgccccgagctggccgagatgtcccgcgtgagcatccggatcctggacgagctcgtgctgccgttccaggagctgcagatcgacgacaacgagtacgcctacctcaaggccatcatcttcttcgaccccgacgccaagggcctgagcgaccccgggaagatcaagcgcctgcgcgcgcaggtccaggtgtccctcgaggactacatcaacgaccggcagtacgacagccgcggccggttcggggagctgctgctcctgctgcccaccctccagtccatcacgtggcagatgatcgagcagatccagttcatcaagctgttcggcatggccaagatcgacaacctgctccaggagatgctgctgggcggggccccgagcgacgcgccccacgcccaccaccccctccacccccacctgatgcaggagcacatgggcaccaacgtgatcgtcgccaacaccatgccgacccacctgtccaacgggcagatgtgcgagtggccccgcccccggggccaggccgccgcccccgaggcgccgcagcccgccccgcccgggggcagcggctccgagccctacaagctgctccccggggccgtggccacgatcgtgcgccccctgagcgccatcccccagccgaccatcaccaagcaggaggtcatctgaggactagtccctgttcccagagcccacttttttttctttttttgaaataaaatagcctgtctttcagatctaaaaaaaaaaaaaaaaaaaaaaaaaaaaaaaaaaaaaaaaaaaaaaaaaaaaaaaaaaaaaaaaaaaaaaaaaaaaaaaaaaaaaaaaaaaaaaaaaaaa

SEQ ID NO: 5207 - RNA, 1562 nt, synthetic construct
  misc_feature 1..1562: note = mRNA a-1 (A100) (opt1) from Homo sapiens__NP_000448.3__HNF4A(39-474)(S87A_S142A_S143A_S148A_ T166A_S167A_S313A_S378A_T429A_T432A_S436A_K458R)
  source 1..1562: mol_type = other RNA
aggagagtcccgcagtcggcgtccagcggctctgcttgttcgtgtgtgtgtcgttgcaggccttattcaagcttaccatggacaccagcccgtccgaggggaccaacctgaacgcccccaacagcctgggcgtgtccgccctctgcgccatctgcggggaccgggcgacgggcaagcactacggggccagctcctgcgacggctgcaagggcttcttccgccgggccgtccgcaagaaccacatgtacagctgccggttctcccgccagtgcgtggtggacaaggacaagcggaaccagtgccgctactgccggctgaagaagtgcttccgcgccgggatgaagaaggaggcggtccagaacgagcgggaccgcatcagcacccggcgcgccgcctacgaggactccgccctgcccagcatcaacgccctcctgcaggcggaggtgctgtcccggcagatcgccgcccccgtgagcggcatcaacggggacatccgcgccaagaagatcgcctccatcgcggacgtctgcgagagcatgaaggagcagctcctggtgctggtggagtgggccaagtacatcccggccttctgcgagctccccctggacgaccaggtcgccctgctccgggcccacgcgggcgagcacctcctgctgggggccaccaagcgctccatggtgttcaaggacgtgctgctgctcggcaacgactacatcgtcccccggcactgccccgagctggccgagatgagccgcgtgtccatccggatcctggacgagctcgtgctgccgttccaggagctgcagatcgacgacaacgagtacgcctacctcaaggccatcatcttcttcgaccccgacgcgaagggcctgagcgaccccgggaagatcaagcgcctgcgcgcccaggtccaggtgagcctcgaggactacatcaacgaccggcagtacgactcccgcggccggttcggggagctgctgctcctgctgcccaccctccagagcatcacgtggcagatgatcgagcagatccagttcatcaagctgttcggcatggccaagatcgacaacctgctccaggagatgctgctgggcggggccccgtccgacgcgccccacgcccaccaccccctccacccccacctgatgcaggagcacatgggcaccaacgtgatcgtcgccaacaccatgccgacccacctgagcaacgggcagatgtgcgagtggccccgcccccggggccaggccgccgcgcccgaggccccgcagcccgccccgcccgggggctccggcagcgagccctacaagctgctccccggggccgtggccacgatcgtgcgccccctgtccgcgatcccccagccgaccatcaccaagcaggaggtcatctgaggactagtccctgttcccagagcccacttttttttctttttttgaaataaaatagcctgtctttcagatctaaaaaaaaaaaaaaaaaaaaaaaaaaaaaaaaaaaaaaaaaaaaaaaaaaaaaaaaaaaaaaaaaaaaaaaaaaaaaaaaaaaaaaaaaaaaaaaaaaaa

SEQ ID NO: 5208 - RNA, 1562 nt, synthetic construct
  misc_feature 1..1562: note = mRNA a-1 (A100) (opt1) from Homo sapiens__NP_000448.3__HNF4A(39-474)(S87A_K106R_K108R_K126R_ K127R_S142A_S143A_S148A_T166A_S167A_S313A_S378A_T429A_T432A _S436A_K458R)
  source 1..1562: mol_type = other RNA
aggagagtcccgcagtcggcgtccagcggctctgcttgttcgtgtgtgtgtcgttgcaggccttattcaagcttaccatggacaccagcccgtccgaggggaccaacctgaacgcccccaacagcctgggcgtgtccgccctctgcgccatctgcggggaccgggcgacgggcaagcactacggggccagctcctgcgacggctgcaagggcttcttccgccgggccgtccgcaagaaccacatgtacagctgccggttctcccgccagtgcgtggtggaccgggaccgccggaaccagtgccgctactgccggctgaagaagtgcttccgcgccgggatgcggcgcgaggcggtccagaacgagcgggaccgcatcagcacccggcgcgccgcctacgaggactccgccctgcccagcatcaacgccctcctgcaggcggaggtgctgtcccggcagatcgccgcccccgtgagcggcatcaacggggacatccgcgccaagaagatcgcctccatcgcggacgtctgcgagagcatgaaggagcagctcctggtgctggtggagtgggccaagtacatcccggccttctgcgagctccccctggacgaccaggtcgccctgctccgggcccacgcgggcgagcacctcctgctgggggccaccaagcgctccatggtgttcaaggacgtgctgctgctcggcaacgactacatcgtcccccgccactgccccgagctggccgagatgagccgggtgtccatccgcatcctggacgagctcgtgctgccgttccaggagctgcagatcgacgacaacgagtacgcctacctcaaggccatcatcttcttcgaccccgacgcgaagggcctgagcgaccccgggaagatcaagcggctgcgcgcccaggtccaggtgagcctcgaggactacatcaacgaccggcagtacgactcccgcggccggttcggggagctgctgctcctgctgcccaccctccagagcatcacgtggcagatgatcgagcagatccagttcatcaagctgttcggcatggccaagatcgacaacctgctccaggagatgctgctgggcggggccccgtccgacgcgccccacgcccaccaccccctccacccccacctgatgcaggagcacatgggcaccaacgtgatcgtcgccaacaccatgccgacccacctgagcaacgggcagatgtgcgagtggccccgcccccggggccaggccgccgcgcccgaggccccgcagcccgccccgcccgggggctccggcagcgagccctacaagctgctccccggggccgtggccacgatcgtgcgccccctgtccgcgatcccccagccgaccatcaccaagcaggaggtcatctgaggactagtccctgttcccagagcccacttttttttctttttttgaaataaaatagcctgtctttcagatctaaaaaaaaaaaaaaaaaaaaaaaaaaaaaaaaaaaaaaaaaaaaaaaaaaaaaaaaaaaaaaaaaaaaaaaaaaaaaaaaaaaaaaaaaaaaaaaaaaaa

SEQ ID NO: 5209 - RNA, 1562 nt, synthetic construct
  misc_feature 1..1562: note = mRNA a-1 (A100) (opt1) from Homo sapiens__NP_000448.3__HNF4A(39-474)(S87A_K106R_K108R_K126R_ K127R)
  source 1..1562: mol_type = other RNA
aggagagtcccgcagtcggcgtccagcggctctgcttgttcgtgtgtgtgtcgttgcaggccttattcaagcttaccatggacaccagcccgtccgaggggaccaacctgaacgcccccaacagcctgggcgtgtccgccctctgcgccatctgcggggaccgggcgacgggcaagcactacggggccagctcctgcgacggctgcaagggcttcttccgccgggccgtccgcaagaaccacatgtacagctgccggttctcccgccagtgcgtggtggaccgggaccgccggaaccagtgccgctactgccggctgaagaagtgcttccgcgccgggatgcggcgcgaggcggtccagaacgagcgggaccgcatcagcacccggcgctccagctacgaggactccagcctgccctccatcaacgccctcctgcaggccgaggtgctgagccggcagatcacctcccccgtgagcggcatcaacggggacatccgcgccaagaagatcgcctccatcgcggacgtctgcgagagcatgaaggagcagctcctggtgctggtggagtgggccaagtacatcccggccttctgcgagctccccctggacgaccaggtcgccctgctccgggcccacgcgggcgagcacctcctgctgggggccaccaagcgcagcatggtgttcaaggacgtgctgctgctcggcaacgactacatcgtcccccgccactgccccgagctggccgagatgtcccgggtgagcatccgcatcctggacgagctcgtgctgccgttccaggagctgcagatcgacgacaacgagtacgcctacctcaaggccatcatcttcttcgaccccgacgcgaagggcctgtccgaccccgggaagatcaagcggctgcgcagccaggtccaggtgtccctcgaggactacatcaacgaccggcagtacgacagccgcggccggttcggggagctgctgctcctgctgcccacgctccagtccatcacctggcagatgatcgagcagatccagttcatcaagctgttcggcatggccaagatcgacaacctgctccaggagatgctgctgggcgggagcccgtccgacgcgccccacgcccaccaccccctccacccccacctgatgcaggagcacatgggcaccaacgtgatcgtcgccaacaccatgccgacgcacctgagcaacgggcagatgtgcgagtggccccgcccccggggccaggccgccacccccgagaccccgcagccctccccgcccgggggcagcggctccgagccctacaagctgctccccggggccgtggccaccatcgtgaagcccctgagcgcgatcccccagccgacgatcaccaagcaggaggtcatctgaggactagtccctgttcccagagcccacttttttttctttttttgaaataaaatagcctgtctttcagatctaaaaaaaaaaaaaaaaaaaaaaaaaaaaaaaaaaaaaaaaaaaaaaaaaaaaaaaaaaaaaaaaaaaaaaaaaaaaaaaaaaaaaaaaaaaaaaaaaaaa

SEQ ID NO: 5210 - RNA, 1562 nt, synthetic construct
  misc_feature 1..1562: note = mRNA a-1 (A100) (opt1) from Homo sapiens__NP_000448.3__HNF4A(39-474)(S87A_K106R_K108R_K126R_ K127R_S142A_S143A_S148A_T166A_S167A_S313A_S378A_T429A_T432A _S436A_K458R_S461A)
  source 1..1562: mol_type = other RNA
aggagagtcccgcagtcggcgtccagcggctctgcttgttcgtgtgtgtgtcgttgcaggccttattcaagcttaccatggacaccagcccgtccgaggggaccaacctgaacgcccccaacagcctgggcgtgtccgccctctgcgccatctgcggggaccgggcgacgggcaagcactacggggccagctcctgcgacggctgcaagggcttcttccgccgggccgtccgcaagaaccacatgtacagctgccggttctcccgccagtgcgtggtggaccgggaccgccggaaccagtgccgctactgccggctgaagaagtgcttccgcgccgggatgcggcgcgaggcggtccagaacgagcgggaccgcatcagcacccggcgcgccgcctacgaggactccgccctgcccagcatcaacgccctcctgcaggcggaggtgctgtcccggcagatcgccgcccccgtgagcggcatcaacggggacatccgcgccaagaagatcgcctccatcgcggacgtctgcgagagcatgaaggagcagctcctggtgctggtggagtgggccaagtacatcccggccttctgcgagctccccctggacgaccaggtcgccctgctccgggcccacgcgggcgagcacctcctgctgggggccaccaagcgctccatggtgttcaaggacgtgctgctgctcggcaacgactacatcgtcccccgccactgccccgagctggccgagatgagccgggtgtccatccgcatcctggacgagctcgtgctgccgttccaggagctgcagatcgacgacaacgagtacgcctacctcaaggccatcatcttcttcgaccccgacgcgaagggcctgagcgaccccgggaagatcaagcggctgcgcgcccaggtccaggtgagcctcgaggactacatcaacgaccggcagtacgactcccgcggccggttcggggagctgctgctcctgctgcccaccctccagagcatcacgtggcagatgatcgagcagatccagttcatcaagctgttcggcatggccaagatcgacaacctgctccaggagatgctgctgggcggggccccgtccgacgcgccccacgcccaccaccccctccacccccacctgatgcaggagcacatgggcaccaacgtgatcgtcgccaacaccatgccgacccacctgagcaacgggcagatgtgcgagtggccccgcccccggggccaggccgccgcgcccgaggccccgcagcccgccccgcccgggggctccggcagcgagccctacaagctgctccccggggccgtggccacgatcgtgcgccccctggcggccatcccccagccgaccatcaccaagcaggaggtcatctgaggactagtccctgttcccagagcccacttttttttctttttttgaaataaaatagcctgtctttcagatctaaaaaaaaaaaaaaaaaaaaaaaaaaaaaaaaaaaaaaaaaaaaaaaaaaaaaaaaaaaaaaaaaaaaaaaaaaaaaaaaaaaaaaaaaaaaaaaaaaaa

SEQ ID NO: 5211 - RNA, 1562 nt, synthetic construct
  misc_feature 1..1562: note = mRNA a-1 (A100) (opt1) from Homo sapiens__NP_000448.3__HNF4A(39-474)(S87A_K106R_K108R_K126R_ K127R_S142A_S143A_S148A_T166A_S167A_S313A_S378A_T429A_T432A _S436A_K458R_S461E)
  source 1..1562: mol_type = other RNA
aggagagtcccgcagtcggcgtccagcggctctgcttgttcgtgtgtgtgtcgttgcaggccttattcaagcttaccatggacaccagcccgtccgaggggaccaacctgaacgcccccaacagcctgggcgtgtccgccctctgcgccatctgcggggaccgggcgacgggcaagcactacggggccagctcctgcgacggctgcaagggcttcttccgccgggccgtccgcaagaaccacatgtacagctgccggttctcccgccagtgcgtggtggaccgggaccgccggaaccagtgccgctactgccggctgaagaagtgcttccgcgccgggatgcggcgcgaggcggtccagaacgagcgggaccgcatcagcacccggcgcgccgcctacgaggactccgccctgcccagcatcaacgccctcctgcaggcggaggtgctgtcccggcagatcgccgcccccgtgagcggcatcaacggggacatccgcgccaagaagatcgcctccatcgcggacgtctgcgagagcatgaaggagcagctcctggtgctggtggagtgggccaagtacatcccggccttctgcgagctccccctggacgaccaggtcgccctgctccgggcccacgcgggcgagcacctcctgctgggggccaccaagcgctccatggtgttcaaggacgtgctgctgctcggcaacgactacatcgtcccccgccactgccccgagctggccgagatgagccgggtgtccatccgcatcctggacgagctcgtgctgccgttccaggagctgcagatcgacgacaacgagtacgcctacctcaaggccatcatcttcttcgaccccgacgcgaagggcctgagcgaccccgggaagatcaagcggctgcgcgcccaggtccaggtgagcctcgaggactacatcaacgaccggcagtacgactcccgcggccggttcggggagctgctgctcctgctgcccaccctccagagcatcacgtggcagatgatcgagcagatccagttcatcaagctgttcggcatggccaagatcgacaacctgctccaggagatgctgctgggcggggccccgtccgacgcgccccacgcccaccaccccctccacccccacctgatgcaggagcacatgggcaccaacgtgatcgtcgccaacaccatgccgacccacctgagcaacgggcagatgtgcgagtggccccgcccccggggccaggccgccgcgcccgaggccccgcagcccgccccgcccgggggctccggcagcgagccctacaagctgctccccggggccgtggccacgatcgtgcgccccctggaggcgatcccccagccgaccatcaccaagcaggaggtcatctgaggactagtccctgttcccagagcccacttttttttctttttttgaaataaaatagcctgtctttcagatctaaaaaaaaaaaaaaaaaaaaaaaaaaaaaaaaaaaaaaaaaaaaaaaaaaaaaaaaaaaaaaaaaaaaaaaaaaaaaaaaaaaaaaaaaaaaaaaaaaaa

SEQ ID NO: 5212 - RNA, 1562 nt, synthetic construct
  misc_feature 1..1562: note = mRNA a-1 (A100) (opt1) from Homo sapiens__NP_000448.3__HNF4A(39-474)(S87A_K106R_K108R_K126R_ K127R_S142A_S143A_S148E_T166A_S167E_S313A_S378E_T429E_T432E _S436E_K458R_S461E)
  source 1..1562: mol_type = other RNA
aggagagtcccgcagtcggcgtccagcggctctgcttgttcgtgtgtgtgtcgttgcaggccttattcaagcttaccatggacaccagcccgtccgaggggaccaacctgaacgcccccaacagcctgggcgtgtccgccctctgcgccatctgcggggaccgggcgacgggcaagcactacggggccagctcctgcgacggctgcaagggcttcttccgccgggccgtccgcaagaaccacatgtacagctgccggttctcccgccagtgcgtggtggaccgggaccgccggaaccagtgccgctactgccggctgaagaagtgcttccgcgccgggatgcggcgcgaggcggtccagaacgagcgggaccgcatcagcacccggcgcgccgcctacgaggactccgagctgcccagcatcaacgccctcctgcaggccgaggtgctgtcccggcagatcgcggagcccgtgagcggcatcaacggggacatccgcgccaagaagatcgcctccatcgccgacgtctgcgagagcatgaaggagcagctcctggtgctggtggagtgggccaagtacatcccggcgttctgcgagctccccctggacgaccaggtcgccctgctccgggcccacgccggcgagcacctcctgctgggggccaccaagcgctccatggtgttcaaggacgtgctgctgctcggcaacgactacatcgtcccccgccactgccccgagctggcggagatgagccgggtgtccatccgcatcctggacgagctcgtgctgccgttccaggagctgcagatcgacgacaacgagtacgcctacctcaaggccatcatcttcttcgaccccgacgccaagggcctgagcgaccccgggaagatcaagcggctgcgcgcccaggtccaggtgagcctcgaggactacatcaacgaccggcagtacgactcccgcggccggttcggggagctgctgctcctgctgcccaccctccagagcatcacgtggcagatgatcgagcagatccagttcatcaagctgttcggcatggcgaagatcgacaacctgctccaggagatgctgctgggcggggagccgtccgacgcgccccacgcccaccaccccctccacccccacctgatgcaggagcacatgggcaccaacgtgatcgtcgccaacaccatgccgacccacctgagcaacgggcagatgtgcgagtggccccgcccccggggccaggccgccgagcccgaggagccgcagcccgagccgcccgggggctccggcagcgagccctacaagctgctccccggggccgtggccacgatcgtgcgccccctggaggccatcccccagccgaccatcaccaagcaggaggtcatctgaggactagtccctgttcccagagcccacttttttttctttttttgaaataaaatagcctgtctttcagatctaaaaaaaaaaaaaaaaaaaaaaaaaaaaaaaaaaaaaaaaaaaaaaaaaaaaaaaaaaaaaaaaaaaaaaaaaaaaaaaaaaaaaaaaaaaaaaaaaaaa

SEQ ID NO: 5213 - RNA, 1562 nt, synthetic construct
  misc_feature 1..1562: note = mRNA a-1 (A100) (opt1) from Homo sapiens__NP_000448.3__HNF4A(39-474)(S87A_K106R_K108R_K126R_ K127R_S142A_S143A_S148A_T166A_S167A_K179R_K180R_S313A_S378A _T429A_T432A_S436A_K458R_S461E)
  source 1..1562: mol_type = other RNA
aggagagtcccgcagtcggcgtccagcggctctgcttgttcgtgtgtgtgtcgttgcaggccttattcaagcttaccatggacaccagcccgtccgaggggaccaacctgaacgcccccaacagcctgggcgtgtccgccctctgcgccatctgcggggaccgggcgacgggcaagcactacggggccagctcctgcgacggctgcaagggcttcttccgccgggccgtccgcaagaaccacatgtacagctgccggttctcccgccagtgcgtggtggaccgggaccgccggaaccagtgccgctactgccggctgaagaagtgcttccgcgccgggatgcggcgcgaggcggtccagaacgagcgggaccgcatcagcacccggcgcgccgcctacgaggactccgccctgcccagcatcaacgccctcctgcaggcggaggtgctgtcccggcagatcgccgcccccgtgagcggcatcaacggggacatccgcgcccggcgcatcgcctccatcgcggacgtctgcgagagcatgaaggagcagctcctggtgctggtggagtgggccaagtacatcccggccttctgcgagctccccctggacgaccaggtcgccctgctccgcgcccacgcgggcgagcacctcctgctgggggccaccaagcggtccatggtgttcaaggacgtgctgctgctcggcaacgactacatcgtcccccgccactgccccgagctggccgagatgagccgggtgtccatccgcatcctggacgagctcgtgctgccgttccaggagctgcagatcgacgacaacgagtacgcctacctcaaggccatcatcttcttcgaccccgacgcgaagggcctgagcgaccccgggaagatcaagcggctgcgcgcccaggtccaggtgagcctcgaggactacatcaacgaccggcagtacgactcccgcggccggttcggggagctgctgctcctgctgcccaccctccagagcatcacgtggcagatgatcgagcagatccagttcatcaagctgttcggcatggccaagatcgacaacctgctccaggagatgctgctgggcggggccccgtccgacgcgccccacgcccaccaccccctccacccccacctgatgcaggagcacatgggcaccaacgtgatcgtcgccaacaccatgccgacccacctgagcaacgggcagatgtgcgagtggccccgcccccggggccaggccgccgcgcccgaggccccgcagcccgccccgcccgggggctccggcagcgagccctacaagctgctccccggggccgtggccacgatcgtgcgccccctggaggcgatcccccagccgaccatcaccaagcaggaggtcatctgaggactagtccctgttcccagagcccacttttttttctttttttgaaataaaatagcctgtctttcagatctaaaaaaaaaaaaaaaaaaaaaaaaaaaaaaaaaaaaaaaaaaaaaaaaaaaaaaaaaaaaaaaaaaaaaaaaaaaaaaaaaaaaaaaaaaaaaaaaaaaa

SEQ ID NO: 5214 - RNA, 1562 nt, synthetic construct
  misc_feature 1..1562: note = mRNA a-1 (A100) (opt1) from Homo sapiens__NP_000448.3__HNF4A(39-474)(S87A_K106R_K108R_K126R_ K127R_S142A_S143A_S148A_T166A_S167A_K300R_K307R_K309R_S313A _S378A_T429A_T432A_S436A_K458R_S461E)
  source 1..1562: mol_type = other RNA
aggagagtcccgcagtcggcgtccagcggctctgcttgttcgtgtgtgtgtcgttgcaggccttattcaagcttaccatggacaccagcccgtccgaggggaccaacctgaacgcccccaacagcctgggcgtgtccgccctctgcgccatctgcggggaccgggcgacgggcaagcactacggggccagctcctgcgacggctgcaagggcttcttccgccgggccgtccgcaagaaccacatgtacagctgccggttctcccgccagtgcgtggtggaccgggaccgccggaaccagtgccgctactgccggctgaagaagtgcttccgcgccgggatgcggcgcgaggcggtccagaacgagcgggaccgcatcagcacccggcgcgccgcctacgaggactccgccctgcccagcatcaacgccctcctgcaggcggaggtgctgtcccggcagatcgccgcccccgtgagcggcatcaacggggacatccgcgccaagaagatcgcctccatcgcggacgtctgcgagagcatgaaggagcagctcctggtgctggtggagtgggccaagtacatcccggccttctgcgagctccccctggacgaccaggtcgccctgctccgggcccacgcgggcgagcacctcctgctgggggccaccaagcgctccatggtgttcaaggacgtgctgctgctcggcaacgactacatcgtcccccgccactgccccgagctggccgagatgagccgggtgtccatccgcatcctggacgagctcgtgctgccgttccaggagctgcagatcgacgacaacgagtacgcctacctcaaggccatcatcttcttcgaccccgacgcgcggggcctgagcgaccccgggcgcatccggcgcctgcgggcccaggtccaggtgagcctcgaggactacatcaacgaccgccagtacgactcccggggccgcttcggggagctgctgctcctgctgcccaccctccagagcatcacgtggcagatgatcgagcagatccagttcatcaagctgttcggcatggccaagatcgacaacctgctccaggagatgctgctgggcggggccccgtccgacgcgccccacgcccaccaccccctccacccccacctgatgcaggagcacatgggcaccaacgtgatcgtcgccaacaccatgccgacccacctgagcaacgggcagatgtgcgagtggccccggccccgcggccaggccgccgcgcccgaggccccgcagcccgccccgcccgggggctccggcagcgagccctacaagctgctccccggggccgtggccacgatcgtgcggcccctggaggcgatcccccagccgaccatcaccaagcaggaggtcatctgaggactagtccctgttcccagagcccacttttttttctttttttgaaataaaatagcctgtctttcagatctaaaaaaaaaaaaaaaaaaaaaaaaaaaaaaaaaaaaaaaaaaaaaaaaaaaaaaaaaaaaaaaaaaaaaaaaaaaaaaaaaaaaaaaaaaaaaaaaaaaa

SEQ ID NO: 5215 - RNA, 1562 nt, synthetic construct
  misc_feature 1..1562: note = mRNA a-1 (A100) (opt1) from Homo sapiens__NP_000448.3__HNF4A(39-474)(S87A_K106R_K108R_K126R_ K127R_S142A_S143A_S148A_T166A_S167A_S313A_S378A_T429A_T432A _S436A_K447R_K458R_S461E_K470R)
  source 1..1562: mol_type = other RNA
aggagagtcccgcagtcggcgtccagcggctctgcttgttcgtgtgtgtgtcgttgcaggccttattcaagcttaccatggacaccagcccgtccgaggggaccaacctgaacgcccccaacagcctgggcgtgtccgccctctgcgccatctgcggggaccgggcgacgggcaagcactacggggccagctcctgcgacggctgcaagggcttcttccgccgggccgtccgcaagaaccacatgtacagctgccggttctcccgccagtgcgtggtggaccgggaccgccggaaccagtgccgctactgccggctgaagaagtgcttccgcgccgggatgcggcgcgaggcggtccagaacgagcgggaccgcatcagcacccggcgcgccgcctacgaggactccgccctgcccagcatcaacgccctcctgcaggcggaggtgctgtcccggcagatcgccgcccccgtgagcggcatcaacggggacatccgcgccaagaagatcgcctccatcgcggacgtctgcgagagcatgaaggagcagctcctggtgctggtggagtgggccaagtacatcccggccttctgcgagctccccctggacgaccaggtcgccctgctccgggcccacgcgggcgagcacctcctgctgggggccaccaagcgctccatggtgttcaaggacgtgctgctgctcggcaacgactacatcgtcccccgccactgccccgagctggccgagatgagccgggtgtccatccgcatcctggacgagctcgtgctgccgttccaggagctgcagatcgacgacaacgagtacgcctacctcaaggccatcatcttcttcgaccccgacgcgaagggcctgagcgaccccgggaagatcaagcggctgcgcgcccaggtccaggtgagcctcgaggactacatcaacgaccggcagtacgactcccgcggccggttcggggagctgctgctcctgctgcccaccctccagagcatcacgtggcagatgatcgagcagatccagttcatcaagctgttcggcatggccaagatcgacaacctgctccaggagatgctgctgggcggggccccgtccgacgcgccccacgcccaccaccccctccacccccacctgatgcaggagcacatgggcaccaacgtgatcgtcgccaacaccatgccgacccacctgagcaacgggcagatgtgcgagtggccccgcccccggggccaggccgccgcgcccgaggccccgcagcccgccccgcccgggggctccggcagcgagccctaccgcctgctccccggggccgtggccacgatcgtgcggcccctggaggcgatcccccagccgaccatcacccgccaggaggtcatctgaggactagtccctgttcccagagcccacttttttttctttttttgaaataaaatagcctgtctttcagatctaaaaaaaaaaaaaaaaaaaaaaaaaaaaaaaaaaaaaaaaaaaaaaaaaaaaaaaaaaaaaaaaaaaaaaaaaaaaaaaaaaaaaaaaaaaaaaaaaaaa

SEQ ID NO: 5216 - RNA, 1562 nt, synthetic construct
  misc_feature 1..1562: note = mRNA a-1 (A100) (opt1) from Homo sapiens__NP_000448.3__HNF4A(39-474)(S87A_K106R_K108R_K126R_ K127R_S142A_S143A_S148A_T166A_S167A_K179R_K180R_K234R_K300R _K307R_K309R_S313A_S378A_T429A_T432A_S436A_K447R_K458R_S461 E_K470R)
  source 1..1562: mol_type = other RNA
aggagagtcccgcagtcggcgtccagcggctctgcttgttcgtgtgtgtgtcgttgcaggccttattcaagcttaccatggacaccagcccgtccgaggggaccaacctgaacgcccccaacagcctgggcgtgtccgccctctgcgccatctgcggggaccgggcgacgggcaagcactacggggccagctcctgcgacggctgcaagggcttcttccgccgggccgtccgcaagaaccacatgtacagctgccggttctcccgccagtgcgtggtggaccgggaccgccggaaccagtgccgctactgccggctgaagaagtgcttccgcgccgggatgcggcgcgaggcggtccagaacgagcgggaccgcatcagcacccggcgcgccgcctacgaggactccgccctgcccagcatcaacgccctcctgcaggcggaggtgctgtcccggcagatcgccgcccccgtgagcggcatcaacggggacatccgcgcccggcgcatcgcctccatcgcggacgtctgcgagagcatgaaggagcagctcctggtgctggtggagtgggccaagtacatcccggccttctgcgagctccccctggacgaccaggtcgccctgctccgcgcccacgcgggcgagcacctcctgctgggggccacccggcgctccatggtgttcaaggacgtgctgctgctcggcaacgactacatcgtcccccggcactgccccgagctggccgagatgagccgcgtgtccatccggatcctggacgagctcgtgctgccgttccaggagctgcagatcgacgacaacgagtacgcctacctcaaggccatcatcttcttcgaccccgacgcgcgcggcctgagcgaccccgggcggatccgccggctgcgcgcccaggtccaggtgagcctcgaggactacatcaacgaccggcagtacgactcccgcggccggttcggggagctgctgctcctgctgcccaccctccagagcatcacgtggcagatgatcgagcagatccagttcatcaagctgttcggcatggccaagatcgacaacctgctccaggagatgctgctgggcggggccccgtccgacgcgccccacgcccaccaccccctccacccccacctgatgcaggagcacatgggcaccaacgtgatcgtcgccaacaccatgccgacccacctgagcaacgggcagatgtgcgagtggccccgcccccggggccaggccgccgcgcccgaggccccgcagcccgccccgcccgggggctccggcagcgagccctaccgcctgctccccggggccgtggccacgatcgtgcggcccctggaggcgatcccccagccgaccatcacccgccaggaggtcatctgaggactagtccctgttcccagagcccacttttttttctttttttgaaataaaatagcctgtctttcagatctaaaaaaaaaaaaaaaaaaaaaaaaaaaaaaaaaaaaaaaaaaaaaaaaaaaaaaaaaaaaaaaaaaaaaaaaaaaaaaaaaaaaaaaaaaaaaaaaaaaa

SEQ ID NO: 5217 - RNA, 1562 nt, synthetic construct
  misc_feature 1..1562: note = mRNA a-1 (A100) (opt1) from Homo sapiens__NP_000448.3__HNF4A(39-474)(S87A_S95A_S99A_K106R_K1 08R_K126R_K127R_S142A_S143A_S148A_T166A_S167A_S313A_S378A_T 429A_T432A_S436A_K458R_S461E)
  source 1..1562: mol_type = other RNA
aggagagtcccgcagtcggcgtccagcggctctgcttgttcgtgtgtgtgtcgttgcaggccttattcaagcttaccatggacaccagcccgtccgaggggaccaacctgaacgcccccaacagcctgggcgtgtccgccctctgcgccatctgcggggaccgggcgacgggcaagcactacggggccagctcctgcgacggctgcaagggcttcttccgccgggccgtccgcaagaaccacatgtacgcctgccggttcgcgcgccagtgcgtggtggaccgggaccgccggaaccagtgccgctactgccggctgaagaagtgcttccgcgccgggatgcggcgcgaggccgtccagaacgagcgggaccgcatcagcacccggcgcgccgcctacgaggactccgcgctgcccagcatcaacgccctcctgcaggccgaggtgctgtcccggcagatcgccgcccccgtgagcggcatcaacggggacatccgcgcgaagaagatcgcctccatcgccgacgtctgcgagagcatgaaggagcagctcctggtgctggtggagtgggccaagtacatcccggccttctgcgagctccccctggacgaccaggtcgcgctgctccgggcccacgccggcgagcacctcctgctgggggccaccaagcgctccatggtgttcaaggacgtgctgctgctcggcaacgactacatcgtcccccgccactgccccgagctggccgagatgagccgggtgtccatccgcatcctggacgagctcgtgctgccgttccaggagctgcagatcgacgacaacgagtacgcgtacctcaaggccatcatcttcttcgaccccgacgccaagggcctgagcgaccccgggaagatcaagcggctgcgcgcccaggtccaggtgtccctcgaggactacatcaacgaccggcagtacgacagccgcggccggttcggggagctgctgctcctgctgcccaccctccagagcatcacgtggcagatgatcgagcagatccagttcatcaagctgttcggcatggcgaagatcgacaacctgctccaggagatgctgctgggcggggccccgtccgacgcgccccacgcccaccaccccctccacccccacctgatgcaggagcacatgggcaccaacgtgatcgtcgccaacaccatgccgacccacctgagcaacgggcagatgtgcgagtggccccgcccccggggccaggccgccgcccccgaggccccgcagcccgccccgcccgggggctccggcagcgagccctacaagctgctccccggggcggtggccacgatcgtgcgccccctggaggccatcccccagccgaccatcaccaagcaggaggtcatctgaggactagtccctgttcccagagcccacttttttttctttttttgaaataaaatagcctgtctttcagatctaaaaaaaaaaaaaaaaaaaaaaaaaaaaaaaaaaaaaaaaaaaaaaaaaaaaaaaaaaaaaaaaaaaaaaaaaaaaaaaaaaaaaaaaaaaaaaaaaaaa

SEQ ID NO: 5218 - RNA, 1562 nt, synthetic construct
  misc_feature 1..1562: note = mRNA a-1 (A100) (opt1) from Homo sapiens__NP_000448.3__HNF4A(39-474)(S87A_K106R_K108R_K126R_ K127R_S138A_T139A_S142A_S143A_S148A_T166A_S167A_S313A_S378A _T429A_T432A_S436A_K458R_S461E)
  source 1..1562: mol_type = other RNA
aggagagtcccgcagtcggcgtccagcggctctgcttgttcgtgtgtgtgtcgttgcaggccttattcaagcttaccatggacaccagcccgtccgaggggaccaacctgaacgcccccaacagcctgggcgtgtccgccctctgcgccatctgcggggaccgggcgacgggcaagcactacggggccagctcctgcgacggctgcaagggcttcttccgccgggccgtccgcaagaaccacatgtacagctgccggttctcccgccagtgcgtggtggaccgggaccgccggaaccagtgccgctactgccggctgaagaagtgcttccgcgccgggatgcggcgcgaggcggtccagaacgagcgggaccgcatcgccgcccggcgcgccgcctacgaggacagcgcgctgccctccatcaacgccctcctgcaggccgaggtgctgagccggcagatcgccgcccccgtgtccggcatcaacggggacatccgcgcgaagaagatcgccagcatcgccgacgtctgcgagtccatgaaggagcagctcctggtgctggtggagtgggccaagtacatcccggccttctgcgagctccccctggacgaccaggtcgcgctgctccgggcccacgccggcgagcacctcctgctgggggccaccaagcgcagcatggtgttcaaggacgtgctgctgctcggcaacgactacatcgtcccccgccactgccccgagctggccgagatgtcccgggtgagcatccgcatcctggacgagctcgtgctgccgttccaggagctgcagatcgacgacaacgagtacgcgtacctcaaggccatcatcttcttcgaccccgacgccaagggcctgtccgaccccgggaagatcaagcggctgcgcgcccaggtccaggtgagcctcgaggactacatcaacgaccggcagtacgacagccgcggccggttcggggagctgctgctcctgctgcccaccctccagtccatcacctggcagatgatcgagcagatccagttcatcaagctgttcggcatggcgaagatcgacaacctgctccaggagatgctgctgggcggggccccgagcgacgcgccccacgcccaccaccccctccacccccacctgatgcaggagcacatgggcacgaacgtgatcgtcgccaacaccatgccgacccacctgtccaacgggcagatgtgcgagtggccccgcccccggggccaggccgccgcccccgaggccccgcagcccgccccgcccgggggcagcggctccgagccctacaagctgctccccggggcggtggccaccatcgtgcgccccctggaggccatcccccagccgacgatcaccaagcaggaggtcatctgaggactagtccctgttcccagagcccacttttttttctttttttgaaataaaatagcctgtctttcagatctaaaaaaaaaaaaaaaaaaaaaaaaaaaaaaaaaaaaaaaaaaaaaaaaaaaaaaaaaaaaaaaaaaaaaaaaaaaaaaaaaaaaaaaaaaaaaaaaaaaa

SEQ ID NO: 5219 - RNA, 1562 nt, synthetic construct
  misc_feature 1..1562: note = mRNA a-1 (A100) (opt1) from Homo sapiens__NP_000448.3__HNF4A(39-474)(S87A_S95A_S99A_K106R_K1 08R_K126R_K127R_S138A_T139A_S142A_S143A_S148A_T166A_S167A_S 313A_S378A_T429A_T432A_S436A_K458R_S461E)
  source 1..1562: mol_type = other RNA
aggagagtcccgcagtcggcgtccagcggctctgcttgttcgtgtgtgtgtcgttgcaggccttattcaagcttaccatggacaccagcccgtccgaggggaccaacctgaacgcccccaacagcctgggcgtgtccgccctctgcgccatctgcggggaccgggcgacgggcaagcactacggggccagctcctgcgacggctgcaagggcttcttccgccgggccgtccgcaagaaccacatgtacgcctgccggttcgcgcgccagtgcgtggtggaccgggaccgccggaaccagtgccgctactgccggctgaagaagtgcttccgcgccgggatgcggcgcgaggccgtccagaacgagcgggaccgcatcgccgcccggcgcgcggcctacgaggacagcgccctgccctccatcaacgccctcctgcaggccgaggtgctgagccggcagatcgcggcccccgtgtccggcatcaacggggacatccgcgccaagaagatcgccagcatcgccgacgtctgcgagtccatgaaggagcagctcctggtgctggtggagtgggcgaagtacatcccggccttctgcgagctccccctggacgaccaggtcgccctgctccgggcccacgccggcgagcacctcctgctgggggcgaccaagcgcagcatggtgttcaaggacgtgctgctgctcggcaacgactacatcgtcccccgccactgccccgagctggccgagatgtcccgggtgagcatccgcatcctggacgagctcgtgctgccgttccaggagctgcagatcgacgacaacgagtacgcctacctcaaggccatcatcttcttcgaccccgacgcgaagggcctgtccgaccccgggaagatcaagcggctgcgcgcccaggtccaggtgagcctcgaggactacatcaacgaccggcagtacgactcccgcggccggttcggggagctgctgctcctgctgcccaccctccagagcatcacctggcagatgatcgagcagatccagttcatcaagctgttcggcatggccaagatcgacaacctgctccaggagatgctgctgggcggggccccgagcgacgcgccccacgcccaccaccccctccacccccacctgatgcaggagcacatgggcacgaacgtgatcgtcgccaacaccatgccgacccacctgtccaacgggcagatgtgcgagtggccccgcccccggggccaggccgccgcccccgaggcgccgcagcccgccccgcccgggggcagcggctccgagccctacaagctgctccccggggccgtggccaccatcgtgcgccccctggaggccatcccccagccgacgatcaccaagcaggaggtcatctgaggactagtccctgttcccagagcccacttttttttctttttttgaaataaaatagcctgtctttcagatctaaaaaaaaaaaaaaaaaaaaaaaaaaaaaaaaaaaaaaaaaaaaaaaaaaaaaaaaaaaaaaaaaaaaaaaaaaaaaaaaaaaaaaaaaaaaaaaaaaaa

SEQ ID NO: 5220 - RNA, 1562 nt, synthetic construct
  misc_feature 1..1562: note = mRNA a-1 (A100) (opt2) from Homo sapiens__NP_000448.3__HNF4A(39-474)
  source 1..1562: mol_type = other RNA
aggagagtcccgcagtcggcgtccagcggctctgcttgttcgtgtgtgtgtcgttgcaggccttattcaagcttaccatggacacctccccctccgagggcaccaacctcaacgcccccaactccctcggcgtctccgccctctgcgccatctgcggcgaccgcgccaccggcaagcactacggcgcctcctcctgcgacggctgcaagggcttcttccgccgctccgtccgcaagaaccacatgtactcctgccgcttctcccgccagtgcgtcgtcgacaaggacaagcgcaaccagtgccgctactgccgcctcaagaagtgcttccgcgccggcatgaagaaggaggccgtccagaacgagcgcgaccgcatctccacccgccgctcctcctacgaggactcctccctcccctccatcaacgccctcctccaggccgaggtcctctcccgccagatcacctcccccgtctccggcatcaacggcgacatccgcgccaagaagatcgcctccatcgccgacgtctgcgagtccatgaaggagcagctcctcgtcctcgtcgagtgggccaagtacatccccgccttctgcgagctccccctcgacgaccaggtcgccctcctccgcgcccacgccggcgagcacctcctcctcggcgccaccaagcgctccatggtcttcaaggacgtcctcctcctcggcaacgactacatcgtcccccgccactgccccgagctcgccgagatgtcccgcgtctccatccgcatcctcgacgagctcgtcctccccttccaggagctccagatcgacgacaacgagtacgcctacctcaaggccatcatcttcttcgaccccgacgccaagggcctctccgaccccggcaagatcaagcgcctccgctcccaggtccaggtctccctcgaggactacatcaacgaccgccagtacgactcgcgcgggcgcttcggcgagctcctcctcctcctccccaccctccagtccatcacctggcagatgatcgagcagatccagttcatcaagctgttcggcatggccaagatcgacaacctcctccaggagatgctcctcggcggctccccctccgacgccccccacgcccaccaccccctccacccccacctcatgcaggagcacatgggcaccaacgtcatcgtcgccaacaccatgcccacccacctctccaacggccagatgtgcgagtggccccgcccgcgcggccaggccgccacccccgagaccccccagccctccccccccggcggctccggctccgagccctacaagctcctccccggcgccgtcgccaccatcgtcaagcccctctccgccatcccccagcccaccatcaccaagcaggaggtcatctgaggactagtccctgttcccagagcccacttttttttctttttttgaaataaaatagcctgtctttcagatctaaaaaaaaaaaaaaaaaaaaaaaaaaaaaaaaaaaaaaaaaaaaaaaaaaaaaaaaaaaaaaaaaaaaaaaaaaaaaaaaaaaaaaaaaaaaaaaaaaaa

SEQ ID NO: 5221 - RNA, 1562 nt, synthetic construct
  misc_feature 1..1562: note = mRNA a-1 (A100) (opt2) from Homo sapiens__NP_000448.3__HNF4A(39-474)(S313A)
  source 1..1562: mol_type = other RNA
aggagagtcccgcagtcggcgtccagcggctctgcttgttcgtgtgtgtgtcgttgcaggccttattcaagcttaccatggacacctccccctccgagggcaccaacctcaacgcccccaactccctcggcgtctccgccctctgcgccatctgcggcgaccgcgccaccggcaagcactacggcgcctcctcctgcgacggctgcaagggcttcttccgccgctccgtccgcaagaaccacatgtactcctgccgcttctcccgccagtgcgtcgtcgacaaggacaagcgcaaccagtgccgctactgccgcctcaagaagtgcttccgcgccggcatgaagaaggaggccgtccagaacgagcgcgaccgcatctccacccgccgctcctcctacgaggactcctccctcccctccatcaacgccctcctccaggccgaggtcctctcccgccagatcacctcccccgtctccggcatcaacggcgacatccgcgccaagaagatcgcctccatcgccgacgtctgcgagtccatgaaggagcagctcctcgtcctcgtcgagtgggccaagtacatccccgccttctgcgagctccccctcgacgaccaggtcgccctcctccgcgcccacgccggcgagcacctcctcctcggcgccaccaagcgctccatggtcttcaaggacgtcctcctcctcggcaacgactacatcgtcccccgccactgccccgagctcgccgagatgtcccgcgtctccatccgcatcctcgacgagctcgtcctccccttccaggagctccagatcgacgacaacgagtacgcctacctcaaggccatcatcttcttcgaccccgacgccaagggcctctccgaccccggcaagatcaagcgcctccgcgcccaggtccaggtctccctcgaggactacatcaacgaccgccagtacgactcccgcggccgcttcggcgagctcctcctcctcctccccaccctccagtccatcacctggcagatgatcgagcagatccagttcatcaagctcttcggcatggccaagatcgacaacctcctccaggagatgctcctcggcggctccccctccgacgccccccacgcccaccaccccctccacccccacctcatgcaggagcacatgggcaccaacgtcatcgtcgccaacaccatgcccacccacctctccaacggccagatgtgcgagtggccccgcccccgcggccaggccgccacccccgagaccccccagccctccccccccggcggctccggctccgagccctacaagctcctccccggcgccgtcgccaccatcgtcaagcccctctccgccatcccccagcccaccatcaccaagcaggaggtcatctgaggactagtccctgttcccagagcccacttttttttctttttttgaaataaaatagcctgtctttcagatctaaaaaaaaaaaaaaaaaaaaaaaaaaaaaaaaaaaaaaaaaaaaaaaaaaaaaaaaaaaaaaaaaaaaaaaaaaaaaaaaaaaaaaaaaaaaaaaaaaaa

SEQ ID NO: 5222 - RNA, 1562 nt, synthetic construct
  misc_feature 1..1562: note = mRNA a-1 (A100) (opt2) from Homo sapiens__NP_000448.3__HNF4A(39-474)(S313E)
  source 1..1562: mol_type = other RNA
aggagagtcccgcagtcggcgtccagcggctctgcttgttcgtgtgtgtgtcgttgcaggccttattcaagcttaccatggacacctccccctccgagggcaccaacctcaacgcccccaactccctcggcgtctccgccctctgcgccatctgcggcgaccgcgccaccggcaagcactacggcgcctcctcctgcgacggctgcaagggcttcttccgccgctccgtccgcaagaaccacatgtactcctgccgcttctcccgccagtgcgtcgtcgacaaggacaagcgcaaccagtgccgctactgccgcctcaagaagtgcttccgcgccggcatgaagaaggaggccgtccagaacgagcgcgaccgcatctccacccgccgctcctcctacgaggactcctccctcccctccatcaacgccctcctccaggccgaggtcctctcccgccagatcacctcccccgtctccggcatcaacggcgacatccgcgccaagaagatcgcctccatcgccgacgtctgcgagtccatgaaggagcagctcctcgtcctcgtcgagtgggccaagtacatccccgccttctgcgagctccccctcgacgaccaggtcgccctcctccgcgcccacgccggcgagcacctcctcctcggcgccaccaagcgctccatggtcttcaaggacgtcctcctcctcggcaacgactacatcgtcccccgccactgccccgagctcgccgagatgtcccgcgtctccatccgcatcctcgacgagctcgtcctccccttccaggagctccagatcgacgacaacgagtacgcctacctcaaggccatcatcttcttcgaccccgacgccaagggcctctccgaccccggcaagatcaagcgcctccgcgagcaggtccaggtctccctcgaggactacatcaacgaccgccagtacgactcccgcggccgcttcggcgagctcctcctcctcctccccaccctccagtccatcacctggcagatgatcgagcagatccagttcatcaagctcttcggcatggccaagatcgacaacctcctccaggagatgctcctcggcggctccccctccgacgccccccacgcccaccaccccctccacccccacctcatgcaggagcacatgggcaccaacgtcatcgtcgccaacaccatgcccacccacctctccaacggccagatgtgcgagtggccccgcccccgcggccaggccgccacccccgagaccccccagccctccccccccggcggctccggctccgagccctacaagctcctccccggcgccgtcgccaccatcgtcaagcccctctccgccatcccccagcccaccatcaccaagcaggaggtcatctgaggactagtccctgttcccagagcccacttttttttctttttttgaaataaaatagcctgtctttcagatctaaaaaaaaaaaaaaaaaaaaaaaaaaaaaaaaaaaaaaaaaaaaaaaaaaaaaaaaaaaaaaaaaaaaaaaaaaaaaaaaaaaaaaaaaaaaaaaaaaaa

SEQ ID NO: 5223 - RNA, 1562 nt, synthetic construct
  misc_feature 1..1562: note = mRNA a-1 (A100) (opt2) from Homo sapiens__NP_000448.3__HNF4A(39-474)(S142A_S143A)
  source 1..1562: mol_type = other RNA
aggagagtcccgcagtcggcgtccagcggctctgcttgttcgtgtgtgtgtcgttgcaggccttattcaagcttaccatggacacctccccctccgagggcaccaacctcaacgcccccaactccctcggcgtctccgccctctgcgccatctgcggcgaccgcgccaccggcaagcactacggcgcctcctcctgcgacggctgcaagggcttcttccgccgctccgtccgcaagaaccacatgtactcctgccgcttctcccgccagtgcgtcgtcgacaaggacaagcgcaaccagtgccgctactgccgcctcaagaagtgcttccgcgccggcatgaagaaggaggccgtccagaacgagcgcgaccgcatctccacccgccgcgccgcctacgaggactcctccctcccctccatcaacgccctcctccaggccgaggtcctctcccgccagatcacctcccccgtctccggcatcaacggcgacatccgcgccaagaagatcgcctccatcgccgacgtctgcgagtccatgaaggagcagctcctcgtcctcgtcgagtgggccaagtacatccccgccttctgcgagctccccctcgacgaccaggtcgccctcctccgcgcccacgccggcgagcacctcctcctcggcgccaccaagcgctccatggtcttcaaggacgtcctcctcctcggcaacgactacatcgtcccccgccactgccccgagctcgccgagatgtcccgcgtctccatccgcatcctcgacgagctcgtcctccccttccaggagctccagatcgacgacaacgagtacgcctacctcaaggccatcatcttcttcgaccccgacgccaagggcctctccgaccccggcaagatcaagcgcctccgctcccaggtccaggtctccctcgaggactacatcaacgaccgccagtacgactcccgcggccgcttcggcgagctcctcctcctcctccccaccctccagtccatcacctggcagatgatcgagcagatccagttcatcaagctcttcggcatggccaagatcgacaacctcctccaggagatgctcctcggcggctccccctccgacgccccccacgcccaccaccccctccacccccacctcatgcaggagcacatgggcaccaacgtcatcgtcgccaacaccatgcccacccacctctccaacggccagatgtgcgagtggccccgcccccgcggccaggccgccacccccgagaccccccagccctccccccccggcggctccggctccgagccctacaagctcctccccggcgccgtcgccaccatcgtcaagcccctctccgccatcccccagcccaccatcaccaagcaggaggtcatctgaggactagtccctgttcccagagcccacttttttttctttttttgaaataaaatagcctgtctttcagatctaaaaaaaaaaaaaaaaaaaaaaaaaaaaaaaaaaaaaaaaaaaaaaaaaaaaaaaaaaaaaaaaaaaaaaaaaaaaaaaaaaaaaaaaaaaaaaaaaaaa

SEQ ID NO: 5224 - RNA, 1562 nt, synthetic construct
  misc_feature 1..1562: note = mRNA a-1 (A100) (opt2) from Homo sapiens__NP_000448.3__HNF4A(39-474)(S142E_S143E)
  source 1..1562: mol_type = other RNA
aggagagtcccgcagtcggcgtccagcggctctgcttgttcgtgtgtgtgtcgttgcaggccttattcaagcttaccatggacacctccccctccgagggcaccaacctcaacgcccccaactccctcggcgtctccgccctctgcgccatctgcggcgaccgcgccaccggcaagcactacggcgcctcctcctgcgacggctgcaagggcttcttccgccgctccgtccgcaagaaccacatgtactcctgccgcttctcccgccagtgcgtcgtcgacaaggacaagcgcaaccagtgccgctactgccgcctcaagaagtgcttccgcgccggcatgaagaaggaggccgtccagaacgagcgcgaccgcatctccacccgccgcgaggagtacgaggactcctccctcccctccatcaacgccctcctccaggccgaggtcctctcccgccagatcacctcccccgtctccggcatcaacggcgacatccgcgccaagaagatcgcctccatcgccgacgtctgcgagtccatgaaggagcagctcctcgtcctcgtcgagtgggccaagtacatccccgccttctgcgagctccccctcgacgaccaggtcgccctcctccgcgcccacgccggcgagcacctcctcctcggcgccaccaagcgctccatggtcttcaaggacgtcctcctcctcggcaacgactacatcgtcccccgccactgccccgagctcgccgagatgtcccgcgtctccatccgcatcctcgacgagctcgtcctccccttccaggagctccagatcgacgacaacgagtacgcctacctcaaggccatcatcttcttcgaccccgacgccaagggcctctccgaccccggcaagatcaagcgcctccgctcccaggtccaggtctccctcgaggactacatcaacgaccgccagtacgactcccgcggccgcttcggcgagctcctcctcctcctccccaccctccagtccatcacctggcagatgatcgagcagatccagttcatcaagctcttcggcatggccaagatcgacaacctcctccaggagatgctcctcggcggctccccctccgacgccccccacgcccaccaccccctccacccccacctcatgcaggagcacatgggcaccaacgtcatcgtcgccaacaccatgcccacccacctctccaacggccagatgtgcgagtggccccgcccccgcggccaggccgccacccccgagaccccccagccctccccccccggcggctccggctccgagccctacaagctcctccccggcgccgtcgccaccatcgtcaagcccctctccgccatcccccagcccaccatcaccaagcaggaggtcatctgaggactagtccctgttcccagagcccacttttttttctttttttgaaataaaatagcctgtctttcagatctaaaaaaaaaaaaaaaaaaaaaaaaaaaaaaaaaaaaaaaaaaaaaaaaaaaaaaaaaaaaaaaaaaaaaaaaaaaaaaaaaaaaaaaaaaaaaaaaaaaa

SEQ ID NO: 5225 - RNA, 1562 nt, synthetic construct
  misc_feature 1..1562: note = mRNA a-1 (A100) (opt2) from Homo sapiens__NP_000448.3__HNF4A(39-474)(S143A)
  source 1..1562: mol_type = other RNA
aggagagtcccgcagtcggcgtccagcggctctgcttgttcgtgtgtgtgtcgttgcaggccttattcaagcttaccatggacacctccccctccgagggcaccaacctcaacgcccccaactccctcggcgtctccgccctctgcgccatctgcggcgaccgcgccaccggcaagcactacggcgcctcctcctgcgacggctgcaagggcttcttccgccgctccgtccgcaagaaccacatgtactcctgccgcttctcccgccagtgcgtcgtcgacaaggacaagcgcaaccagtgccgctactgccgcctcaagaagtgcttccgcgccggcatgaagaaggaggccgtccagaacgagcgcgaccgcatctccacccgccgctccgcctacgaggactcctccctcccctccatcaacgccctcctccaggccgaggtcctctcccgccagatcacctcccccgtctccggcatcaacggcgacatccgcgccaagaagatcgcctccatcgccgacgtctgcgagtccatgaaggagcagctcctcgtcctcgtcgagtgggccaagtacatccccgccttctgcgagctccccctcgacgaccaggtcgccctcctccgcgcccacgccggcgagcacctcctcctcggcgccaccaagcgctccatggtcttcaaggacgtcctcctcctcggcaacgactacatcgtcccccgccactgccccgagctcgccgagatgtcccgcgtctccatccgcatcctcgacgagctcgtcctccccttccaggagctccagatcgacgacaacgagtacgcctacctcaaggccatcatcttcttcgaccccgacgccaagggcctctccgaccccggcaagatcaagcgcctccgctcccaggtccaggtctccctcgaggactacatcaacgaccgccagtacgactcccgcggccgcttcggcgagctcctcctcctcctccccaccctccagtccatcacctggcagatgatcgagcagatccagttcatcaagctcttcggcatggccaagatcgacaacctcctccaggagatgctcctcggcggctccccctccgacgccccccacgcccaccaccccctccacccccacctcatgcaggagcacatgggcaccaacgtcatcgtcgccaacaccatgcccacccacctctccaacggccagatgtgcgagtggccccgcccccgcggccaggccgccacccccgagaccccccagccctccccccccggcggctccggctccgagccctacaagctcctccccggcgccgtcgccaccatcgtcaagcccctctccgccatcccccagcccaccatcaccaagcaggaggtcatctgaggactagtccctgttcccagagcccacttttttttctttttttgaaataaaatagcctgtctttcagatctaaaaaaaaaaaaaaaaaaaaaaaaaaaaaaaaaaaaaaaaaaaaaaaaaaaaaaaaaaaaaaaaaaaaaaaaaaaaaaaaaaaaaaaaaaaaaaaaaaaa

SEQ ID NO: 5226 - RNA, 1562 nt, synthetic construct
  misc_feature 1..1562: note = mRNA a-1 (A100) (opt2) from Homo sapiens__NP_000448.3__HNF4A(39-474)(T166A)
  source 1..1562: mol_type = other RNA
aggagagtcccgcagtcggcgtccagcggctctgcttgttcgtgtgtgtgtcgttgcaggccttattcaagcttaccatggacacctccccctccgagggcaccaacctcaacgcccccaactccctcggcgtctccgccctctgcgccatctgcggcgaccgcgccaccggcaagcactacggcgcctcctcctgcgacggctgcaagggcttcttccgccgctccgtccgcaagaaccacatgtactcctgccgcttctcccgccagtgcgtcgtcgacaaggacaagcgcaaccagtgccgctactgccgcctcaagaagtgcttccgcgccggcatgaagaaggaggccgtccagaacgagcgcgaccgcatctccacccgccgctcctcctacgaggactcctccctcccctccatcaacgccctcctccaggccgaggtcctctcccgccagatcgcctcccccgtctccggcatcaacggcgacatccgcgccaagaagatcgcctccatcgccgacgtctgcgagtccatgaaggagcagctcctcgtcctcgtcgagtgggccaagtacatccccgccttctgcgagctccccctcgacgaccaggtcgccctcctccgcgcccacgccggcgagcacctcctcctcggcgccaccaagcgctccatggtcttcaaggacgtcctcctcctcggcaacgactacatcgtcccccgccactgccccgagctcgccgagatgtcccgcgtctccatccgcatcctcgacgagctcgtcctccccttccaggagctccagatcgacgacaacgagtacgcctacctcaaggccatcatcttcttcgaccccgacgccaagggcctctccgaccccggcaagatcaagcgcctccgctcccaggtccaggtctccctcgaggactacatcaacgaccgccagtacgactcccgcggccgcttcggcgagctcctcctcctcctccccaccctccagtccatcacctggcagatgatcgagcagatccagttcatcaagctcttcggcatggccaagatcgacaacctcctccaggagatgctcctcggcggctccccctccgacgccccccacgcccaccaccccctccacccccacctcatgcaggagcacatgggcaccaacgtcatcgtcgccaacaccatgcccacccacctctccaacggccagatgtgcgagtggccccgcccccgcggccaggccgccacccccgagaccccccagccctccccccccggcggctccggctccgagccctacaagctcctccccggcgccgtcgccaccatcgtcaagcccctctccgccatcccccagcccaccatcaccaagcaggaggtcatctgaggactagtccctgttcccagagcccacttttttttctttttttgaaataaaatagcctgtctttcagatctaaaaaaaaaaaaaaaaaaaaaaaaaaaaaaaaaaaaaaaaaaaaaaaaaaaaaaaaaaaaaaaaaaaaaaaaaaaaaaaaaaaaaaaaaaaaaaaaaaaa

SEQ ID NO: 5227 - RNA, 1562 nt, synthetic construct
  misc_feature 1..1562: note = mRNA a-1 (A100) (opt2) from Homo sapiens__NP_000448.3__HNF4A(39-474)(S167E)
  source 1..1562: mol_type = other RNA
aggagagtcccgcagtcggcgtccagcggctctgcttgttcgtgtgtgtgtcgttgcaggccttattcaagcttaccatggacacctccccctccgagggcaccaacctcaacgcccccaactccctcggcgtctccgccctctgcgccatctgcggcgaccgcgccaccggcaagcactacggcgcctcctcctgcgacggctgcaagggcttcttccgccgctccgtccgcaagaaccacatgtactcctgccgcttctcccgccagtgcgtcgtcgacaaggacaagcgcaaccagtgccgctactgccgcctcaagaagtgcttccgcgccggcatgaagaaggaggccgtccagaacgagcgcgaccgcatctccacccgccgctcctcctacgaggactcctccctcccctccatcaacgccctcctccaggccgaggtcctctcccgccagatcaccgagcccgtctccggcatcaacggcgacatccgcgccaagaagatcgcctccatcgccgacgtctgcgagtccatgaaggagcagctcctcgtcctcgtcgagtgggccaagtacatccccgccttctgcgagctccccctcgacgaccaggtcgccctcctccgcgcccacgccggcgagcacctcctcctcggcgccaccaagcgctccatggtcttcaaggacgtcctcctcctcggcaacgactacatcgtcccccgccactgccccgagctcgccgagatgtcccgcgtctccatccgcatcctcgacgagctcgtcctccccttccaggagctccagatcgacgacaacgagtacgcctacctcaaggccatcatcttcttcgaccccgacgccaagggcctctccgaccccggcaagatcaagcgcctccgctcccaggtccaggtctccctcgaggactacatcaacgaccgccagtacgactcccgcggccgcttcggcgagctcctcctcctcctccccaccctccagtccatcacctggcagatgatcgagcagatccagttcatcaagctcttcggcatggccaagatcgacaacctcctccaggagatgctcctcggcggctccccctccgacgccccccacgcccaccaccccctccacccccacctcatgcaggagcacatgggcaccaacgtcatcgtcgccaacaccatgcccacccacctctccaacggccagatgtgcgagtggccccgcccccgcggccaggccgccacccccgagaccccccagccctccccccccggcggctccggctccgagccctacaagctcctccccggcgccgtcgccaccatcgtcaagcccctctccgccatcccccagcccaccatcaccaagcaggaggtcatctgaggactagtccctgttcccagagcccacttttttttctttttttgaaataaaatagcctgtctttcagatctaaaaaaaaaaaaaaaaaaaaaaaaaaaaaaaaaaaaaaaaaaaaaaaaaaaaaaaaaaaaaaaaaaaaaaaaaaaaaaaaaaaaaaaaaaaaaaaaaaaa

SEQ ID NO: 5228 - RNA, 1562 nt, synthetic construct
  misc_feature 1..1562: note = mRNA a-1 (A100) (opt2) from Homo sapiens__NP_000448.3__HNF4A(39-474)(S167A)
  source 1..1562: mol_type = other RNA
aggagagtcccgcagtcggcgtccagcggctctgcttgttcgtgtgtgtgtcgttgcaggccttattcaagcttaccatggacacctccccctccgagggcaccaacctcaacgcccccaactccctcggcgtctccgccctctgcgccatctgcggcgaccgcgccaccggcaagcactacggcgcctcctcctgcgacggctgcaagggcttcttccgccgctccgtccgcaagaaccacatgtactcctgccgcttctcccgccagtgcgtcgtcgacaaggacaagcgcaaccagtgccgctactgccgcctcaagaagtgcttccgcgccggcatgaagaaggaggccgtccagaacgagcgcgaccgcatctccacccgccgctcctcctacgaggactcctccctcccctccatcaacgccctcctccaggccgaggtcctctcccgccagatcaccgcccccgtctccggcatcaacggcgacatccgcgccaagaagatcgcctccatcgccgacgtctgcgagtccatgaaggagcagctcctcgtcctcgtcgagtgggccaagtacatccccgccttctgcgagctccccctcgacgaccaggtcgccctcctccgcgcccacgccggcgagcacctcctcctcggcgccaccaagcgctccatggtcttcaaggacgtcctcctcctcggcaacgactacatcgtcccccgccactgccccgagctcgccgagatgtcccgcgtctccatccgcatcctcgacgagctcgtcctccccttccaggagctccagatcgacgacaacgagtacgcctacctcaaggccatcatcttcttcgaccccgacgccaagggcctctccgaccccggcaagatcaagcgcctccgctcccaggtccaggtctccctcgaggactacatcaacgaccgccagtacgactcccgcggccgcttcggcgagctcctcctcctcctccccaccctccagtccatcacctggcagatgatcgagcagatccagttcatcaagctcttcggcatggccaagatcgacaacctcctccaggagatgctcctcggcggctccccctccgacgccccccacgcccaccaccccctccacccccacctcatgcaggagcacatgggcaccaacgtcatcgtcgccaacaccatgcccacccacctctccaacggccagatgtgcgagtggccccgcccccgcggccaggccgccacccccgagaccccccagccctccccccccggcggctccggctccgagccctacaagctcctccccggcgccgtcgccaccatcgtcaagcccctctccgccatcccccagcccaccatcaccaagcaggaggtcatctgaggactagtccctgttcccagagcccacttttttttctttttttgaaataaaatagcctgtctttcagatctaaaaaaaaaaaaaaaaaaaaaaaaaaaaaaaaaaaaaaaaaaaaaaaaaaaaaaaaaaaaaaaaaaaaaaaaaaaaaaaaaaaaaaaaaaaaaaaaaaaa

SEQ ID NO: 5229 - RNA, 1562 nt, synthetic construct
  misc_feature 1..1562: note = mRNA a-1 (A100) (opt2) from Homo sapiens__NP_000448.3__HNF4A(39-474)(S167A_S378A_T429A_T432A _S436A)
  source 1..1562: mol_type = other RNA
aggagagtcccgcagtcggcgtccagcggctctgcttgttcgtgtgtgtgtcgttgcaggccttattcaagcttaccatggacacctccccctccgagggcaccaacctcaacgcccccaactccctcggcgtctccgccctctgcgccatctgcggcgaccgcgccaccggcaagcactacggcgcctcctcctgcgacggctgcaagggcttcttccgccgctccgtccgcaagaaccacatgtactcctgccgcttctcccgccagtgcgtcgtcgacaaggacaagcgcaaccagtgccgctactgccgcctcaagaagtgcttccgcgccggcatgaagaaggaggccgtccagaacgagcgcgaccgcatctccacccgccgctcctcctacgaggactcctccctcccctccatcaacgccctcctccaggccgaggtcctctcccgccagatcaccgcccccgtctccggcatcaacggcgacatccgcgccaagaagatcgcctccatcgccgacgtctgcgagtccatgaaggagcagctcctcgtcctcgtcgagtgggccaagtacatccccgccttctgcgagctccccctcgacgaccaggtcgccctcctccgcgcccacgccggcgagcacctcctcctcggcgccaccaagcgctccatggtcttcaaggacgtcctcctcctcggcaacgactacatcgtcccccgccactgccccgagctcgccgagatgtcccgcgtctccatccgcatcctcgacgagctcgtcctccccttccaggagctccagatcgacgacaacgagtacgcctacctcaaggccatcatcttcttcgaccccgacgccaagggcctctccgaccccggcaagatcaagcgcctccgctcccaggtccaggtctccctcgaggactacatcaacgaccgccagtacgactcccgcggccgcttcggcgagctcctcctcctcctccccaccctccagtccatcacctggcagatgatcgagcagatccagttcatcaagctcttcggcatggccaagatcgacaacctcctccaggagatgctcctcggcggcgccccctccgacgccccccacgcccaccaccccctccacccccacctcatgcaggagcacatgggcaccaacgtcatcgtcgccaacaccatgcccacccacctctccaacggccagatgtgcgagtggccccgcccccgcggccaggccgccgcccccgaggccccccagcccgccccccccggcggctccggctccgagccctacaagctcctccccggcgccgtcgccaccatcgtcaagcccctctccgccatcccccagcccaccatcaccaagcaggaggtcatctgaggactagtccctgttcccagagcccacttttttttctttttttgaaataaaatagcctgtctttcagatctaaaaaaaaaaaaaaaaaaaaaaaaaaaaaaaaaaaaaaaaaaaaaaaaaaaaaaaaaaaaaaaaaaaaaaaaaaaaaaaaaaaaaaaaaaaaaaaaaaaa

SEQ ID NO: 5230 - RNA, 1562 nt, synthetic construct
  misc_feature 1..1562: note = mRNA a-1 (A100) (opt2) from Homo sapiens__NP_000448.3__HNF4A(39-474)(S167E_S378E_T429E_T432E _S436E)
  source 1..1562: mol_type = other RNA
aggagagtcccgcagtcggcgtccagcggctctgcttgttcgtgtgtgtgtcgttgcaggccttattcaagcttaccatggacacctccccctccgagggcaccaacctcaacgcccccaactccctcggcgtctccgccctctgcgccatctgcggcgaccgcgccaccggcaagcactacggcgcctcctcctgcgacggctgcaagggcttcttccgccgctccgtccgcaagaaccacatgtactcctgccgcttctcccgccagtgcgtcgtcgacaaggacaagcgcaaccagtgccgctactgccgcctcaagaagtgcttccgcgccggcatgaagaaggaggccgtccagaacgagcgcgaccgcatctccacccgccgctcctcctacgaggactcctccctcccctccatcaacgccctcctccaggccgaggtcctctcccgccagatcaccgagcccgtctccggcatcaacggcgacatccgcgccaagaagatcgcctccatcgccgacgtctgcgagtccatgaaggagcagctcctcgtcctcgtcgagtgggccaagtacatccccgccttctgcgagctccccctcgacgaccaggtcgccctcctccgcgcccacgccggcgagcacctcctcctcggcgccaccaagcgctccatggtcttcaaggacgtcctcctcctcggcaacgactacatcgtcccccgccactgccccgagctcgccgagatgtcccgcgtctccatccgcatcctcgacgagctcgtcctccccttccaggagctccagatcgacgacaacgagtacgcctacctcaaggccatcatcttcttcgaccccgacgccaagggcctctccgaccccggcaagatcaagcgcctccgctcccaggtccaggtctccctcgaggactacatcaacgaccgccagtacgactcccgcggccgcttcggcgagctcctcctcctcctccccaccctccagtccatcacctggcagatgatcgagcagatccagttcatcaagctcttcggcatggccaagatcgacaacctcctccaggagatgctcctcggcggcgagccctccgacgccccccacgcccaccaccccctccacccccacctcatgcaggagcacatgggcaccaacgtcatcgtcgccaacaccatgcccacccacctctccaacggccagatgtgcgagtggccccgcccccgcggccaggccgccgagcccgaggagccccagcccgagccccccggcggctccggctccgagccctacaagctcctccccggcgccgtcgccaccatcgtcaagcccctctccgccatcccccagcccaccatcaccaagcaggaggtcatctgaggactagtccctgttcccagagcccacttttttttctttttttgaaataaaatagcctgtctttcagatctaaaaaaaaaaaaaaaaaaaaaaaaaaaaaaaaaaaaaaaaaaaaaaaaaaaaaaaaaaaaaaaaaaaaaaaaaaaaaaaaaaaaaaaaaaaaaaaaaaaa

SEQ ID NO: 5231 - RNA, 1562 nt, synthetic construct
  misc_feature 1..1562: note = mRNA a-1 (A100) (opt2) from Homo sapiens__NP_000448.3__HNF4A(39-474)(S87A)
  source 1..1562: mol_type = other RNA
aggagagtcccgcagtcggcgtccagcggctctgcttgttcgtgtgtgtgtcgttgcaggccttattcaagcttaccatggacacctccccctccgagggcaccaacctcaacgcccccaactccctcggcgtctccgccctctgcgccatctgcggcgaccgcgccaccggcaagcactacggcgcctcctcctgcgacggctgcaagggcttcttccgccgcgccgtccgcaagaaccacatgtactcctgccgcttctcccgccagtgcgtcgtcgacaaggacaagcgcaaccagtgccgctactgccgcctcaagaagtgcttccgcgccggcatgaagaaggaggccgtccagaacgagcgcgaccgcatctccacccgccgctcctcctacgaggactcctccctcccctccatcaacgccctcctccaggccgaggtcctctcccgccagatcacctcccccgtctccggcatcaacggcgacatccgcgccaagaagatcgcctccatcgccgacgtctgcgagtccatgaaggagcagctcctcgtcctcgtcgagtgggccaagtacatccccgccttctgcgagctccccctcgacgaccaggtcgccctcctccgcgcccacgccggcgagcacctcctcctcggcgccaccaagcgctccatggtcttcaaggacgtcctcctcctcggcaacgactacatcgtcccccgccactgccccgagctcgccgagatgtcccgcgtctccatccgcatcctcgacgagctcgtcctccccttccaggagctccagatcgacgacaacgagtacgcctacctcaaggccatcatcttcttcgaccccgacgccaagggcctctccgaccccggcaagatcaagcgcctccgctcccaggtccaggtctccctcgaggactacatcaacgaccgccagtacgactcccgcggccgcttcggcgagctcctcctcctcctccccaccctccagtccatcacctggcagatgatcgagcagatccagttcatcaagctcttcggcatggccaagatcgacaacctcctccaggagatgctcctcggcggctccccctccgacgccccccacgcccaccaccccctccacccccacctcatgcaggagcacatgggcaccaacgtcatcgtcgccaacaccatgcccacccacctctccaacggccagatgtgcgagtggccccgcccccgcggccaggccgccacccccgagaccccccagccctccccccccggcggctccggctccgagccctacaagctcctccccggcgccgtcgccaccatcgtcaagcccctctccgccatcccccagcccaccatcaccaagcaggaggtcatctgaggactagtccctgttcccagagcccacttttttttctttttttgaaataaaatagcctgtctttcagatctaaaaaaaaaaaaaaaaaaaaaaaaaaaaaaaaaaaaaaaaaaaaaaaaaaaaaaaaaaaaaaaaaaaaaaaaaaaaaaaaaaaaaaaaaaaaaaaaaaaa

SEQ ID NO: 5232 - RNA, 1562 nt, synthetic construct
  misc_feature 1..1562: note = mRNA a-1 (A100) (opt2) from Homo sapiens__NP_000448.3__HNF4A(39-474)(S87E)
  source 1..1562: mol_type = other RNA
aggagagtcccgcagtcggcgtccagcggctctgcttgttcgtgtgtgtgtcgttgcaggccttattcaagcttaccatggacacctccccctccgagggcaccaacctcaacgcccccaactccctcggcgtctccgccctctgcgccatctgcggcgaccgcgccaccggcaagcactacggcgcctcctcctgcgacggctgcaagggcttcttccgccgcgaggtccgcaagaaccacatgtactcctgccgcttctcccgccagtgcgtcgtcgacaaggacaagcgcaaccagtgccgctactgccgcctcaagaagtgcttccgcgccggcatgaagaaggaggccgtccagaacgagcgcgaccgcatctccacccgccgctcctcctacgaggactcctccctcccctccatcaacgccctcctccaggccgaggtcctctcccgccagatcacctcccccgtctccggcatcaacggcgacatccgcgccaagaagatcgcctccatcgccgacgtctgcgagtccatgaaggagcagctcctcgtcctcgtcgagtgggccaagtacatccccgccttctgcgagctccccctcgacgaccaggtcgccctcctccgcgcccacgccggcgagcacctcctcctcggcgccaccaagcgctccatggtcttcaaggacgtcctcctcctcggcaacgactacatcgtcccccgccactgccccgagctcgccgagatgtcccgcgtctccatccgcatcctcgacgagctcgtcctccccttccaggagctccagatcgacgacaacgagtacgcctacctcaaggccatcatcttcttcgaccccgacgccaagggcctctccgaccccggcaagatcaagcgcctccgctcccaggtccaggtctccctcgaggactacatcaacgaccgccagtacgactcccgcggccgcttcggcgagctcctcctcctcctccccaccctccagtccatcacctggcagatgatcgagcagatccagttcatcaagctcttcggcatggccaagatcgacaacctcctccaggagatgctcctcggcggctccccctccgacgccccccacgcccaccaccccctccacccccacctcatgcaggagcacatgggcaccaacgtcatcgtcgccaacaccatgcccacccacctctccaacggccagatgtgcgagtggccccgcccccgcggccaggccgccacccccgagaccccccagccctccccccccggcggctccggctccgagccctacaagctcctccccggcgccgtcgccaccatcgtcaagcccctctccgccatcccccagcccaccatcaccaagcaggaggtcatctgaggactagtccctgttcccagagcccacttttttttctttttttgaaataaaatagcctgtctttcagatctaaaaaaaaaaaaaaaaaaaaaaaaaaaaaaaaaaaaaaaaaaaaaaaaaaaaaaaaaaaaaaaaaaaaaaaaaaaaaaaaaaaaaaaaaaaaaaaaaaaa

SEQ ID NO: 5233 - RNA, 1562 nt, synthetic construct
  misc_feature 1..1562: note = mRNA a-1 (A100) (opt2) from Homo sapiens__NP_000448.3__HNF4A(39-474)(R2V)
  source 1..1562: mol_type = other RNA
aggagagtcccgcagtcggcgtccagcggctctgcttgttcgtgtgtgtgtcgttgcaggccttattcaagcttaccatggacacctccccctccgagggcaccaacctcaacgcccccaactccctcggcgtctccgccctctgcgccatctgcggcgaccgcgccaccggcaagcactacggcgcctcctcctgcgacggctgcaagggcttcttccgccgctccgtccgcaagaaccacatgtactcctgccgcttctcccgccagtgcgtcgtcgacaaggacaagcgcaaccagtgccgctactgccgcctcaagaagtgcttccgcgccggcatgaagaaggaggccgtccagaacgagcgcgaccgcatctccacccgccgctcctcctacgaggactcctccctcccctccatcaacgccctcctccaggccgaggtcctctcccgccagatcacctcccccgtctccggcatcaacggcgacatccgcgccaagaagatcgcctccatcgccgacgtctgcgagtccatgaaggagcagctcctcgtcctcgtcgagtgggccaagtacatccccgccttctgcgagctccccctcgacgaccaggtcgccctcctccgcgcccacgccggcgagcacctcctcctcggcgccaccaagcgctccatggtcttcaaggacgtcctcctcctcggcaacgactacatcgtcccccgccactgccccgagctcgccgagatgtcccgcgtctccatccgcatcctcgacgagctcgtcctccccttccaggagctccagatcgacgacaacgagtacgcctacctcaaggccatcatcttcttcgaccccgacgccaagggcctctccgaccccggcaagatcaagcgcctccgctcccaggtccaggtctccctcgaggactacatcaacgaccgccagtacgactcccgcggccgcttcggcgagctcctcctcctcctccccaccctccagtccatcacctggcagatgatcgagcagatccagttcatcaagctcttcggcatggccaagatcgacaacctcctccaggagatgctcctcggcggctccccctccgacgccccccacgcccaccaccccctccacccccacctcatgcaggagcacatgggcaccaacgtcatcgtcgccaacaccatgcccacccacctctccaacggccagatgtgcgagtggccccgcccccgcggccaggccgccacccccgagaccccccagccctccccccccggcggctccggctccgagccctacaagctcctccccggcgccgtcgccaccatcgtcaagcccctctccgccatcccccagcccaccatcaccaagcaggaggtcatctgaggactagtccctgttcccagagcccacttttttttctttttttgaaataaaatagcctgtctttcagatctaaaaaaaaaaaaaaaaaaaaaaaaaaaaaaaaaaaaaaaaaaaaaaaaaaaaaaaaaaaaaaaaaaaaaaaaaaaaaaaaaaaaaaaaaaaaaaaaaaaa

SEQ ID NO: 5234 - RNA, 1562 nt, synthetic construct; identical to SEQ ID NO: 5233
  misc_feature 1..1562: note = mRNA a-1 (A100) (opt2) from Homo sapiens__NP_000448.3__HNF4A(39-474)(R2V_K5V)
  source 1..1562: mol_type = other RNA

SEQ ID NO: 5235 - RNA, 1562 nt, synthetic construct
  misc_feature 1..1562: note = mRNA a-1 (A100) (opt2) from Homo sapiens__NP_000448.3__HNF4A(39-474)(K179R_K180R)
  source 1..1562: mol_type = other RNA
aggagagtcccgcagtcggcgtccagcggctctgcttgttcgtgtgtgtgtcgttgcaggccttattcaagcttaccatggacacctccccctccgagggcaccaacctcaacgcccccaactccctcggcgtctccgccctctgcgccatctgcggcgaccgcgccaccggcaagcactacggcgcctcctcctgcgacggctgcaagggcttcttccgccgctccgtccgcaagaaccacatgtactcctgccgcttctcccgccagtgcgtcgtcgacaaggacaagcgcaaccagtgccgctactgccgcctcaagaagtgcttccgcgccggcatgaagaaggaggccgtccagaacgagcgcgaccgcatctccacccgccgctcctcctacgaggactcctccctcccctccatcaacgccctcctccaggccgaggtcctctcccgccagatcacctcccccgtctccggcatcaacggcgacatccgcgcccgccgcatcgcctccatcgccgacgtctgcgagtccatgaaggagcagctcctcgtcctcgtcgagtgggccaagtacatccccgccttctgcgagctccccctcgacgaccaggtcgccctcctccgcgcccacgccggcgagcacctcctcctcggcgccaccaagcgctccatggtcttcaaggacgtcctcctcctcggcaacgactacatcgtcccccgccactgccccgagctcgccgagatgtcccgcgtctccatccgcatcctcgacgagctcgtcctccccttccaggagctccagatcgacgacaacgagtacgcctacctcaaggccatcatcttcttcgaccccgacgccaagggcctctccgaccccggcaagatcaagcgcctccgctcccaggtccaggtctccctcgaggactacatcaacgaccgccagtacgactcccgcggccgcttcggcgagctcctcctcctcctccccaccctccagtccatcacctggcagatgatcgagcagatccagttcatcaagctcttcggcatggccaagatcgacaacctcctccaggagatgctcctcggcggctccccctccgacgccccccacgcccaccaccccctccacccccacctcatgcaggagcacatgggcaccaacgtcatcgtcgccaacaccatgcccacccacctctccaacggccagatgtgcgagtggccccgcccccgcggccaggccgccacccccgagaccccccagccctccccccccggcggctccggctccgagccctacaagctcctccccggcgccgtcgccaccatcgtcaagcccctctccgccatcccccagcccaccatcaccaagcaggaggtcatctgaggactagtccctgttcccagagcccacttttttttctttttttgaaataaaatagcctgtctttcagatctaaaaaaaaaaaaaaaaaaaaaaaaaaaaaaaaaaaaaaaaaaaaaaaaaaaaaaaaaaaaaaaaaaaaaaaaaaaaaaaaaaaaaaaaaaaaaaaaaaaa

SEQ ID NO: 5236 - RNA, 1562 nt, synthetic construct
  misc_feature 1..1562: note = mRNA a-1 (A100) (opt2) from Homo sapiens__NP_000448.3__HNF4A(39-474)(K234R)
  source 1..1562: mol_type = other RNA
aggagagtcccgcagtcggcgtccagcggctctgcttgttcgtgtgtgtgtcgttgcaggccttattcaagcttaccatggacacctccccctccgagggcaccaacctcaacgcccccaactccctcggcgtctccgccctctgcgccatctgcggcgaccgcgccaccggcaagcactacggcgcctcctcctgcgacggctgcaagggcttcttccgccgctccgtccgcaagaaccacatgtactcctgccgcttctcccgccagtgcgtcgtcgacaaggacaagcgcaaccagtgccgctactgccgcctcaagaagtgcttccgcgccggcatgaagaaggaggccgtccagaacgagcgcgaccgcatctccacccgccgctcctcctacgaggactcctccctcccctccatcaacgccctcctccaggccgaggtcctctcccgccagatcacctcccccgtctccggcatcaacggcgacatccgcgccaagaagatcgcctccatcgccgacgtctgcgagtccatgaaggagcagctcctcgtcctcgtcgagtgggccaagtacatccccgccttctgcgagctccccctcgacgaccaggtcgccctcctccgcgcccacgccggcgagcacctcctcctcggcgccacccgccgctccatggtcttcaaggacgtcctcctcctcggcaacgactacatcgtcccccgccactgccccgagctcgccgagatgtcccgcgtctccatccgcatcctcgacgagctcgtcctccccttccaggagctccagatcgacgacaacgagtacgcctacctcaaggccatcatcttcttcgaccccgacgccaagggcctctccgaccccggcaagatcaagcgcctccgctcccaggtccaggtctccctcgaggactacatcaacgaccgccagtacgactcccgcggccgcttcggcgagctcctcctcctcctccccaccctccagtccatcacctggcagatgatcgagcagatccagttcatcaagctcttcggcatggccaagatcgacaacctcctccaggagatgctcctcggcggctccccctccgacgccccccacgcccaccaccccctccacccccacctcatgcaggagcacatgggcaccaacgtcatcgtcgccaacaccatgcccacccacctctccaacggccagatgtgcgagtggccccgcccccgcggccaggccgccacccccgagaccccccagccctccccccccggcggctccggctccgagccctacaagctcctccccggcgccgtcgccaccatcgtcaagcccctctccgccatcccccagcccaccatcaccaagcaggaggtcatctgaggactagtccctgttcccagagcccacttttttttctttttttgaaataaaatagcctgtctttcagatctaaaaaaaaaaaaaaaaaaaaaaaaaaaaaaaaaaaaaaaaaaaaaaaaaaaaaaaaaaaaaaaaaaaaaaaaaaaaaaaaaaaaaaaaaaaaaaaaaaaa

SEQ ID NO: 5237 - RNA, 1562 nt, synthetic construct
  misc_feature 1..1562: note = mRNA a-1 (A100) (opt2) from Homo sapiens__NP_000448.3__HNF4A(39-474)(K300R)
  source 1..1562: mol_type = other RNA
aggagagtcccgcagtcggcgtccagcggctctgcttgttcgtgtgtgtgtcgttgcaggccttattcaagcttaccatggacacctccccctccgagggcaccaacctcaacgcccccaactccctcggcgtctccgccctctgcgccatctgcggcgaccgcgccaccggcaagcactacggcgcctcctcctgcgacggctgcaagggcttcttccgccgctccgtccgcaagaaccacatgtactcctgccgcttctcccgccagtgcgtcgtcgacaaggacaagcgcaaccagtgccgctactgccgcctcaagaagtgcttccgcgccggcatgaagaaggaggccgtccagaacgagcgcgaccgcatctccacccgccgctcctcctacgaggactcctccctcccctccatcaacgccctcctccaggccgaggtcctctcccgccagatcacctcccccgtctccggcatcaacggcgacatccgcgccaagaagatcgcctccatcgccgacgtctgcgagtccatgaaggagcagctcctcgtcctcgtcgagtgggccaagtacatccccgccttctgcgagctccccctcgacgaccaggtcgccctcctccgcgcccacgccggcgagcacctcctcctcggcgccaccaagcgctccatggtcttcaaggacgtcctcctcctcggcaacgactacatcgtcccccgccactgccccgagctcgccgagatgtcccgcgtctccatccgcatcctcgacgagctcgtcctccccttccaggagctccagatcgacgacaacgagtacgcctacctcaaggccatcatcttcttcgaccccgacgcccgcggcctctccgaccccggcaagatcaagcgcctccgctcccaggtccaggtctccctcgaggactacatcaacgaccgccagtacgactcccgcggccgcttcggcgagctcctcctcctcctccccaccctccagtccatcacctggcagatgatcgagcagatccagttcatcaagctcttcggcatggccaagatcgacaacctcctccaggagatgctcctcggcggctccccctccgacgccccccacgcccaccaccccctccacccccacctcatgcaggagcacatgggcaccaacgtcatcgtcgccaacaccatgcccacccacctctccaacggccagatgtgcgagtggccccgcccccgcggccaggccgccacccccgagaccccccagccctccccccccggcggctccggctccgagccctacaagctcctccccggcgccgtcgccaccatcgtcaagcccctctccgccatcccccagcccaccatcaccaagcaggaggtcatctgaggactagtccctgttcccagagcccacttttttttctttttttgaaataaaatagcctgtctttcagatctaaaaaaaaaaaaaaaaaaaaaaaaaaaaaaaaaaaaaaaaaaaaaaaaaaaaaaaaaaaaaaaaaaaaaaaaaaaaaaaaaaaaaaaaaaaaaaaaaaaa

SEQ ID NO: 5238 - RNA, 1562 nt, synthetic construct
  misc_feature 1..1562: note = mRNA a-1 (A100) (opt2) from Homo sapiens__NP_000448.3__HNF4A(39-474)(K300R_K307R_K309R)
  source 1..1562: mol_type = other RNA
aggagagtcccgcagtcggcgtccagcggctctgcttgttcgtgtgtgtgtcgttgcaggccttattcaagcttaccatggacacctccccctccgagggcaccaacctcaacgcccccaactccctcggcgtctccgccctctgcgccatctgcggcgaccgcgccaccggcaagcactacggcgcctcctcctgcgacggctgcaagggcttcttccgccgctccgtccgcaagaaccacatgtactcctgccgcttctcccgccagtgcgtcgtcgacaaggacaagcgcaaccagtgccgctactgccgcctcaagaagtgcttccgcgccggcatgaagaaggaggccgtccagaacgagcgcgaccgcatctccacccgccgctcctcctacgaggactcctccctcccctccatcaacgccctcctccaggccgaggtcctctcccgccagatcacctcccccgtctccggcatcaacggcgacatccgcgccaagaagatcgcctccatcgccgacgtctgcgagtccatgaaggagcagctcctcgtcctcgtcgagtgggccaagtacatccccgccttctgcgagctccccctcgacgaccaggtcgccctcctccgcgcccacgccggcgagcacctcctcctcggcgccaccaagcgctccatggtcttcaaggacgtcctcctcctcggcaacgactacatcgtcccccgccactgccccgagctcgccgagatgtcccgcgtctccatccgcatcctcgacgagctcgtcctccccttccaggagctccagatcgacgacaacgagtacgcctacctcaaggccatcatcttcttcgaccccgacgcccgcggcctctccgaccccggccgcatccgccgcctccgctcccaggtccaggtctccctcgaggactacatcaacgaccgccagtacgactcccgcggccgcttcggcgagctcctcctcctcctccccaccctccagtccatcacctggcagatgatcgagcagatccagttcatcaagctcttcggcatggccaagatcgacaacctcctccaggagatgctcctcggcggctccccctccgacgccccccacgcccaccaccccctccacccccacctcatgcaggagcacatgggcaccaacgtcatcgtcgccaacaccatgcccacccacctctccaacggccagatgtgcgagtggccccgcccccgcggccaggccgccacccccgagaccccccagccctccccccccggcggctccggctccgagccctacaagctcctccccggcgccgtcgccaccatcgtcaagcccctctccgccatcccccagcccaccatcaccaagcaggaggtcatctgaggactagtccctgttcccagagcccacttttttttctttttttgaaataaaatagcctgtctttcagatctaaaaaaaaaaaaaaaaaaaaaaaaaaaaaaaaaaaaaaaaaaaaaaaaaaaaaaaaaaaaaaaaaaaaaaaaaaaaaaaaaaaaaaaaaaaaaaaaaaaa

SEQ ID NO: 5239 - RNA, 1562 nt, synthetic construct
  misc_feature 1..1562: note = mRNA a-1 (A100) (opt2) from Homo sapiens__NP_000448.3__HNF4A(39-474)(K447R_K470R)
  source 1..1562: mol_type = other RNA
aggagagtcccgcagtcggcgtccagcggctctgcttgttcgtgtgtgtgtcgttgcaggccttattcaagcttaccatggacacctccccctccgagggcaccaacctcaacgcccccaactccctcggcgtctccgccctctgcgccatctgcggcgaccgcgccaccggcaagcactacggcgcctcctcctgcgacggctgcaagggcttcttccgccgctccgtccgcaagaaccacatgtactcctgccgcttctcccgccagtgcgtcgtcgacaaggacaagcgcaaccagtgccgctactgccgcctcaagaagtgcttccgcgccggcatgaagaaggaggccgtccagaacgagcgcgaccgcatctccacccgccgctcctcctacgaggactcctccctcccctccatcaacgccctcctccaggccgaggtcctctcccgccagatcacctcccccgtctccggcatcaacggcgacatccgcgccaagaagatcgcctccatcgccgacgtctgcgagtccatgaaggagcagctcctcgtcctcgtcgagtgggccaagtacatccccgccttctgcgagctccccctcgacgaccaggtcgccctcctccgcgcccacgccggcgagcacctcctcctcggcgccaccaagcgctccatggtcttcaaggacgtcctcctcctcggcaacgactacatcgtcccccgccactgccccgagctcgccgagatgtcccgcgtctccatccgcatcctcgacgagctcgtcctccccttccaggagctccagatcgacgacaacgagtacgcctacctcaaggccatcatcttcttcgaccccgacgccaagggcctctccgaccccggcaagatcaagcgcctccgctcccaggtccaggtctccctcgaggactacatcaacgaccgccagtacgactcccgcggccgcttcggcgagctcctcctcctcctccccaccctccagtccatcacctggcagatgatcgagcagatccagttcatcaagctcttcggcatggccaagatcgacaacctcctccaggagatgctcctcggcggctccccctccgacgccccccacgcccaccaccccctccacccccacctcatgcaggagcacatgggcaccaacgtcatcgtcgccaacaccatgcccacccacctctccaacggccagatgtgcgagtggccccgcccccgcggccaggccgccacccccgagaccccccagccctccccccccggcggctccggctccgagccctaccgcctcctccccggcgccgtcgccaccatcgtcaagcccctctccgccatcccccagcccaccatcacccgccaggaggtcatctgaggactagtccctgttcccagagcccacttttttttctttttttgaaataaaatagcctgtctttcagatctaaaaaaaaaaaaaaaaaaaaaaaaaaaaaaaaaaaaaaaaaaaaaaaaaaaaaaaaaaaaaaaaaaaaaaaaaaaaaaaaaaaaaaaaaaaaaaaaaaaa

SEQ ID NO: 5240 - RNA, 1562 nt, synthetic construct
  misc_feature 1..1562: note = mRNA a-1 (A100) (opt2) from Homo sapiens__NP_000448.3__HNF4A(39-474)(K458R)
  source 1..1562: mol_type = other RNA
aggagagtcccgcagtcggcgtccagcggctctgcttgttcgtgtgtgtgtcgttgcaggccttattcaagcttaccatggacacctccccctccgagggcaccaacctcaacgcccccaactccctcggcgtctccgccctctgcgccatctgcggcgaccgcgccaccggcaagcactacggcgcctcctcctgcgacggctgcaagggcttcttccgccgctccgtccgcaagaaccacatgtactcctgccgcttctcccgccagtgcgtcgtcgacaaggacaagcgcaaccagtgccgctactgccgcctcaagaagtgcttccgcgccggcatgaagaaggaggccgtccagaacgagcgcgaccgcatctccacccgccgctcctcctacgaggactcctccctcccctccatcaacgccctcctccaggccgaggtcctctcccgccagatcacctcccccgtctccggcatcaacggcgacatccgcgccaagaagatcgcctccatcgccgacgtctgcgagtccatgaaggagcagctcctcgtcctcgtcgagtgggccaagtacatccccgccttctgcgagctccccctcgacgaccaggtcgccctcctccgcgcccacgccggcgagcacctcctcctcggcgccaccaagcgctccatggtcttcaaggacgtcctcctcctcggcaacgactacatcgtcccccgccactgccccgagctcgccgagatgtcccgcgtctccatccgcatcctcgacgagctcgtcctccccttccaggagctccagatcgacgacaacgagtacgcctacctcaaggccatcatcttcttcgaccccgacgccaagggcctctccgaccccggcaagatcaagcgcctccgctcccaggtccaggtctccctcgaggactacatcaacgaccgccagtacgactcccgcggccgcttcggcgagctcctcctcctcctccccaccctccagtccatcacctggcagatgatcgagcagatccagttcatcaagctcttcggcatggccaagatcgacaacctcctccaggagatgctcctcggcggctccccctccgacgccccccacgcccaccaccccctccacccccacctcatgcaggagcacatgggcaccaacgtcatcgtcgccaacaccatgcccacccacctctccaacggccagatgtgcgagtggccccgcccccgcggccaggccgccacccccgagaccccccagccctccccccccggcggctccggctccgagccctacaagctcctccccggcgccgtcgccaccatcgtccgccccctctccgccatcccccagcccaccatcaccaagcaggaggtcatctgaggactagtccctgttcccagagcccacttttttttctttttttgaaataaaatagcctgtctttcagatctaaaaaaaaaaaaaaaaaaaaaaaaaaaaaaaaaaaaaaaaaaaaaaaaaaaaaaaaaaaaaaaaaaaaaaaaaaaaaaaaaaaaaaaaaaaaaaaaaaaa

SEQ ID NO: 5241 - RNA, 1562 nt, synthetic construct
  misc_feature 1..1562: note = mRNA a-1 (A100) (opt2) from Homo sapiens__NP_000448.3__HNF4A(39-474)(K106R_K108R_K126R_K127R )
  source 1..1562: mol_type = other RNA
aggagagtcccgcagtcggcgtccagcggctctgcttgttcgtgtgtgtgtcgttgcaggccttattcaagcttaccatggacacctccccctccgagggcaccaacctcaacgcccccaactccctcggcgtctccgccctctgcgccatctgcggcgaccgcgccaccggcaagcactacggcgcctcctcctgcgacggctgcaagggcttcttccgccgctccgtccgcaagaaccacatgtactcctgccgcttctcccgccagtgcgtcgtcgaccgcgaccgccgcaaccagtgccgctactgccgcctcaagaagtgcttccgcgccggcatgcgccgcgaggccgtccagaacgagcgcgaccgcatctccacccgccgctcctcctacgaggactcctccctcccctccatcaacgccctcctccaggccgaggtcctctcccgccagatcacctcccccgtctccggcatcaacggcgacatccgcgccaagaagatcgcctccatcgccgacgtctgcgagtccatgaaggagcagctcctcgtcctcgtcgagtgggccaagtacatccccgccttctgcgagctccccctcgacgaccaggtcgccctcctccgcgcccacgccggcgagcacctcctcctcggcgccaccaagcgctccatggtcttcaaggacgtcctcctcctcggcaacgactacatcgtcccccgccactgccccgagctcgccgagatgtcccgcgtctccatccgcatcctcgacgagctcgtcctccccttccaggagctccagatcgacgacaacgagtacgcctacctcaaggccatcatcttcttcgaccccgacgccaagggcctctccgaccccggcaagatcaagcgcctccgctcccaggtccaggtctccctcgaggactacatcaacgaccgccagtacgactcccgcggccgcttcggcgagctcctcctcctcctccccaccctccagtccatcacctggcagatgatcgagcagatccagttcatcaagctcttcggcatggccaagatcgacaacctcctccaggagatgctcctcggcggctccccctccgacgccccccacgcccaccaccccctccacccccacctcatgcaggagcacatgggcaccaacgtcatcgtcgccaacaccatgcccacccacctctccaacggccagatgtgcgagtggccccgcccccgcggccaggccgccacccccgagaccccccagccctccccccccggcggctccggctccgagccctacaagctcctccccggcgccgtcgccaccatcgtcaagcccctctccgccatcccccagcccaccatcaccaagcaggaggtcatctgaggactagtccctgttcccagagcccacttttttttctttttttgaaataaaatagcctgtctttcagatctaaaaaaaaaaaaaaaaaaaaaaaaaaaaaaaaaaaaaaaaaaaaaaaaaaaaaaaaaaaaaaaaaaaaaaaaaaaaaaaaaaaaaaaaaaaaaaaaaaaa

SEQ ID NO: 5242 - RNA, 1562 nt, synthetic construct
  misc_feature 1..1562: note = mRNA a-1 (A100) (opt2) from Homo sapiens__NP_000448.3__HNF4A(39-474)(E285Q)
  source 1..1562: mol_type = other RNA
aggagagtcccgcagtcggcgtccagcggctctgcttgttcgtgtgtgtgtcgttgcaggccttattcaagcttaccatggacacctccccctccgagggcaccaacctcaacgcccccaactccctcggcgtctccgccctctgcgccatctgcggcgaccgcgccaccggcaagcactacggcgcctcctcctgcgacggctgcaagggcttcttccgccgctccgtccgcaagaaccacatgtactcctgccgcttctcccgccagtgcgtcgtcgacaaggacaagcgcaaccagtgccgctactgccgcctcaagaagtgcttccgcgccggcatgaagaaggaggccgtccagaacgagcgcgaccgcatctccacccgccgctcctcctacgaggactcctccctcccctccatcaacgccctcctccaggccgaggtcctctcccgccagatcacctcccccgtctccggcatcaacggcgacatccgcgccaagaagatcgcctccatcgccgacgtctgcgagtccatgaaggagcagctcctcgtcctcgtcgagtgggccaagtacatccccgccttctgcgagctccccctcgacgaccaggtcgccctcctccgcgcccacgccggcgagcacctcctcctcggcgccaccaagcgctccatggtcttcaaggacgtcctcctcctcggcaacgactacatcgtcccccgccactgccccgagctcgccgagatgtcccgcgtctccatccgcatcctcgacgagctcgtcctccccttccaggagctccagatcgacgacaaccagtacgcctacctcaaggccatcatcttcttcgaccccgacgccaagggcctctccgaccccggcaagatcaagcgcctccgctcccaggtccaggtctccctcgaggactacatcaacgaccgccagtacgactcccgcggccgcttcggcgagctcctcctcctcctccccaccctccagtccatcacctggcagatgatcgagcagatccagttcatcaagctcttcggcatggccaagatcgacaacctcctccaggagatgctcctcggcggctccccctccgacgccccccacgcccaccaccccctccacccccacctcatgcaggagcacatgggcaccaacgtcatcgtcgccaacaccatgcccacccacctctccaacggccagatgtgcgagtggccccgcccccgcggccaggccgccacccccgagaccccccagccctccccccccggcggctccggctccgagccctacaagctcctccccggcgccgtcgccaccatcgtcaagcccctctccgccatcccccagcccaccatcaccaagcaggaggtcatctgaggactagtccctgttcccagagcccacttttttttctttttttgaaataaaatagcctgtctttcagatctaaaaaaaaaaaaaaaaaaaaaaaaaaaaaaaaaaaaaaaaaaaaaaaaaaaaaaaaaaaaaaaaaaaaaaaaaaaaaaaaaaaaaaaaaaaaaaaaaaaa

SEQ ID NO: 5243 - RNA, 1562 nt, synthetic construct
  misc_feature 1..1562: note = mRNA a-1 (A100) (opt2) from Homo sapiens__NP_000448.3__HNF4A(39-474)(T166E)
  source 1..1562: mol_type = other RNA
aggagagtcccgcagtcggcgtccagcggctctgcttgttcgtgtgtgtgtcgttgcaggccttattcaagcttaccatggacacctccccctccgagggcaccaacctcaacgcccccaactccctcggcgtctccgccctctgcgccatctgcggcgaccgcgccaccggcaagcactacggcgcctcctcctgcgacggctgcaagggcttcttccgccgctccgtccgcaagaaccacatgtactcctgccgcttctcccgccagtgcgtcgtcgacaaggacaagcgcaaccagtgccgctactgccgcctcaagaagtgcttccgcgccggcatgaagaaggaggccgtccagaacgagcgcgaccgcatctccacccgccgctcctcctacgaggactcctccctcccctccatcaacgccctcctccaggccgaggtcctctcccgccagatcgagtcccccgtctccggcatcaacggcgacatccgcgccaagaagatcgcctccatcgccgacgtctgcgagtccatgaaggagcagctcctcgtcctcgtcgagtgggccaagtacatccccgccttctgcgagctccccctcgacgaccaggtcgccctcctccgcgcccacgccggcgagcacctcctcctcggcgccaccaagcgctccatggtcttcaaggacgtcctcctcctcggcaacgactacatcgtcccccgccactgccccgagctcgccgagatgtcccgcgtctccatccgcatcctcgacgagctcgtcctccccttccaggagctccagatcgacgacaacgagtacgcctacctcaaggccatcatcttcttcgaccccgacgccaagggcctctccgaccccggcaagatcaagcgcctccgctcccaggtccaggtctccctcgaggactacatcaacgaccgccagtacgactcccgcggccgcttcggcgagctcctcctcctcctccccaccctccagtccatcacctggcagatgatcgagcagatccagttcatcaagctcttcggcatggccaagatcgacaacctcctccaggagatgctcctcggcggctccccctccgacgccccccacgcccaccaccccctccacccccacctcatgcaggagcacatgggcaccaacgtcatcgtcgccaacaccatgcccacccacctctccaacggccagatgtgcgagtggccccgcccccgcggccaggccgccacccccgagaccccccagccctccccccccggcggctccggctccgagccctacaagctcctccccggcgccgtcgccaccatcgtcaagcccctctccgccatcccccagcccaccatcaccaagcaggaggtcatctgaggactagtccctgttcccagagcccacttttttttctttttttgaaataaaatagcctgtctttcagatctaaaaaaaaaaaaaaaaaaaaaaaaaaaaaaaaaaaaaaaaaaaaaaaaaaaaaaaaaaaaaaaaaaaaaaaaaaaaaaaaaaaaaaaaaaaaaaaaaaaa

SEQ ID NO: 5244 - RNA, 1562 nt, synthetic construct
  misc_feature 1..1562: note = mRNA a-1 (A100) (opt2) from Homo sapiens__NP_000448.3__HNF4A(39-474)(S148A)
  source 1..1562: mol_type = other RNA
aggagagtcccgcagtcggcgtccagcggctctgcttgttcgtgtgtgtgtcgttgcaggccttattcaagcttaccatggacacctccccctccgagggcaccaacctcaacgcccccaactccctcggcgtctccgccctctgcgccatctgcggcgaccgcgccaccggcaagcactacggcgcctcctcctgcgacggctgcaagggcttcttccgccgctccgtccgcaagaaccacatgtactcctgccgcttctcccgccagtgcgtcgtcgacaaggacaagcgcaaccagtgccgctactgccgcctcaagaagtgcttccgcgccggcatgaagaaggaggccgtccagaacgagcgcgaccgcatctccacccgccgctcctcctacgaggactccgccctcccctccatcaacgccctcctccaggccgaggtcctctcccgccagatcacctcccccgtctccggcatcaacggcgacatccgcgccaagaagatcgcctccatcgccgacgtctgcgagtccatgaaggagcagctcctcgtcctcgtcgagtgggccaagtacatccccgccttctgcgagctccccctcgacgaccaggtcgccctcctccgcgcccacgccggcgagcacctcctcctcggcgccaccaagcgctccatggtcttcaaggacgtcctcctcctcggcaacgactacatcgtcccccgccactgccccgagctcgccgagatgtcccgcgtctccatccgcatcctcgacgagctcgtcctccccttccaggagctccagatcgacgacaacgagtacgcctacctcaaggccatcatcttcttcgaccccgacgccaagggcctctccgaccccggcaagatcaagcgcctccgctcccaggtccaggtctccctcgaggactacatcaacgaccgccagtacgactcccgcggccgcttcggcgagctcctcctcctcctccccaccctccagtccatcacctggcagatgatcgagcagatccagttcatcaagctcttcggcatggccaagatcgacaacctcctccaggagatgctcctcggcggctccccctccgacgccccccacgcccaccaccccctccacccccacctcatgcaggagcacatgggcaccaacgtcatcgtcgccaacaccatgcccacccacctctccaacggccagatgtgcgagtggccccgcccccgcggccaggccgccacccccgagaccccccagccctccccccccggcggctccggctccgagccctacaagctcctccccggcgccgtcgccaccatcgtcaagcccctctccgccatcccccagcccaccatcaccaagcaggaggtcatctgaggactagtccctgttcccagagcccacttttttttctttttttgaaataaaatagcctgtctttcagatctaaaaaaaaaaaaaaaaaaaaaaaaaaaaaaaaaaaaaaaaaaaaaaaaaaaaaaaaaaaaaaaaaaaaaaaaaaaaaaaaaaaaaaaaaaaaaaaaaaaa

SEQ ID NO: 5245 - RNA, 1562 nt, synthetic construct
  misc_feature 1..1562: note = mRNA a-1 (A100) (opt2) from Homo sapiens__NP_000448.3__HNF4A(39-474)(S148E)
  source 1..1562: mol_type = other RNA
aggagagtcccgcagtcggcgtccagcggctctgcttgttcgtgtgtgtgtcgttgcaggccttattcaagcttaccatggacacctccccctccgagggcaccaacctcaacgcccccaactccctcggcgtctccgccctctgcgccatctgcggcgaccgcgccaccggcaagcactacggcgcctcctcctgcgacggctgcaagggcttcttccgccgctccgtccgcaagaaccacatgtactcctgccgcttctcccgccagtgcgtcgtcgacaaggacaagcgcaaccagtgccgctactgccgcctcaagaagtgcttccgcgccggcatgaagaaggaggccgtccagaacgagcgcgaccgcatctccacccgccgctcctcctacgaggactccgagctcccctccatcaacgccctcctccaggccgaggtcctctcccgccagatcacctcccccgtctccggcatcaacggcgacatccgcgccaagaagatcgcctccatcgccgacgtctgcgagtccatgaaggagcagctcctcgtcctcgtcgagtgggccaagtacatccccgccttctgcgagctccccctcgacgaccaggtcgccctcctccgcgcccacgccggcgagcacctcctcctcggcgccaccaagcgctccatggtcttcaaggacgtcctcctcctcggcaacgactacatcgtcccccgccactgccccgagctcgccgagatgtcccgcgtctccatccgcatcctcgacgagctcgtcctccccttccaggagctccagatcgacgacaacgagtacgcctacctcaaggccatcatcttcttcgaccccgacgccaagggcctctccgaccccggcaagatcaagcgcctccgctcccaggtccaggtctccctcgaggactacatcaacgaccgccagtacgactcccgcggccgcttcggcgagctcctcctcctcctccccaccctccagtccatcacctggcagatgatcgagcagatccagttcatcaagctcttcggcatggccaagatcgacaacctcctccaggagatgctcctcggcggctccccctccgacgccccccacgcccaccaccccctccacccccacctcatgcaggagcacatgggcaccaacgtcatcgtcgccaacaccatgcccacccacctctccaacggccagatgtgcgagtggccccgcccccgcggccaggccgccacccccgagaccccccagccctccccccccggcggctccggctccgagccctacaagctcctccccggcgccgtcgccaccatcgtcaagcccctctccgccatcccccagcccaccatcaccaagcaggaggtcatctgaggactagtccctgttcccagagcccacttttttttctttttttgaaataaaatagcctgtctttcagatctaaaaaaaaaaaaaaaaaaaaaaaaaaaaaaaaaaaaaaaaaaaaaaaaaaaaaaaaaaaaaaaaaaaaaaaaaaaaaaaaaaaaaaaaaaaaaaaaaaaa

SEQ ID NO: 5246 - RNA, 1562 nt, synthetic construct
  misc_feature 1..1562: note = mRNA a-1 (A100) (opt2) from Homo sapiens__NP_000448.3__HNF4A(39-474)(S183A)
  source 1..1562: mol_type = other RNA
aggagagtcccgcagtcggcgtccagcggctctgcttgttcgtgtgtgtgtcgttgcaggccttattcaagcttaccatggacacctccccctccgagggcaccaacctcaacgcccccaactccctcggcgtctccgccctctgcgccatctgcggcgaccgcgccaccggcaagcactacggcgcctcctcctgcgacggctgcaagggcttcttccgccgctccgtccgcaagaaccacatgtactcctgccgcttctcccgccagtgcgtcgtcgacaaggacaagcgcaaccagtgccgctactgccgcctcaagaagtgcttccgcgccggcatgaagaaggaggccgtccagaacgagcgcgaccgcatctccacccgccgctcctcctacgaggactcctccctcccctccatcaacgccctcctccaggccgaggtcctctcccgccagatcacctcccccgtctccggcatcaacggcgacatccgcgccaagaagatcgccgccatcgccgacgtctgcgagtccatgaaggagcagctcctcgtcctcgtcgagtgggccaagtacatccccgccttctgcgagctccccctcgacgaccaggtcgccctcctccgcgcccacgccggcgagcacctcctcctcggcgccaccaagcgctccatggtcttcaaggacgtcctcctcctcggcaacgactacatcgtcccccgccactgccccgagctcgccgagatgtcccgcgtctccatccgcatcctcgacgagctcgtcctccccttccaggagctccagatcgacgacaacgagtacgcctacctcaaggccatcatcttcttcgaccccgacgccaagggcctctccgaccccggcaagatcaagcgcctccgctcccaggtccaggtctccctcgaggactacatcaacgaccgccagtacgactcccgcggccgcttcggcgagctcctcctcctcctccccaccctccagtccatcacctggcagatgatcgagcagatccagttcatcaagctcttcggcatggccaagatcgacaacctcctccaggagatgctcctcggcggctccccctccgacgccccccacgcccaccaccccctccacccccacctcatgcaggagcacatgggcaccaacgtcatcgtcgccaacaccatgcccacccacctctccaacggccagatgtgcgagtggccccgcccccgcggccaggccgccacccccgagaccccccagccctccccccccggcggctccggctccgagccctacaagctcctccccggcgccgtcgccaccatcgtcaagcccctctccgccatcccccagcccaccatcaccaagcaggaggtcatctgaggactagtccctgttcccagagcccacttttttttctttttttgaaataaaatagcctgtctttcagatctaaaaaaaaaaaaaaaaaaaaaaaaaaaaaaaaaaaaaaaaaaaaaaaaaaaaaaaaaaaaaaaaaaaaaaaaaaaaaaaaaaaaaaaaaaaaaaaaaaaa

SEQ ID NO: 5247 - RNA, 1562 nt, synthetic construct
  misc_feature 1..1562: note = mRNA a-1 (A100) (opt2) from Homo sapiens__NP_000448.3__HNF4A(39-474)(S183E)
  source 1..1562: mol_type = other RNA
aggagagtcccgcagtcggcgtccagcggctctgcttgttcgtgtgtgtgtcgttgcaggccttattcaagcttaccatggacacctccccctccgagggcaccaacctcaacgcccccaactccctcggcgtctccgccctctgcgccatctgcggcgaccgcgccaccggcaagcactacggcgcctcctcctgcgacggctgcaagggcttcttccgccgctccgtccgcaagaaccacatgtactcctgccgcttctcccgccagtgcgtcgtcgacaaggacaagcgcaaccagtgccgctactgccgcctcaagaagtgcttccgcgccggcatgaagaaggaggccgtccagaacgagcgcgaccgcatctccacccgccgctcctcctacgaggactcctccctcccctccatcaacgccctcctccaggccgaggtcctctcccgccagatcacctcccccgtctccggcatcaacggcgacatccgcgccaagaagatcgccgagatcgccgacgtctgcgagtccatgaaggagcagctcctcgtcctcgtcgagtgggccaagtacatccccgccttctgcgagctccccctcgacgaccaggtcgccctcctccgcgcccacgccggcgagcacctcctcctcggcgccaccaagcgctccatggtcttcaaggacgtcctcctcctcggcaacgactacatcgtcccccgccactgccccgagctcgccgagatgtcccgcgtctccatccgcatcctcgacgagctcgtcctccccttccaggagctccagatcgacgacaacgagtacgcctacctcaaggccatcatcttcttcgaccccgacgccaagggcctctccgaccccggcaagatcaagcgcctccgctcccaggtccaggtctccctcgaggactacatcaacgaccgccagtacgactcccgcggccgcttcggcgagctcctcctcctcctccccaccctccagtccatcacctggcagatgatcgagcagatccagttcatcaagctcttcggcatggccaagatcgacaacctcctccaggagatgctcctcggcggctccccctccgacgccccccacgcccaccaccccctccacccccacctcatgcaggagcacatgggcaccaacgtcatcgtcgccaacaccatgcccacccacctctccaacggccagatgtgcgagtggccccgcccccgcggccaggccgccacccccgagaccccccagccctccccccccggcggctccggctccgagccctacaagctcctccccggcgccgtcgccaccatcgtcaagcccctctccgccatcccccagcccaccatcaccaagcaggaggtcatctgaggactagtccctgttcccagagcccacttttttttctttttttgaaataaaatagcctgtctttcagatctaaaaaaaaaaaaaaaaaaaaaaaaaaaaaaaaaaaaaaaaaaaaaaaaaaaaaaaaaaaaaaaaaaaaaaaaaaaaaaaaaaaaaaaaaaaaaaaaaaaa

SEQ ID NO: 5248 - RNA, 1562 nt, synthetic construct
  misc_feature 1..1562: note = mRNA a-1 (A100) (opt2) from Homo sapiens__NP_000448.3__HNF4A(39-474)(S461A)
  source 1..1562: mol_type = other RNA
aggagagtcccgcagtcggcgtccagcggctctgcttgttcgtgtgtgtgtcgttgcaggccttattcaagcttaccatggacacctccccctccgagggcaccaacctcaacgcccccaactccctcggcgtctccgccctctgcgccatctgcggcgaccgcgccaccggcaagcactacggcgcctcctcctgcgacggctgcaagggcttcttccgccgctccgtccgcaagaaccacatgtactcctgccgcttctcccgccagtgcgtcgtcgacaaggacaagcgcaaccagtgccgctactgccgcctcaagaagtgcttccgcgccggcatgaagaaggaggccgtccagaacgagcgcgaccgcatctccacccgccgctcctcctacgaggactcctccctcccctccatcaacgccctcctccaggccgaggtcctctcccgccagatcacctcccccgtctccggcatcaacggcgacatccgcgccaagaagatcgcctccatcgccgacgtctgcgagtccatgaaggagcagctcctcgtcctcgtcgagtgggccaagtacatccccgccttctgcgagctccccctcgacgaccaggtcgccctcctccgcgcccacgccggcgagcacctcctcctcggcgccaccaagcgctccatggtcttcaaggacgtcctcctcctcggcaacgactacatcgtcccccgccactgccccgagctcgccgagatgtcccgcgtctccatccgcatcctcgacgagctcgtcctccccttccaggagctccagatcgacgacaacgagtacgcctacctcaaggccatcatcttcttcgaccccgacgccaagggcctctccgaccccggcaagatcaagcgcctccgctcccaggtccaggtctccctcgaggactacatcaacgaccgccagtacgactcccgcggccgcttcggcgagctcctcctcctcctccccaccctccagtccatcacctggcagatgatcgagcagatccagttcatcaagctcttcggcatggccaagatcgacaacctcctccaggagatgctcctcggcggctccccctccgacgccccccacgcccaccaccccctccacccccacctcatgcaggagcacatgggcaccaacgtcatcgtcgccaacaccatgcccacccacctctccaacggccagatgtgcgagtggccccgcccccgcggccaggccgccacccccgagaccccccagccctccccccccggcggctccggctccgagccctacaagctcctccccggcgccgtcgccaccatcgtcaagcccctcgccgccatcccccagcccaccatcaccaagcaggaggtcatctgaggactagtccctgttcccagagcccacttttttttctttttttgaaataaaatagcctgtctttcagatctaaaaaaaaaaaaaaaaaaaaaaaaaaaaaaaaaaaaaaaaaaaaaaaaaaaaaaaaaaaaaaaaaaaaaaaaaaaaaaaaaaaaaaaaaaaaaaaaaaaa

SEQ ID NO: 5249 - RNA, 1562 nt, synthetic construct
  misc_feature 1..1562: note = mRNA a-1 (A100) (opt2) from Homo sapiens__NP_000448.3__HNF4A(39-474)(S461E)
  source 1..1562: mol_type = other RNA
aggagagtcccgcagtcggcgtccagcggctctgcttgttcgtgtgtgtgtcgttgcaggccttattcaagcttaccatggacacctccccctccgagggcaccaacctcaacgcccccaactccctcggcgtctccgccctctgcgccatctgcggcgaccgcgccaccggcaagcactacggcgcctcctcctgcgacggctgcaagggcttcttccgccgctccgtccgcaagaaccacatgtactcctgccgcttctcccgccagtgcgtcgtcgacaaggacaagcgcaaccagtgccgctactgccgcctcaagaagtgcttccgcgccggcatgaagaaggaggccgtccagaacgagcgcgaccgcatctccacccgccgctcctcctacgaggactcctccctcccctccatcaacgccctcctccaggccgaggtcctctcccgccagatcacctcccccgtctccggcatcaacggcgacatccgcgccaagaagatcgcctccatcgccgacgtctgcgagtccatgaaggagcagctcctcgtcctcgtcgagtgggccaagtacatccccgccttctgcgagctccccctcgacgaccaggtcgccctcctccgcgcccacgccggcgagcacctcctcctcggcgccaccaagcgctccatggtcttcaaggacgtcctcctcctcggcaacgactacatcgtcccccgccactgccccgagctcgccgagatgtcccgcgtctccatccgcatcctcgacgagctcgtcctccccttccaggagctccagatcgacgacaacgagtacgcctacctcaaggccatcatcttcttcgaccccgacgccaagggcctctccgaccccggcaagatcaagcgcctccgctcccaggtccaggtctccctcgaggactacatcaacgaccgccagtacgactcccgcggccgcttcggcgagctcctcctcctcctccccaccctccagtccatcacctggcagatgatcgagcagatccagttcatcaagctcttcggcatggccaagatcgacaacctcctccaggagatgctcctcggcggctccccctccgacgccccccacgcccaccaccccctccacccccacctcatgcaggagcacatgggcaccaacgtcatcgtcgccaacaccatgcccacccacctctccaacggccagatgtgcgagtggccccgcccccgcggccaggccgccacccccgagaccccccagccctccccccccggcggctccggctccgagccctacaagctcctccccggcgccgtcgccaccatcgtcaagcccctcgaggccatcccccagcccaccatcaccaagcaggaggtcatctgaggactagtccctgttcccagagcccacttttttttctttttttgaaataaaatagcctgtctttcagatctaaaaaaaaaaaaaaaaaaaaaaaaaaaaaaaaaaaaaaaaaaaaaaaaaaaaaaaaaaaaaaaaaaaaaaaaaaaaaaaaaaaaaaaaaaaaaaaaaaaa

SEQ ID NO: 5250 - RNA, 1562 nt, synthetic construct
  misc_feature 1..1562: note = mRNA a-1 (A100) (opt2) from Homo sapiens__NP_000448.3__HNF4A(39-474)(S142A_S143A_S313A)
  source 1..1562: mol_type = other RNA
aggagagtcccgcagtcggcgtccagcggctctgcttgttcgtgtgtgtgtcgttgcaggccttattcaagcttaccatggacacctccccctccgagggcaccaacctcaacgcccccaactccctcggcgtctccgccctctgcgccatctgcggcgaccgcgccaccggcaagcactacggcgcctcctcctgcgacggctgcaagggcttcttccgccgctccgtccgcaagaaccacatgtactcctgccgcttctcccgccagtgcgtcgtcgacaaggacaagcgcaaccagtgccgctactgccgcctcaagaagtgcttccgcgccggcatgaagaaggaggccgtccagaacgagcgcgaccgcatctccacccgccgcgccgcctacgaggactcctccctcccctccatcaacgccctcctccaggccgaggtcctctcccgccagatcacctcccccgtctccggcatcaacggcgacatccgcgccaagaagatcgcctccatcgccgacgtctgcgagtccatgaaggagcagctcctcgtcctcgtcgagtgggccaagtacatccccgccttctgcgagctccccctcgacgaccaggtcgccctcctccgcgcccacgccggcgagcacctcctcctcggcgccaccaagcgctccatggtcttcaaggacgtcctcctcctcggcaacgactacatcgtcccccgccactgccccgagctcgccgagatgtcccgcgtctccatccgcatcctcgacgagctcgtcctccccttccaggagctccagatcgacgacaacgagtacgcctacctcaaggccatcatcttcttcgaccccgacgccaagggcctctccgaccccggcaagatcaagcgcctccgcgcccaggtccaggtctccctcgaggactacatcaacgaccgccagtacgactcccgcggccgcttcggcgagctcctcctcctcctccccaccctccagtccatcacctggcagatgatcgagcagatccagttcatcaagctcttcggcatggccaagatcgacaacctcctccaggagatgctcctcggcggctccccctccgacgccccccacgcccaccaccccctccacccccacctcatgcaggagcacatgggcaccaacgtcatcgtcgccaacaccatgcccacccacctctccaacggccagatgtgcgagtggccccgcccccgcggccaggccgccacccccgagaccccccagccctccccccccggcggctccggctccgagccctacaagctcctccccggcgccgtcgccaccatcgtcaagcccctctccgccatcccccagcccaccatcaccaagcaggaggtcatctgaggactagtccctgttcccagagcccacttttttttctttttttgaaataaaatagcctgtctttcagatctaaaaaaaaaaaaaaaaaaaaaaaaaaaaaaaaaaaaaaaaaaaaaaaaaaaaaaaaaaaaaaaaaaaaaaaaaaaaaaaaaaaaaaaaaaaaaaaaaaaa

SEQ ID NO: 5251 - RNA, 1562 nt, synthetic construct
  misc_feature 1..1562: note = mRNA a-1 (A100) (opt2) from Homo sapiens__NP_000448.3__HNF4A(39-474)(S142A_S143A_S313A_K458R )
  source 1..1562: mol_type = other RNA
aggagagtcccgcagtcggcgtccagcggctctgcttgttcgtgtgtgtgtcgttgcaggccttattcaagcttaccatggacacctccccctccgagggcaccaacctcaacgcccccaactccctcggcgtctccgccctctgcgccatctgcggcgaccgcgccaccggcaagcactacggcgcctcctcctgcgacggctgcaagggcttcttccgccgctccgtccgcaagaaccacatgtactcctgccgcttctcccgccagtgcgtcgtcgacaaggacaagcgcaaccagtgccgctactgccgcctcaagaagtgcttccgcgccggcatgaagaaggaggccgtccagaacgagcgcgaccgcatctccacccgccgcgccgcctacgaggactcctccctcccctccatcaacgccctcctccaggccgaggtcctctcccgccagatcacctcccccgtctccggcatcaacggcgacatccgcgccaagaagatcgcctccatcgccgacgtctgcgagtccatgaaggagcagctcctcgtcctcgtcgagtgggccaagtacatccccgccttctgcgagctccccctcgacgaccaggtcgccctcctccgcgcccacgccggcgagcacctcctcctcggcgccaccaagcgctccatggtcttcaaggacgtcctcctcctcggcaacgactacatcgtcccccgccactgccccgagctcgccgagatgtcccgcgtctccatccgcatcctcgacgagctcgtcctccccttccaggagctccagatcgacgacaacgagtacgcctacctcaaggccatcatcttcttcgaccccgacgccaagggcctctccgaccccggcaagatcaagcgcctccgcgcccaggtccaggtctccctcgaggactacatcaacgaccgccagtacgactcccgcggccgcttcggcgagctcctcctcctcctccccaccctccagtccatcacctggcagatgatcgagcagatccagttcatcaagctcttcggcatggccaagatcgacaacctcctccaggagatgctcctcggcggctccccctccgacgccccccacgcccaccaccccctccacccccacctcatgcaggagcacatgggcaccaacgtcatcgtcgccaacaccatgcccacccacctctccaacggccagatgtgcgagtggccccgcccccgcggccaggccgccacccccgagaccccccagccctccccccccggcggctccggctccgagccctacaagctcctccccggcgccgtcgccaccatcgtccgccccctctccgccatcccccagcccaccatcaccaagcaggaggtcatctgaggactagtccctgttcccagagcccacttttttttctttttttgaaataaaatagcctgtctttcagatctaaaaaaaaaaaaaaaaaaaaaaaaaaaaaaaaaaaaaaaaaaaaaaaaaaaaaaaaaaaaaaaaaaaaaaaaaaaaaaaaaaaaaaaaaaaaaaaaaaaa

SEQ ID NO: 5252 - RNA, 1562 nt, synthetic construct
  misc_feature 1..1562: note = mRNA a-1 (A100) (opt2) from Homo sapiens__NP_000448.3__HNF4A(39-474)(S142A_S143A_S167A_S313A _S378A_T429A_T432A_S436A_K458R)
  source 1..1562: mol_type = other RNA
aggagagtcccgcagtcggcgtccagcggctctgcttgttcgtgtgtgtgtcgttgcaggccttattcaagcttaccatggacacctccccctccgagggcaccaacctcaacgcccccaactccctcggcgtctccgccctctgcgccatctgcggcgaccgcgccaccggcaagcactacggcgcctcctcctgcgacggctgcaagggcttcttccgccgctccgtccgcaagaaccacatgtactcctgccgcttctcccgccagtgcgtcgtcgacaaggacaagcgcaaccagtgccgctactgccgcctcaagaagtgcttccgcgccggcatgaagaaggaggccgtccagaacgagcgcgaccgcatctccacccgccgcgccgcctacgaggactcctccctcccctccatcaacgccctcctccaggccgaggtcctctcccgccagatcaccgcccccgtctccggcatcaacggcgacatccgcgccaagaagatcgcctccatcgccgacgtctgcgagtccatgaaggagcagctcctcgtcctcgtcgagtgggccaagtacatccccgccttctgcgagctccccctcgacgaccaggtcgccctcctccgcgcccacgccggcgagcacctcctcctcggcgccaccaagcgctccatggtcttcaaggacgtcctcctcctcggcaacgactacatcgtcccccgccactgccccgagctcgccgagatgtcccgcgtctccatccgcatcctcgacgagctcgtcctccccttccaggagctccagatcgacgacaacgagtacgcctacctcaaggccatcatcttcttcgaccccgacgccaagggcctctccgaccccggcaagatcaagcgcctccgcgcccaggtccaggtctccctcgaggactacatcaacgaccgccagtacgactcccgcggccgcttcggcgagctcctcctcctcctccccaccctccagtccatcacctggcagatgatcgagcagatccagttcatcaagctcttcggcatggccaagatcgacaacctcctccaggagatgctcctcggcggcgccccctccgacgccccccacgcccaccaccccctccacccccacctcatgcaggagcacatgggcaccaacgtcatcgtcgccaacaccatgcccacccacctctccaacggccagatgtgcgagtggccccgcccccgcggccaggccgccgcccccgaggccccccagcccgccccccccggcggctccggctccgagccctacaagctcctccccggcgccgtcgccaccatcgtccgccccctctccgccatcccccagcccaccatcaccaagcaggaggtcatctgaggactagtccctgttcccagagcccacttttttttctttttttgaaataaaatagcctgtctttcagatctaaaaaaaaaaaaaaaaaaaaaaaaaaaaaaaaaaaaaaaaaaaaaaaaaaaaaaaaaaaaaaaaaaaaaaaaaaaaaaaaaaaaaaaaaaaaaaaaaaaa

SEQ ID NO: 5253 - RNA, 1562 nt, synthetic construct
  misc_feature 1..1562: note = mRNA a-1 (A100) (opt2) from Homo sapiens__NP_000448.3__HNF4A(39-474)(S142A_S143A_S148A_S167A _S313A_S378A_T429A_T432A_S436A_K458R)
  source 1..1562: mol_type = other RNA
aggagagtcccgcagtcggcgtccagcggctctgcttgttcgtgtgtgtgtcgttgcaggccttattcaagcttaccatggacacctccccctccgagggcaccaacctcaacgcccccaactccctcggcgtctccgccctctgcgccatctgcggcgaccgcgccaccggcaagcactacggcgcctcctcctgcgacggctgcaagggcttcttccgccgctccgtccgcaagaaccacatgtactcctgccgcttctcccgccagtgcgtcgtcgacaaggacaagcgcaaccagtgccgctactgccgcctcaagaagtgcttccgcgccggcatgaagaaggaggccgtccagaacgagcgcgaccgcatctccacccgccgcgccgcctacgaggactccgccctcccctccatcaacgccctcctccaggccgaggtcctctcccgccagatcaccgcccccgtctccggcatcaacggcgacatccgcgccaagaagatcgcctccatcgccgacgtctgcgagtccatgaaggagcagctcctcgtcctcgtcgagtgggccaagtacatccccgccttctgcgagctccccctcgacgaccaggtcgccctcctccgcgcccacgccggcgagcacctcctcctcggcgccaccaagcgctccatggtcttcaaggacgtcctcctcctcggcaacgactacatcgtcccccgccactgccccgagctcgccgagatgtcccgcgtctccatccgcatcctcgacgagctcgtcctccccttccaggagctccagatcgacgacaacgagtacgcctacctcaaggccatcatcttcttcgaccccgacgccaagggcctctccgaccccggcaagatcaagcgcctccgcgcccaggtccaggtctccctcgaggactacatcaacgaccgccagtacgactcccgcggccgcttcggcgagctcctcctcctcctccccaccctccagtccatcacctggcagatgatcgagcagatccagttcatcaagctcttcggcatggccaagatcgacaacctcctccaggagatgctcctcggcggcgccccctccgacgccccccacgcccaccaccccctccacccccacctcatgcaggagcacatgggcaccaacgtcatcgtcgccaacaccatgcccacccacctctccaacggccagatgtgcgagtggccccgcccccgcggccaggccgccgcccccgaggccccccagcccgccccccccggcggctccggctccgagccctacaagctcctccccggcgccgtcgccaccatcgtccgccccctctccgccatcccccagcccaccatcaccaagcaggaggtcatctgaggactagtccctgttcccagagcccacttttttttctttttttgaaataaaatagcctgtctttcagatctaaaaaaaaaaaaaaaaaaaaaaaaaaaaaaaaaaaaaaaaaaaaaaaaaaaaaaaaaaaaaaaaaaaaaaaaaaaaaaaaaaaaaaaaaaaaaaaaaaaa

SEQ ID NO: 5254 - RNA, 1562 nt, synthetic construct
  misc_feature 1..1562: note = mRNA a-1 (A100) (opt2) from Homo sapiens__NP_000448.3__HNF4A(39-474)(K106R_K108R_K126R_K127R _S142A_S143A_S148A_S167A_S313A_S378A_T429A_T432A_S436A_K458 R)
  source 1..1562: mol_type = other RNA
aggagagtcccgcagtcggcgtccagcggctctgcttgttcgtgtgtgtgtcgttgcaggccttattcaagcttaccatggacacctccccctccgagggcaccaacctcaacgcccccaactccctcggcgtctccgccctctgcgccatctgcggcgaccgcgccaccggcaagcactacggcgcctcctcctgcgacggctgcaagggcttcttccgccgctccgtccgcaagaaccacatgtactcctgccgcttctcccgccagtgcgtcgtcgaccgcgaccgccgcaaccagtgccgctactgccgcctcaagaagtgcttccgcgccggcatgcgccgcgaggccgtccagaacgagcgcgaccgcatctccacccgccgcgccgcctacgaggactccgccctcccctccatcaacgccctcctccaggccgaggtcctctcccgccagatcaccgcccccgtctccggcatcaacggcgacatccgcgccaagaagatcgcctccatcgccgacgtctgcgagtccatgaaggagcagctcctcgtcctcgtcgagtgggccaagtacatccccgccttctgcgagctccccctcgacgaccaggtcgccctcctccgcgcccacgccggcgagcacctcctcctcggcgccaccaagcgctccatggtcttcaaggacgtcctcctcctcggcaacgactacatcgtcccccgccactgccccgagctcgccgagatgtcccgcgtctccatccgcatcctcgacgagctcgtcctccccttccaggagctccagatcgacgacaacgagtacgcctacctcaaggccatcatcttcttcgaccccgacgccaagggcctctccgaccccggcaagatcaagcgcctccgcgcccaggtccaggtctccctcgaggactacatcaacgaccgccagtacgactcccgcggccgcttcggcgagctcctcctcctcctccccaccctccagtccatcacctggcagatgatcgagcagatccagttcatcaagctcttcggcatggccaagatcgacaacctcctccaggagatgctcctcggcggcgccccctccgacgccccccacgcccaccaccccctccacccccacctcatgcaggagcacatgggcaccaacgtcatcgtcgccaacaccatgcccacccacctctccaacggccagatgtgcgagtggccccgcccccgcggccaggccgccgcccccgaggccccccagcccgccccccccggcggctccggctccgagccctacaagctcctccccggcgccgtcgccaccatcgtccgccccctctccgccatcccccagcccaccatcaccaagcaggaggtcatctgaggactagtccctgttcccagagcccacttttttttctttttttgaaataaaatagcctgtctttcagatctaaaaaaaaaaaaaaaaaaaaaaaaaaaaaaaaaaaaaaaaaaaaaaaaaaaaaaaaaaaaaaaaaaaaaaaaaaaaaaaaaaaaaaaaaaaaaaaaaaaa

SEQ ID NO: 5255 - RNA, 1562 nt, synthetic construct
  misc_feature 1..1562: note = mRNA a-1 (A100) (opt2) from Homo sapiens__NP_000448.3__HNF4A(39-474)(S142A_S143A_S148A_T166A _S167A_S313A_S378A_T429A_T432A_S436A_K458R)
  source 1..1562: mol_type = other RNA
aggagagtcccgcagtcggcgtccagcggctctgcttgttcgtgtgtgtgtcgttgcaggccttattcaagcttaccatggacacctccccctccgagggcaccaacctcaacgcccccaactccctcggcgtctccgccctctgcgccatctgcggcgaccgcgccaccggcaagcactacggcgcctcctcctgcgacggctgcaagggcttcttccgccgctccgtccgcaagaaccacatgtactcctgccgcttctcccgccagtgcgtcgtcgacaaggacaagcgcaaccagtgccgctactgccgcctcaagaagtgcttccgcgccggcatgaagaaggaggccgtccagaacgagcgcgaccgcatctccacccgccgcgccgcctacgaggactccgccctcccctccatcaacgccctcctccaggccgaggtcctctcccgccagatcgccgcccccgtctccggcatcaacggcgacatccgcgccaagaagatcgcctccatcgccgacgtctgcgagtccatgaaggagcagctcctcgtcctcgtcgagtgggccaagtacatccccgccttctgcgagctccccctcgacgaccaggtcgccctcctccgcgcccacgccggcgagcacctcctcctcggcgccaccaagcgctccatggtcttcaaggacgtcctcctcctcggcaacgactacatcgtcccccgccactgccccgagctcgccgagatgtcccgcgtctccatccgcatcctcgacgagctcgtcctccccttccaggagctccagatcgacgacaacgagtacgcctacctcaaggccatcatcttcttcgaccccgacgccaagggcctctccgaccccggcaagatcaagcgcctccgcgcccaggtccaggtctccctcgaggactacatcaacgaccgccagtacgactcccgcggccgcttcggcgagctcctcctcctcctccccaccctccagtccatcacctggcagatgatcgagcagatccagttcatcaagctcttcggcatggccaagatcgacaacctcctccaggagatgctcctcggcggcgccccctccgacgccccccacgcccaccaccccctccacccccacctcatgcaggagcacatgggcaccaacgtcatcgtcgccaacaccatgcccacccacctctccaacggccagatgtgcgagtggccccgcccccgcggccaggccgccgcccccgaggccccccagcccgccccccccggcggctccggctccgagccctacaagctcctccccggcgccgtcgccaccatcgtccgccccctctccgccatcccccagcccaccatcaccaagcaggaggtcatctgaggactagtccctgttcccagagcccacttttttttctttttttgaaataaaatagcctgtctttcagatctaaaaaaaaaaaaaaaaaaaaaaaaaaaaaaaaaaaaaaaaaaaaaaaaaaaaaaaaaaaaaaaaaaaaaaaaaaaaaaaaaaaaaaaaaaaaaaaaaaaa

SEQ ID NO: 5256 - RNA, 1562 nt, synthetic construct
  misc_feature 1..1562: note = mRNA a-1 (A100) (opt2) from Homo sapiens__NP_000448.3__HNF4A(39-474)(S87A_S142A_S143A_S148A_ T166A_S167A_S313A_S378A_T429A_T432A_S436A_K458R)
  source 1..1562: mol_type = other RNA
aggagagtcccgcagtcggcgtccagcggctctgcttgttcgtgtgtgtgtcgttgcaggccttattcaagcttaccatggacacctccccctccgagggcaccaacctcaacgcccccaactccctcggcgtctccgccctctgcgccatctgcggcgaccgcgccaccggcaagcactacggcgcctcctcctgcgacggctgcaagggcttcttccgccgcgccgtccgcaagaaccacatgtactcctgccgcttctcccgccagtgcgtcgtcgacaaggacaagcgcaaccagtgccgctactgccgcctcaagaagtgcttccgcgccggcatgaagaaggaggccgtccagaacgagcgcgaccgcatctccacccgccgcgccgcctacgaggactccgccctcccctccatcaacgccctcctccaggccgaggtcctctcccgccagatcgccgcccccgtctccggcatcaacggcgacatccgcgccaagaagatcgcctccatcgccgacgtctgcgagtccatgaaggagcagctcctcgtcctcgtcgagtgggccaagtacatccccgccttctgcgagctccccctcgacgaccaggtcgccctcctccgcgcccacgccggcgagcacctcctcctcggcgccaccaagcgctccatggtcttcaaggacgtcctcctcctcggcaacgactacatcgtcccccgccactgccccgagctcgccgagatgtcccgcgtctccatccgcatcctcgacgagctcgtcctccccttccaggagctccagatcgacgacaacgagtacgcctacctcaaggccatcatcttcttcgaccccgacgccaagggcctctccgaccccggcaagatcaagcgcctccgcgcccaggtccaggtctccctcgaggactacatcaacgaccgccagtacgactcccgcggccgcttcggcgagctcctcctcctcctccccaccctccagtccatcacctggcagatgatcgagcagatccagttcatcaagctcttcggcatggccaagatcgacaacctcctccaggagatgctcctcggcggcgccccctccgacgccccccacgcccaccaccccctccacccccacctcatgcaggagcacatgggcaccaacgtcatcgtcgccaacaccatgcccacccacctctccaacggccagatgtgcgagtggccccgcccccgcggccaggccgccgcccccgaggccccccagcccgccccccccggcggctccggctccgagccctacaagctcctccccggcgccgtcgccaccatcgtccgccccctctccgccatcccccagcccaccatcaccaagcaggaggtcatctgaggactagtccctgttcccagagcccacttttttttctttttttgaaataaaatagcctgtctttcagatctaaaaaaaaaaaaaaaaaaaaaaaaaaaaaaaaaaaaaaaaaaaaaaaaaaaaaaaaaaaaaaaaaaaaaaaaaaaaaaaaaaaaaaaaaaaaaaaaaaaa

SEQ ID NO: 5257 - RNA, 1562 nt, synthetic construct
  misc_feature 1..1562: note = mRNA a-1 (A100) (opt2) from Homo sapiens__NP_000448.3__HNF4A(39-474)(S87A_K106R_K108R_K126R_ K127R_S142A_S143A_S148A_T166A_S167A_S313A_S378A_T429A_T432A _S436A_K458R)
  source 1..1562: mol_type = other RNA
aggagagtcccgcagtcggcgtccagcggctctgcttgttcgtgtgtgtgtcgttgcaggccttattcaagcttaccatggacacctccccctccgagggcaccaacctcaacgcccccaactccctcggcgtctccgccctctgcgccatctgcggcgaccgcgccaccggcaagcactacggcgcctcctcctgcgacggctgcaagggcttcttccgccgcgccgtccgcaagaaccacatgtactcctgccgcttctcccgccagtgcgtcgtcgaccgcgaccgccgcaaccagtgccgctactgccgcctcaagaagtgcttccgcgccggcatgcgccgcgaggccgtccagaacgagcgcgaccgcatctccacccgccgcgccgcctacgaggactccgccctcccctccatcaacgccctcctccaggccgaggtcctctcccgccagatcgccgcccccgtctccggcatcaacggcgacatccgcgccaagaagatcgcctccatcgccgacgtctgcgagtccatgaaggagcagctcctcgtcctcgtcgagtgggccaagtacatccccgccttctgcgagctccccctcgacgaccaggtcgccctcctccgcgcccacgccggcgagcacctcctcctcggcgccaccaagcgctccatggtcttcaaggacgtcctcctcctcggcaacgactacatcgtcccccgccactgccccgagctcgccgagatgtcccgcgtctccatccgcatcctcgacgagctcgtcctccccttccaggagctccagatcgacgacaacgagtacgcctacctcaaggccatcatcttcttcgaccccgacgccaagggcctctccgaccccggcaagatcaagcgcctccgcgcccaggtccaggtctccctcgaggactacatcaacgaccgccagtacgactcccgcggccgcttcggcgagctcctcctcctcctccccaccctccagtccatcacctggcagatgatcgagcagatccagttcatcaagctcttcggcatggccaagatcgacaacctcctccaggagatgctcctcggcggcgccccctccgacgccccccacgcccaccaccccctccacccccacctcatgcaggagcacatgggcaccaacgtcatcgtcgccaacaccatgcccacccacctctccaacggccagatgtgcgagtggccccgcccccgcggccaggccgccgcccccgaggccccccagcccgccccccccggcggctccggctccgagccctacaagctcctccccggcgccgtcgccaccatcgtccgccccctctccgccatcccccagcccaccatcaccaagcaggaggtcatctgaggactagtccctgttcccagagcccacttttttttctttttttgaaataaaatagcctgtctttcagatctaaaaaaaaaaaaaaaaaaaaaaaaaaaaaaaaaaaaaaaaaaaaaaaaaaaaaaaaaaaaaaaaaaaaaaaaaaaaaaaaaaaaaaaaaaaaaaaaaaaa

SEQ ID NO: 5258 - RNA, 1562 nt, synthetic construct
  misc_feature 1..1562: note = mRNA a-1 (A100) (opt2) from Homo sapiens__NP_000448.3__HNF4A(39-474)(S87A_K106R_K108R_K126R_ K127R)
  source 1..1562: mol_type = other RNA
aggagagtcccgcagtcggcgtccagcggctctgcttgttcgtgtgtgtgtcgttgcaggccttattcaagcttaccatggacacctccccctccgagggcaccaacctcaacgcccccaactccctcggcgtctccgccctctgcgccatctgcggcgaccgcgccaccggcaagcactacggcgcctcctcctgcgacggctgcaagggcttcttccgccgcgccgtccgcaagaaccacatgtactcctgccgcttctcccgccagtgcgtcgtcgaccgcgaccgccgcaaccagtgccgctactgccgcctcaagaagtgcttccgcgccggcatgcgccgcgaggccgtccagaacgagcgcgaccgcatctccacccgccgctcctcctacgaggactcctccctcccctccatcaacgccctcctccaggccgaggtcctctcccgccagatcacctcccccgtctccggcatcaacggcgacatccgcgccaagaagatcgcctccatcgccgacgtctgcgagtccatgaaggagcagctcctcgtcctcgtcgagtgggccaagtacatccccgccttctgcgagctccccctcgacgaccaggtcgccctcctccgcgcccacgccggcgagcacctcctcctcggcgccaccaagcgctccatggtcttcaaggacgtcctcctcctcggcaacgactacatcgtcccccgccactgccccgagctcgccgagatgtcccgcgtctccatccgcatcctcgacgagctcgtcctccccttccaggagctccagatcgacgacaacgagtacgcctacctcaaggccatcatcttcttcgaccccgacgccaagggcctctccgaccccggcaagatcaagcgcctccgctcccaggtccaggtctccctcgaggactacatcaacgaccgccagtacgactcccgcggccgcttcggcgagctcctcctcctcctccccaccctccagtccatcacctggcagatgatcgagcagatccagttcatcaagctcttcggcatggccaagatcgacaacctcctccaggagatgctcctcggcggctccccctccgacgccccccacgcccaccaccccctccacccccacctcatgcaggagcacatgggcaccaacgtcatcgtcgccaacaccatgcccacccacctctccaacggccagatgtgcgagtggccccgcccccgcggccaggccgccacccccgagaccccccagccctccccccccggcggctccggctccgagccctacaagctcctccccggcgccgtcgccaccatcgtcaagcccctctccgccatcccccagcccaccatcaccaagcaggaggtcatctgaggactagtccctgttcccagagcccacttttttttctttttttgaaataaaatagcctgtctttcagatctaaaaaaaaaaaaaaaaaaaaaaaaaaaaaaaaaaaaaaaaaaaaaaaaaaaaaaaaaaaaaaaaaaaaaaaaaaaaaaaaaaaaaaaaaaaaaaaaaaaa

SEQ ID NO: 5259 - RNA, 1562 nt, synthetic construct
  misc_feature 1..1562: note = mRNA a-1 (A100) (opt2) from Homo sapiens__NP_000448.3__HNF4A(39-474)(S87A_K106R_K108R_K126R_ K127R_S142A_S143A_S148A_T166A_S167A_S313A_S378A_T429A_T432A _S436A_K458R_S461A)
  source 1..1562: mol_type = other RNA
aggagagtcccgcagtcggcgtccagcggctctgcttgttcgtgtgtgtgtcgttgcaggccttattcaagcttaccatggacacctccccctccgagggcaccaacctcaacgcccccaactccctcggcgtctccgccctctgcgccatctgcggcgaccgcgccaccggcaagcactacggcgcctcctcctgcgacggctgcaagggcttcttccgccgcgccgtccgcaagaaccacatgtactcctgccgcttctcccgccagtgcgtcgtcgaccgcgaccgccgcaaccagtgccgctactgccgcctcaagaagtgcttccgcgccggcatgcgccgcgaggccgtccagaacgagcgcgaccgcatctccacccgccgcgccgcctacgaggactccgccctcccctccatcaacgccctcctccaggccgaggtcctctcccgccagatcgccgcccccgtctccggcatcaacggcgacatccgcgccaagaagatcgcctccatcgccgacgtctgcgagtccatgaaggagcagctcctcgtcctcgtcgagtgggccaagtacatccccgccttctgcgagctccccctcgacgaccaggtcgccctcctccgcgcccacgccggcgagcacctcctcctcggcgccaccaagcgctccatggtcttcaaggacgtcctcctcctcggcaacgactacatcgtcccccgccactgccccgagctcgccgagatgtcccgcgtctccatccgcatcctcgacgagctcgtcctccccttccaggagctccagatcgacgacaacgagtacgcctacctcaaggccatcatcttcttcgaccccgacgccaagggcctctccgaccccggcaagatcaagcgcctccgcgcccaggtccaggtctccctcgaggactacatcaacgaccgccagtacgactcccgcggccgcttcggcgagctcctcctcctcctccccaccctccagtccatcacctggcagatgatcgagcagatccagttcatcaagctcttcggcatggccaagatcgacaacctcctccaggagatgctcctcggcggcgccccctccgacgccccccacgcccaccaccccctccacccccacctcatgcaggagcacatgggcaccaacgtcatcgtcgccaacaccatgcccacccacctctccaacggccagatgtgcgagtggccccgcccccgcggccaggccgccgcccccgaggccccccagcccgccccccccggcggctccggctccgagccctacaagctcctccccggcgccgtcgccaccatcgtccgccccctcgccgccatcccccagcccaccatcaccaagcaggaggtcatctgaggactagtccctgttcccagagcccacttttttttctttttttgaaataaaatagcctgtctttcagatctaaaaaaaaaaaaaaaaaaaaaaaaaaaaaaaaaaaaaaaaaaaaaaaaaaaaaaaaaaaaaaaaaaaaaaaaaaaaaaaaaaaaaaaaaaaaaaaaaaaa

SEQ ID NO: 5260 - RNA, 1562 nt, synthetic construct
  misc_feature 1..1562: note = mRNA a-1 (A100) (opt2) from Homo sapiens__NP_000448.3__HNF4A(39-474)(S87A_K106R_K108R_K126R_ K127R_S142A_S143A_S148A_T166A_S167A_S313A_S378A_T429A_T432A _S436A_K458R_S461E)
  source 1..1562: mol_type = other RNA
aggagagtcccgcagtcggcgtccagcggctctgcttgttcgtgtgtgtgtcgttgcaggccttattcaagcttaccatggacacctccccctccgagggcaccaacctcaacgcccccaactccctcggcgtctccgccctctgcgccatctgcggcgaccgcgccaccggcaagcactacggcgcctcctcctgcgacggctgcaagggcttcttccgccgcgccgtccgcaagaaccacatgtactcctgccgcttctcccgccagtgcgtcgtcgaccgcgaccgccgcaaccagtgccgctactgccgcctcaagaagtgcttccgcgccggcatgcgccgcgaggccgtccagaacgagcgcgaccgcatctccacccgccgcgccgcctacgaggactccgccctcccctccatcaacgccctcctccaggccgaggtcctctcccgccagatcgccgcccccgtctccggcatcaacggcgacatccgcgccaagaagatcgcctccatcgccgacgtctgcgagtccatgaaggagcagctcctcgtcctcgtcgagtgggccaagtacatccccgccttctgcgagctccccctcgacgaccaggtcgccctcctccgcgcccacgccggcgagcacctcctcctcggcgccaccaagcgctccatggtcttcaaggacgtcctcctcctcggcaacgactacatcgtcccccgccactgccccgagctcgccgagatgtcccgcgtctccatccgcatcctcgacgagctcgtcctccccttccaggagctccagatcgacgacaacgagtacgcctacctcaaggccatcatcttcttcgaccccgacgccaagggcctctccgaccccggcaagatcaagcgcctccgcgcccaggtccaggtctccctcgaggactacatcaacgaccgccagtacgactcccgcggccgcttcggcgagctcctcctcctcctccccaccctccagtccatcacctggcagatgatcgagcagatccagttcatcaagctcttcggcatggccaagatcgacaacctcctccaggagatgctcctcggcggcgccccctccgacgccccccacgcccaccaccccctccacccccacctcatgcaggagcacatgggcaccaacgtcatcgtcgccaacaccatgcccacccacctctccaacggccagatgtgcgagtggccccgcccccgcggccaggccgccgcccccgaggccccccagcccgccccccccggcggctccggctccgagccctacaagctcctccccggcgccgtcgccaccatcgtccgccccctcgaggccatcccccagcccaccatcaccaagcaggaggtcatctgaggactagtccctgttcccagagcccacttttttttctttttttgaaataaaatagcctgtctttcagatctaaaaaaaaaaaaaaaaaaaaaaaaaaaaaaaaaaaaaaaaaaaaaaaaaaaaaaaaaaaaaaaaaaaaaaaaaaaaaaaaaaaaaaaaaaaaaaaaaaaa

SEQ ID NO: 5261 - RNA, 1562 nt, synthetic construct
  misc_feature 1..1562: note = mRNA a-1 (A100) (opt2) from Homo sapiens__NP_000448.3__HNF4A(39-474)(S87A_K106R_K108R_K126R_ K127R_S142A_S143A_S148E_T166A_S167E_S313A_S378E_T429E_T432E _S436E_K458R_S461E)
  source 1..1562: mol_type = other RNA
aggagagtcccgcagtcggcgtccagcggctctgcttgttcgtgtgtgtgtcgttgcaggccttattcaagcttaccatggacacctccccctccgagggcaccaacctcaacgcccccaactccctcggcgtctccgccctctgcgccatctgcggcgaccgcgccaccggcaagcactacggcgcctcctcctgcgacggctgcaagggcttcttccgccgcgccgtccgcaagaaccacatgtactcctgccgcttctcccgccagtgcgtcgtcgaccgcgaccgccgcaaccagtgccgctactgccgcctcaagaagtgcttccgcgccggcatgcgccgcgaggccgtccagaacgagcgcgaccgcatctccacccgccgcgccgcctacgaggactccgagctcccctccatcaacgccctcctccaggccgaggtcctctcccgccagatcgccgagcccgtctccggcatcaacggcgacatccgcgccaagaagatcgcctccatcgccgacgtctgcgagtccatgaaggagcagctcctcgtcctcgtcgagtgggccaagtacatccccgccttctgcgagctccccctcgacgaccaggtcgccctcctccgcgcccacgccggcgagcacctcctcctcggcgccaccaagcgctccatggtcttcaaggacgtcctcctcctcggcaacgactacatcgtcccccgccactgccccgagctcgccgagatgtcccgcgtctccatccgcatcctcgacgagctcgtcctccccttccaggagctccagatcgacgacaacgagtacgcctacctcaaggccatcatcttcttcgaccccgacgccaagggcctctccgaccccggcaagatcaagcgcctccgcgcccaggtccaggtctccctcgaggactacatcaacgaccgccagtacgactcccgcggccgcttcggcgagctcctcctcctcctccccaccctccagtccatcacctggcagatgatcgagcagatccagttcatcaagctcttcggcatggccaagatcgacaacctcctccaggagatgctcctcggcggcgagccctccgacgccccccacgcccaccaccccctccacccccacctcatgcaggagcacatgggcaccaacgtcatcgtcgccaacaccatgcccacccacctctccaacggccagatgtgcgagtggccccgcccccgcggccaggccgccgagcccgaggagccccagcccgagccccccggcggctccggctccgagccctacaagctcctccccggcgccgtcgccaccatcgtccgccccctcgaggccatcccccagcccaccatcaccaagcaggaggtcatctgaggactagtccctgttcccagagcccacttttttttctttttttgaaataaaatagcctgtctttcagatctaaaaaaaaaaaaaaaaaaaaaaaaaaaaaaaaaaaaaaaaaaaaaaaaaaaaaaaaaaaaaaaaaaaaaaaaaaaaaaaaaaaaaaaaaaaaaaaaaaaa

SEQ ID NO: 5262 - RNA, 1562 nt, synthetic construct
  misc_feature 1..1562: note = mRNA a-1 (A100) (opt2) from Homo sapiens__NP_000448.3__HNF4A(39-474)(S87A_K106R_K108R_K126R_ K127R_S142A_S143A_S148A_T166A_S167A_K179R_K180R_S313A_S378A _T429A_T432A_S436A_K458R_S461E)
  source 1..1562: mol_type = other RNA
aggagagtcccgcagtcggcgtccagcggctctgcttgttcgtgtgtgtgtcgttgcaggccttattcaagcttaccatggacacctccccctccgagggcaccaacctcaacgcccccaactccctcggcgtctccgccctctgcgccatctgcggcgaccgcgccaccggcaagcactacggcgcctcctcctgcgacggctgcaagggcttcttccgccgcgccgtccgcaagaaccacatgtactcctgccgcttctcccgccagtgcgtcgtcgaccgcgaccgccgcaaccagtgccgctactgccgcctcaagaagtgcttccgcgccggcatgcgccgcgaggccgtccagaacgagcgcgaccgcatctccacccgccgcgccgcctacgaggactccgccctcccctccatcaacgccctcctccaggccgaggtcctctcccgccagatcgccgcccccgtctccggcatcaacggcgacatccgcgcccgccgcatcgcctccatcgccgacgtctgcgagtccatgaaggagcagctcctcgtcctcgtcgagtgggccaagtacatccccgccttctgcgagctccccctcgacgaccaggtcgccctcctccgcgcccacgccggcgagcacctcctcctcggcgccaccaagcgctccatggtcttcaaggacgtcctcctcctcggcaacgactacatcgtcccccgccactgccccgagctcgccgagatgtcccgcgtctccatccgcatcctcgacgagctcgtcctccccttccaggagctccagatcgacgacaacgagtacgcctacctcaaggccatcatcttcttcgaccccgacgccaagggcctctccgaccccggcaagatcaagcgcctccgcgcccaggtccaggtctccctcgaggactacatcaacgaccgccagtacgactcccgcggccgcttcggcgagctcctcctcctcctccccaccctccagtccatcacctggcagatgatcgagcagatccagttcatcaagctcttcggcatggccaagatcgacaacctcctccaggagatgctcctcggcggcgccccctccgacgccccccacgcccaccaccccctccacccccacctcatgcaggagcacatgggcaccaacgtcatcgtcgccaacaccatgcccacccacctctccaacggccagatgtgcgagtggccccgcccccgcggccaggccgccgcccccgaggccccccagcccgccccccccggcggctccggctccgagccctacaagctcctccccggcgccgtcgccaccatcgtccgccccctcgaggccatcccccagcccaccatcaccaagcaggaggtcatctgaggactagtccctgttcccagagcccacttttttttctttttttgaaataaaatagcctgtctttcagatctaaaaaaaaaaaaaaaaaaaaaaaaaaaaaaaaaaaaaaaaaaaaaaaaaaaaaaaaaaaaaaaaaaaaaaaaaaaaaaaaaaaaaaaaaaaaaaaaaaaa

SEQ ID NO: 5263 - RNA, 1562 nt, synthetic construct
  misc_feature 1..1562: note = mRNA a-1 (A100) (opt2) from Homo sapiens__NP_000448.3__HNF4A(39-474)(S87A_K106R_K108R_K126R_ K127R_S142A_S143A_S148A_T166A_S167A_K300R_K307R_K309R_S313A _S378A_T429A_T432A_S436A_K458R_S461E)
  source 1..1562: mol_type = other RNA
aggagagtcccgcagtcggcgtccagcggctctgcttgttcgtgtgtgtgtcgttgcaggccttattcaagcttaccatggacacctccccctccgagggcaccaacctcaacgcccccaactccctcggcgtctccgccctctgcgccatctgcggcgaccgcgccaccggcaagcactacggcgcctcctcctgcgacggctgcaagggcttcttccgccgcgccgtccgcaagaaccacatgtactcctgccgcttctcccgccagtgcgtcgtcgaccgcgaccgccgcaaccagtgccgctactgccgcctcaagaagtgcttccgcgccggcatgcgccgcgaggccgtccagaacgagcgcgaccgcatctccacccgccgcgccgcctacgaggactccgccctcccctccatcaacgccctcctccaggccgaggtcctctcccgccagatcgccgcccccgtctccggcatcaacggcgacatccgcgccaagaagatcgcctccatcgccgacgtctgcgagtccatgaaggagcagctcctcgtcctcgtcgagtgggccaagtacatccccgccttctgcgagctccccctcgacgaccaggtcgccctcctccgcgcccacgccggcgagcacctcctcctcggcgccaccaagcgctccatggtcttcaaggacgtcctcctcctcggcaacgactacatcgtcccccgccactgccccgagctcgccgagatgtcccgcgtctccatccgcatcctcgacgagctcgtcctccccttccaggagctccagatcgacgacaacgagtacgcctacctcaaggccatcatcttcttcgaccccgacgcccgcggcctctccgaccccggccgcatccgccgcctccgcgcccaggtccaggtctccctcgaggactacatcaacgaccgccagtacgactcccgcggccgcttcggcgagctcctcctcctcctccccaccctccagtccatcacctggcagatgatcgagcagatccagttcatcaagctcttcggcatggccaagatcgacaacctcctccaggagatgctcctcggcggcgccccctccgacgccccccacgcccaccaccccctccacccccacctcatgcaggagcacatgggcaccaacgtcatcgtcgccaacaccatgcccacccacctctccaacggccagatgtgcgagtggccccgcccccgcggccaggccgccgcccccgaggccccccagcccgccccccccggcggctccggctccgagccctacaagctcctccccggcgccgtcgccaccatcgtccgccccctcgaggccatcccccagcccaccatcaccaagcaggaggtcatctgaggactagtccctgttcccagagcccacttttttttctttttttgaaataaaatagcctgtctttcagatctaaaaaaaaaaaaaaaaaaaaaaaaaaaaaaaaaaaaaaaaaaaaaaaaaaaaaaaaaaaaaaaaaaaaaaaaaaaaaaaaaaaaaaaaaaaaaaaaaaaa

SEQ ID NO: 5264 - RNA, 1562 nt, synthetic construct
  misc_feature 1..1562: note = mRNA a-1 (A100) (opt2) from Homo sapiens__NP_000448.3__HNF4A(39-474)(S87A_K106R_K108R_K126R_ K127R_S142A_S143A_S148A_T166A_S167A_S313A_S378A_T429A_T432A _S436A_K447R_K458R_S461E_K470R)
  source 1..1562: mol_type = other RNA
aggagagtcccgcagtcggcgtccagcggctctgcttgttcgtgtgtgtgtcgttgcaggccttattcaagcttaccatggacacctccccctccgagggcaccaacctcaacgcccccaactccctcggcgtctccgccctctgcgccatctgcggcgaccgcgccaccggcaagcactacggcgcctcctcctgcgacggctgcaagggcttcttccgccgcgccgtccgcaagaaccacatgtactcctgccgcttctcccgccagtgcgtcgtcgaccgcgaccgccgcaaccagtgccgctactgccgcctcaagaagtgcttccgcgccggcatgcgccgcgaggccgtccagaacgagcgcgaccgcatctccacccgccgcgccgcctacgaggactccgccctcccctccatcaacgccctcctccaggccgaggtcctctcccgccagatcgccgcccccgtctccggcatcaacggcgacatccgcgccaagaagatcgcctccatcgccgacgtctgcgagtccatgaaggagcagctcctcgtcctcgtcgagtgggccaagtacatccccgccttctgcgagctccccctcgacgaccaggtcgccctcctccgcgcccacgccggcgagcacctcctcctcggcgccaccaagcgctccatggtcttcaaggacgtcctcctcctcggcaacgactacatcgtcccccgccactgccccgagctcgccgagatgtcccgcgtctccatccgcatcctcgacgagctcgtcctccccttccaggagctccagatcgacgacaacgagtacgcctacctcaaggccatcatcttcttcgaccccgacgccaagggcctctccgaccccggcaagatcaagcgcctccgcgcccaggtccaggtctccctcgaggactacatcaacgaccgccagtacgactcccgcggccgcttcggcgagctcctcctcctcctccccaccctccagtccatcacctggcagatgatcgagcagatccagttcatcaagctcttcggcatggccaagatcgacaacctcctccaggagatgctcctcggcggcgccccctccgacgccccccacgcccaccaccccctccacccccacctcatgcaggagcacatgggcaccaacgtcatcgtcgccaacaccatgcccacccacctctccaacggccagatgtgcgagtggccccgcccccgcggccaggccgccgcccccgaggccccccagcccgccccccccggcggctccggctccgagccctaccgcctcctccccggcgccgtcgccaccatcgtccgccccctcgaggccatcccccagcccaccatcacccgccaggaggtcatctgaggactagtccctgttcccagagcccacttttttttctttttttgaaataaaatagcctgtctttcagatctaaaaaaaaaaaaaaaaaaaaaaaaaaaaaaaaaaaaaaaaaaaaaaaaaaaaaaaaaaaaaaaaaaaaaaaaaaaaaaaaaaaaaaaaaaaaaaaaaaaa

SEQ ID NO: 5265 - RNA, 1562 nt, synthetic construct
  misc_feature 1..1562: note = mRNA a-1 (A100) (opt2) from Homo sapiens__NP_000448.3__HNF4A(39-474)(S87A_K106R_K108R_K126R_ K127R_S142A_S143A_S148A_T166A_S167A_K179R_K180R_K234R_K300R _K307R_K309R_S313A_S378A_T429A_T432A_S436A_K447R_K458R_S461 E_K470R)
  source 1..1562: mol_type = other RNA
aggagagtcccgcagtcggcgtccagcggctctgcttgttcgtgtgtgtgtcgttgcaggccttattcaagcttaccatggacacctccccctccgagggcaccaacctcaacgcccccaactccctcggcgtctccgccctctgcgccatctgcggcgaccgcgccaccggcaagcactacggcgcctcctcctgcgacggctgcaagggcttcttccgccgcgccgtccgcaagaaccacatgtactcctgccgcttctcccgccagtgcgtcgtcgaccgcgaccgccgcaaccagtgccgctactgccgcctcaagaagtgcttccgcgccggcatgcgccgcgaggccgtccagaacgagcgcgaccgcatctccacccgccgcgccgcctacgaggactccgccctcccctccatcaacgccctcctccaggccgaggtcctctcccgccagatcgccgcccccgtctccggcatcaacggcgacatccgcgcccgccgcatcgcctccatcgccgacgtctgcgagtccatgaaggagcagctcctcgtcctcgtcgagtgggccaagtacatccccgccttctgcgagctccccctcgacgaccaggtcgccctcctccgcgcccacgccggcgagcacctcctcctcggcgccacccgccgctccatggtcttcaaggacgtcctcctcctcggcaacgactacatcgtcccccgccactgccccgagctcgccgagatgtcccgcgtctccatccgcatcctcgacgagctcgtcctccccttccaggagctccagatcgacgacaacgagtacgcctacctcaaggccatcatcttcttcgaccccgacgcccgcggcctctccgaccccggccgcatccgccgcctccgcgcccaggtccaggtctccctcgaggactacatcaacgaccgccagtacgactcccgcggccgcttcggcgagctcctcctcctcctccccaccctccagtccatcacctggcagatgatcgagcagatccagttcatcaagctcttcggcatggccaagatcgacaacctcctccaggagatgctcctcggcggcgccccctccgacgccccccacgcccaccaccccctccacccccacctcatgcaggagcacatgggcaccaacgtcatcgtcgccaacaccatgcccacccacctctccaacggccagatgtgcgagtggccccgcccccgcggccaggccgccgcccccgaggccccccagcccgccccccccggcggctccggctccgagccctaccgcctcctccccggcgccgtcgccaccatcgtccgccccctcgaggccatcccccagcccaccatcacccgccaggaggtcatctgaggactagtccctgttcccagagcccacttttttttctttttttgaaataaaatagcctgtctttcagatctaaaaaaaaaaaaaaaaaaaaaaaaaaaaaaaaaaaaaaaaaaaaaaaaaaaaaaaaaaaaaaaaaaaaaaaaaaaaaaaaaaaaaaaaaaaaaaaaaaaa

SEQ ID NO: 5266 - RNA, 1562 nt, synthetic construct
  misc_feature 1..1562: note = mRNA a-1 (A100) (opt2) from Homo sapiens__NP_000448.3__HNF4A(39-474)(S87A_S95A_S99A_K106R_K1 08R_K126R_K127R_S142A_S143A_S148A_T166A_S167A_S313A_S378A_T 429A_T432A_S436A_K458R_S461E)
  source 1..1562: mol_type = other RNA
aggagagtcccgcagtcggcgtccagcggctctgcttgttcgtgtgtgtgtcgttgcaggccttattcaagcttaccatggacacctccccctccgagggcaccaacctcaacgcccccaactccctcggcgtctccgccctctgcgccatctgcggcgaccgcgccaccggcaagcactacggcgcctcctcctgcgacggctgcaagggcttcttccgccgcgccgtccgcaagaaccacatgtacgcctgccgcttcgcccgccagtgcgtcgtcgaccgcgaccgccgcaaccagtgccgctactgccgcctcaagaagtgcttccgcgccggcatgcgccgcgaggccgtccagaacgagcgcgaccgcatctccacccgccgcgccgcctacgaggactccgccctcccctccatcaacgccctcctccaggccgaggtcctctcccgccagatcgccgcccccgtctccggcatcaacggcgacatccgcgccaagaagatcgcctccatcgccgacgtctgcgagtccatgaaggagcagctcctcgtcctcgtcgagtgggccaagtacatccccgccttctgcgagctccccctcgacgaccaggtcgccctcctccgcgcccacgccggcgagcacctcctcctcggcgccaccaagcgctccatggtcttcaaggacgtcctcctcctcggcaacgactacatcgtcccccgccactgccccgagctcgccgagatgtcccgcgtctccatccgcatcctcgacgagctcgtcctccccttccaggagctccagatcgacgacaacgagtacgcctacctcaaggccatcatcttcttcgaccccgacgccaagggcctctccgaccccggcaagatcaagcgcctccgcgcccaggtccaggtctccctcgaggactacatcaacgaccgccagtacgactcccgcggccgcttcggcgagctcctcctcctcctccccaccctccagtccatcacctggcagatgatcgagcagatccagttcatcaagctcttcggcatggccaagatcgacaacctcctccaggagatgctcctcggcggcgccccctccgacgccccccacgcccaccaccccctccacccccacctcatgcaggagcacatgggcaccaacgtcatcgtcgccaacaccatgcccacccacctctccaacggccagatgtgcgagtggccccgcccccgcggccaggccgccgcccccgaggccccccagcccgccccccccggcggctccggctccgagccctacaagctcctccccggcgccgtcgccaccatcgtccgccccctcgaggccatcccccagcccaccatcaccaagcaggaggtcatctgaggactagtccctgttcccagagcccacttttttttctttttttgaaataaaatagcctgtctttcagatctaaaaaaaaaaaaaaaaaaaaaaaaaaaaaaaaaaaaaaaaaaaaaaaaaaaaaaaaaaaaaaaaaaaaaaaaaaaaaaaaaaaaaaaaaaaaaaaaaaaa

SEQ ID NO: 5267 - RNA, 1562 nt, synthetic construct
  misc_feature 1..1562: note = mRNA a-1 (A100) (opt2) from Homo sapiens__NP_000448.3__HNF4A(39-474)(S87A_K106R_K108R_K126R_ K127R_S138A_T139A_S142A_S143A_S148A_T166A_S167A_S313A_S378A _T429A_T432A_S436A_K458R_S461E)
  source 1..1562: mol_type = other RNA
aggagagtcccgcagtcggcgtccagcggctctgcttgttcgtgtgtgtgtcgttgcaggccttattcaagcttaccatggacacctccccctccgagggcaccaacctcaacgcccccaactccctcggcgtctccgccctctgcgccatctgcggcgaccgcgccaccggcaagcactacggcgcctcctcctgcgacggctgcaagggcttcttccgccgcgccgtccgcaagaaccacatgtactcctgccgcttctcccgccagtgcgtcgtcgaccgcgaccgccgcaaccagtgccgctactgccgcctcaagaagtgcttccgcgccggcatgcgccgcgaggccgtccagaacgagcgcgaccgcatcgccgcccgccgcgccgcctacgaggactccgccctcccctccatcaacgccctcctccaggccgaggtcctctcccgccagatcgccgcccccgtctccggcatcaacggcgacatccgcgccaagaagatcgcctccatcgccgacgtctgcgagtccatgaaggagcagctcctcgtcctcgtcgagtgggccaagtacatccccgccttctgcgagctccccctcgacgaccaggtcgccctcctccgcgcccacgccggcgagcacctcctcctcggcgccaccaagcgctccatggtcttcaaggacgtcctcctcctcggcaacgactacatcgtcccccgccactgccccgagctcgccgagatgtcccgcgtctccatccgcatcctcgacgagctcgtcctccccttccaggagctccagatcgacgacaacgagtacgcctacctcaaggccatcatcttcttcgaccccgacgccaagggcctctccgaccccggcaagatcaagcgcctccgcgcccaggtccaggtctccctcgaggactacatcaacgaccgccagtacgactcccgcggccgcttcggcgagctcctcctcctcctccccaccctccagtccatcacctggcagatgatcgagcagatccagttcatcaagctcttcggcatggccaagatcgacaacctcctccaggagatgctcctcggcggcgccccctccgacgccccccacgcccaccaccccctccacccccacctcatgcaggagcacatgggcaccaacgtcatcgtcgccaacaccatgcccacccacctctccaacggccagatgtgcgagtggccccgcccccgcggccaggccgccgcccccgaggccccccagcccgccccccccggcggctccggctccgagccctacaagctcctccccggcgccgtcgccaccatcgtccgccccctcgaggccatcccccagcccaccatcaccaagcaggaggtcatctgaggactagtccctgttcccagagcccacttttttttctttttttgaaataaaatagcctgtctttcagatctaaaaaaaaaaaaaaaaaaaaaaaaaaaaaaaaaaaaaaaaaaaaaaaaaaaaaaaaaaaaaaaaaaaaaaaaaaaaaaaaaaaaaaaaaaaaaaaaaaaa

SEQ ID NO: 5268 - RNA, 1562 nt, synthetic construct
  misc_feature 1..1562: note = mRNA a-1 (A100) (opt2) from Homo sapiens__NP_000448.3__HNF4A(39-474)(S87A_S95A_S99A_K106R_K1 08R_K126R_K127R_S138A_T139A_S142A_S143A_S148A_T166A_S167A_S 313A_S378A_T429A_T432A_S436A_K458R_S461E)
  source 1..1562: mol_type = other RNA
aggagagtcccgcagtcggcgtccagcggctctgcttgttcgtgtgtgtgtcgttgcaggccttattcaagcttaccatggacacctccccctccgagggcaccaacctcaacgcccccaactccctcggcgtctccgccctctgcgccatctgcggcgaccgcgccaccggcaagcactacggcgcctcctcctgcgacggctgcaagggcttcttccgccgcgccgtccgcaagaaccacatgtacgcctgccgcttcgcccgccagtgcgtcgtcgaccgcgaccgccgcaaccagtgccgctactgccgcctcaagaagtgcttccgcgccggcatgcgccgcgaggccgtccagaacgagcgcgaccgcatcgccgcccgccgcgccgcctacgaggactccgccctcccctccatcaacgccctcctccaggccgaggtcctctcccgccagatcgccgcccccgtctccggcatcaacggcgacatccgcgccaagaagatcgcctccatcgccgacgtctgcgagtccatgaaggagcagctcctcgtcctcgtcgagtgggccaagtacatccccgccttctgcgagctccccctcgacgaccaggtcgccctcctccgcgcccacgccggcgagcacctcctcctcggcgccaccaagcgctccatggtcttcaaggacgtcctcctcctcggcaacgactacatcgtcccccgccactgccccgagctcgccgagatgtcccgcgtctccatccgcatcctcgacgagctcgtcctccccttccaggagctccagatcgacgacaacgagtacgcctacctcaaggccatcatcttcttcgaccccgacgccaagggcctctccgaccccggcaagatcaagcgcctccgcgcccaggtccaggtctccctcgaggactacatcaacgaccgccagtacgactcccgcggccgcttcggcgagctcctcctcctcctccccaccctccagtccatcacctggcagatgatcgagcagatccagttcatcaagctcttcggcatggccaagatcgacaacctcctccaggagatgctcctcggcggcgccccctccgacgccccccacgcccaccaccccctccacccccacctcatgcaggagcacatgggcaccaacgtcatcgtcgccaacaccatgcccacccacctctccaacggccagatgtgcgagtggccccgcccccgcggccaggccgccgcccccgaggccccccagcccgccccccccggcggctccggctccgagccctacaagctcctccccggcgccgtcgccaccatcgtccgccccctcgaggccatcccccagcccaccatcaccaagcaggaggtcatctgaggactagtccctgttcccagagcccacttttttttctttttttgaaataaaatagcctgtctttcagatctaaaaaaaaaaaaaaaaaaaaaaaaaaaaaaaaaaaaaaaaaaaaaaaaaaaaaaaaaaaaaaaaaaaaaaaaaaaaaaaaaaaaaaaaaaaaaaaaaaaa

SEQ ID NO: 5269 - RNA, 1562 nt, synthetic construct
  misc_feature 1..1562: note = mRNA a-1 (A100) (opt3) from Homo sapiens__NP_000448.3__HNF4A(39-474)
  source 1..1562: mol_type = other RNA
aggagagtcccgcagtcggcgtccagcggctctgcttgttcgtgtgtgtgtcgttgcaggccttattcaagcttaccatggacacctctccttcagaggggacaaacttaaatgcgccaaacagtctgggagtgagcgctctatgcgccatctgtggtgatagggcaactggcaaacactacggggcctcctcttgcgacggatgtaagggctttttccggcgctcggtacgtaaaaatcatatgtattcatgccgatttagcagacaatgtgtggtcgataaggacaaaaggaaccagtgccggtactgtcgcctcaagaagtgcttcagagctggtatgaaaaaggaagcagtgcagaatgagagggatcggattagtacccgccgatcctcttatgaagacagctccctgccgtcaataaacgcccttctgcaggctgaggttttgagtagacaaatcacaagccccgtgtctgggattaatggagatatcagggccaaaaagattgcgtccatcgcagacgtctgtgagtcaatgaaagaacagctcctggtgctggtagagtgggccaagtacatacctgctttttgcgaactcccattagatgaccaggttgccctgcttcgggcacacgctggcgagcatttgctgctaggcgccaccaagcgtagcatggtgttcaaagacgtcctcctgcttgggaacgattatatcgtgccccgccactgtcctgagctggcggaaatgagtagagtgtctattaggatcttggacgagctcgtcctgccatttcaggaattacaaattgatgacaatgagtacgcctacctgaaggcaatcatattctttgatcccgacgctaaaggactctccgatcctggtaagattaaacggcttcgaagccaggttcaggtgtcgctggaagactatatcaacgatcgccagtacgactctagaggcaggttcggggagttgctactgctcctgccaactcttcaatccattacatggcagatgatcgagcagatccaatttattaagctgttcggaatggccaaaatagataatttgctccaggaaatgctgttaggcggttcaccgagtgacgctccccatgcccaccaccctctgcatccacacctaatgcaggagcatatggggaccaacgtaatcgtggcaaatacgatgcccactcacctcagcaacggacagatgtgcgaatggcctcggccacgcggccaagccgctacccccgagacaccgcagccttctcccccaggcgggtccggaagcgaaccttataagctgcttcccggtgcggtcgcaactattgtgaagccattgtcagccatcccccagcctaccataacaaaacaggaggttatttgaggactagtccctgttcccagagcccacttttttttctttttttgaaataaaatagcctgtctttcagatctaaaaaaaaaaaaaaaaaaaaaaaaaaaaaaaaaaaaaaaaaaaaaaaaaaaaaaaaaaaaaaaaaaaaaaaaaaaaaaaaaaaaaaaaaaaaaaaaaaaa

SEQ ID NO: 5270 - RNA, 1562 nt, synthetic construct
  misc_feature 1..1562: note = mRNA a-1 (A100) (opt3) from Homo sapiens__NP_000448.3__HNF4A(39-474)(S313A)
  source 1..1562: mol_type = other RNA
aggagagtcccgcagtcggcgtccagcggctctgcttgttcgtgtgtgtgtcgttgcaggccttattcaagcttaccatggacacctctccttcagaggggacaaacttaaatgcgccaaacagtctgggagtgagcgctctatgcgccatctgtggtgatagggcaactggcaaacactacggggcctcctcttgcgacggatgtaagggctttttccggcgctcggtacgtaaaaatcatatgtattcatgccgatttagcagacaatgtgtggtcgataaggacaaaaggaaccagtgccggtactgtcgcctcaagaagtgcttcagagctggtatgaaaaaggaagcagtgcagaatgagagggatcggattagtacccgccgatcctcttatgaagacagctccctgccgtcaataaacgcccttctgcaggctgaggttttgagtagacaaatcacaagccccgtgtctgggattaatggagatatcagggccaaaaagattgcgtccatcgcagacgtctgtgagtcaatgaaagaacagctcctggtgctggtagagtgggccaagtacatacctgctttttgcgaactcccattagatgaccaggttgccctgcttcgggcacacgctggcgagcatttgctgctaggcgccaccaagcgtagcatggtgttcaaagacgtcctcctgcttgggaacgattatatcgtgccccgccactgtcctgagctggcggaaatgagtagagtgtctattaggatcttggacgagctcgtcctgccatttcaggaattacaaattgatgacaatgagtacgcctacctgaaggcaatcatattctttgatcccgacgctaaaggactctccgatcctggtaagattaaacggcttcgagcccaggttcaggtgagcctggaagactatatcaacgatcgccagtacgactcgagaggcaggttcggggagttgctactgctcctgccaactcttcaatctattacatggcagatgatcgagcagatccaatttattaagctgttcggaatggctaaaatagataatttgctccaggaaatgctgttaggcggttccccgtcagacgcaccccatgcccaccaccctctgcatccacacctaatgcaggagcatatggggaccaacgtaatcgtggccaatacgatgcccactcacctcagtaacggacagatgtgcgaatggcctcggccacgcggccaagctgcgacccccgagacaccgcagcctagcccacccggcgggtccggatctgaaccttataagctgcttcccggtgcagtcgccactattgtgaagccattgagcgctatcccccagcctaccataacaaaacaggaggttatttgaggactagtccctgttcccagagcccacttttttttctttttttgaaataaaatagcctgtctttcagatctaaaaaaaaaaaaaaaaaaaaaaaaaaaaaaaaaaaaaaaaaaaaaaaaaaaaaaaaaaaaaaaaaaaaaaaaaaaaaaaaaaaaaaaaaaaaaaaaaaaa

SEQ ID NO: 5271 - RNA, 1562 nt, synthetic construct
  misc_feature 1..1562: note = mRNA a-1 (A100) (opt3) from Homo sapiens__NP_000448.3__HNF4A(39-474)(S313E)
  source 1..1562: mol_type = other RNA
aggagagtcccgcagtcggcgtccagcggctctgcttgttcgtgtgtgtgtcgttgcaggccttattcaagcttaccatggacacctctccttcagaggggacaaacttaaatgcgccaaacagtctgggagtgagcgctctatgcgccatctgtggtgatagggcaactggcaaacactacggggcctcctcttgcgacggatgtaagggctttttccggcgctcggtacgtaaaaatcatatgtattcatgccgatttagcagacaatgtgtggtcgataaggacaaaaggaaccagtgccggtactgtcgcctcaagaagtgcttcagagctggtatgaaaaaggaagcagtgcagaatgagagggatcggattagtacccgccgatcctcttatgaagacagctccctgccgtcaataaacgcccttctgcaggctgaggttttgagtagacaaatcacaagccccgtgtctgggattaatggagatatcagggccaaaaagattgcgtccatcgcagacgtctgtgagtcaatgaaagaacagctcctggtgctggtagagtgggccaagtacatacctgctttttgcgaactcccattagatgaccaggttgccctgcttcgggcacacgctggcgagcatttgctgctaggcgccaccaagcgtagcatggtgttcaaagacgtcctcctgcttgggaacgattatatcgtgccccgccactgtcctgagctggcggaaatgagtagagtgtctattaggatcttggacgagctcgtcctgccatttcaggaattacaaattgatgacaatgagtacgcctacctgaaggcaatcatattctttgatcccgacgctaaaggactctccgatcctggtaagattaaacggcttcgagaacaggttcaggtgagcctggaggactatatcaacgatcgccagtacgactcgagaggcaggttcggggagttgctactgctcctgccaactcttcaatctattacatggcagatgatcgaacagatccaatttattaagctgttcggaatggccaaaatagataatttgctccaggagatgctgttaggcggttccccgtcagacgctccccatgcccaccaccctctgcatccacacctaatgcaggaacatatggggaccaacgtaatcgtggcaaatacgatgcccactcacctcagtaacggacagatgtgcgagtggcctcggccacgcggccaagccgctacccccgaaacaccgcagcctagcccacccggcgggtccggatctgagccttataagctgcttcccggtgcggtcgcaactattgtgaagccattgagcgccatcccccagcctaccataacaaaacaggaggttatttgaggactagtccctgttcccagagcccacttttttttctttttttgaaataaaatagcctgtctttcagatctaaaaaaaaaaaaaaaaaaaaaaaaaaaaaaaaaaaaaaaaaaaaaaaaaaaaaaaaaaaaaaaaaaaaaaaaaaaaaaaaaaaaaaaaaaaaaaaaaaaa

SEQ ID NO: 5272 - RNA, 1562 nt, synthetic construct
  misc_feature 1..1562: note = mRNA a-1 (A100) (opt3) from Homo sapiens__NP_000448.3__HNF4A(39-474)(S142A_S143A)
  source 1..1562: mol_type = other RNA
aggagagtcccgcagtcggcgtccagcggctctgcttgttcgtgtgtgtgtcgttgcaggccttattcaagcttaccatggacacctctccttcagaggggacaaacttaaatgcgccaaacagtctgggagtgagcgctctatgcgccatctgtggtgatagggcaactggcaaacactacggggcctcctcttgcgacggatgtaagggctttttccggcgctcggtacgtaaaaatcatatgtattcatgccgatttagcagacaatgtgtggtcgataaggacaaaaggaaccagtgccggtactgtcgcctcaagaagtgcttcagagctggtatgaaaaaggaagcagtgcagaatgagagggatcggattagtacccgccgagccgcttatgaagactcctctctgccgagcataaacgcccttctgcaggcggaggttttgtccagacaaatcacatcacccgtgagtgggattaatggagatatcagggccaaaaagattgcaagcatcgctgacgtctgtgagtctatgaaagaacagctcctggtgctggtagagtgggccaagtacatacctgcattttgcgaactcccattagatgaccaggttgctctgcttcgggcccacgcgggcgagcatttgctgctaggcgccaccaagcgttccatggtgttcaaagacgtcctcctgcttgggaacgattatatcgtgccccgccactgtcctgagctggcagaaatgtcaagagtgagcattaggatcttggacgagctcgtcctgccatttcaggaattacaaattgatgacaatgagtacgcttacctgaaggccatcatattctttgatcccgacgctaaaggactcagtgatcctggtaagattaaacggcttcgatctcaggttcaggtgtccctggaagactatatcaacgatcgccagtacgacagcagaggcaggttcggggagttgctactgctcctgccaactcttcaatcgattacatggcagatgatcgagcagatccaatttattaagctgttcggaatggccaaaatagataatttgctccaggaaatgctgttaggcggttctccgtccgacgcaccccatgcccaccaccctctgcatccacacctaatgcaggagcatatggggaccaacgtaatcgtggctaatacgatgcccactcacctctcaaacggacagatgtgcgaatggcctcggccacgcggccaagcggcaacccccgagacaccgcagcctagtcccccaggcgggagcggatccgaaccttataagctgcttcccggtgccgtcgctactattgtgaagccattgtctgccatcccccagcctaccataacaaaacaggaggttatttgaggactagtccctgttcccagagcccacttttttttctttttttgaaataaaatagcctgtctttcagatctaaaaaaaaaaaaaaaaaaaaaaaaaaaaaaaaaaaaaaaaaaaaaaaaaaaaaaaaaaaaaaaaaaaaaaaaaaaaaaaaaaaaaaaaaaaaaaaaaaaa

SEQ ID NO: 5273 - RNA, 1562 nt, synthetic construct
  misc_feature 1..1562: note = mRNA a-1 (A100) (opt3) from Homo sapiens__NP_000448.3__HNF4A(39-474)(S142E_S143E)
  source 1..1562: mol_type = other RNA
aggagagtcccgcagtcggcgtccagcggctctgcttgttcgtgtgtgtgtcgttgcaggccttattcaagcttaccatggacacctctccttcagaggggacaaacttaaatgcgccaaacagtctgggagtgagcgctctatgcgccatctgtggtgatagggcaactggcaaacactacggggcctcctcttgcgacggatgtaagggctttttccggcgctcggtacgtaaaaatcatatgtattcatgccgatttagcagacaatgtgtggtcgataaggacaaaaggaaccagtgccggtactgtcgcctcaagaagtgcttcagagctggtatgaaaaaggaagcagtgcagaatgagagggatcggattagtacccgccgagaagagtatgaggactcctctctgccgagcataaacgcccttctgcaggctgaagttttgtccagacaaatcacatcacccgtgagtgggattaatggagatatcagggccaaaaagattgcgagcatcgcagacgtctgtgagtctatgaaagaacagctcctggtgctggtagagtgggccaagtacatacctgctttttgcgagctcccattagatgaccaggttgccctgcttcgggcacacgctggcgaacatttgctgctaggcgccaccaagcgttccatggtgttcaaagacgtcctcctgcttgggaacgattatatcgtgccccgccactgtcctgagctggcggaaatgtcaagagtgagcattaggatcttggacgagctcgtcctgccatttcaggaattacaaattgatgacaatgagtacgcctacctgaaggcaatcatattctttgatcccgacgctaaaggactcagtgatcctggtaagattaaacggcttcgatctcaggttcaggtgtccctggaggactatatcaacgatcgccagtacgacagcagaggcaggttcggggaattgctactgctcctgccaactcttcaatcgattacatggcagatgatcgagcagatccaatttattaagctgttcggaatggccaaaatagataatttgctccaggaaatgctgttaggcggttctccgtccgacgctccccatgcccaccaccctctgcatccacacctaatgcaggagcatatggggaccaacgtaatcgtggcaaatacgatgcccactcacctctcaaacggacagatgtgcgaatggcctcggccacgcggccaagccgctacccccgagacaccgcagcctagtcccccaggcgggagcggatccgagccttataagctgcttcccggtgcggtcgcaactattgtgaagccattgtctgccatcccccagcctaccataacaaaacaggaagttatttgaggactagtccctgttcccagagcccacttttttttctttttttgaaataaaatagcctgtctttcagatctaaaaaaaaaaaaaaaaaaaaaaaaaaaaaaaaaaaaaaaaaaaaaaaaaaaaaaaaaaaaaaaaaaaaaaaaaaaaaaaaaaaaaaaaaaaaaaaaaaaa

SEQ ID NO: 5274 - RNA, 1562 nt, synthetic construct
  misc_feature 1..1562: note = mRNA a-1 (A100) (opt3) from Homo sapiens__NP_000448.3__HNF4A(39-474)(S143A)
  source 1..1562: mol_type = other RNA
aggagagtcccgcagtcggcgtccagcggctctgcttgttcgtgtgtgtgtcgttgcaggccttattcaagcttaccatggacacctctccttcagaggggacaaacttaaatgcgccaaacagtctgggagtgagcgctctatgcgccatctgtggtgatagggcaactggcaaacactacggggcctcctcttgcgacggatgtaagggctttttccggcgctcggtacgtaaaaatcatatgtattcatgccgatttagcagacaatgtgtggtcgataaggacaaaaggaaccagtgccggtactgtcgcctcaagaagtgcttcagagctggtatgaaaaaggaagcagtgcagaatgagagggatcggattagtacccgccgatccgcctatgaagactctagcctgccgtccataaacgcccttctgcaggccgaggttttgtcaagacaaatcacaagtcccgtgagcgggattaatggagatatcagggcgaaaaagattgcatctatcgccgacgtctgtgagtccatgaaagaacagctcctggtgctggtagagtgggctaagtacatacctgccttttgcgaactcccattagatgaccaggttgcactgcttcgggctcacgccggcgagcatttgctgctaggcgcgaccaagcgttcaatggtgttcaaagacgtcctcctgcttgggaacgattatatcgtgccccgccactgtcctgagctggccgaaatgagcagagtgagtattaggatcttggacgagctcgtcctgccatttcaggaattacaaattgatgacaatgagtacgcatacctgaaggctatcatattctttgatcccgacgccaaaggactctctgatcctggtaagattaaacggcttcgatcccaggttcaggtgagcctggaagactatatcaacgatcgccagtacgactcgagaggcaggttcggggagttgctactgctcctgccaactcttcaatctattacatggcagatgatcgagcagatccaatttattaagctgttcggaatggctaaaatagataatttgctccaggaaatgctgttaggcggttccccgtcagacgctccccatgcacaccaccctctgcatccacacctaatgcaggagcatatggggaccaacgtaatcgtggccaatacgatgcccactcacctcagtaacggacagatgtgcgaatggcctcggccacgcggccaagctgcgacccccgagacaccgcagcctagcccacccggcgggtccggatctgaaccttataagctgcttcccggtgcagtcgccactattgtgaagccattgagcgctatcccccagcctaccataacaaaacaggaggttatttgaggactagtccctgttcccagagcccacttttttttctttttttgaaataaaatagcctgtctttcagatctaaaaaaaaaaaaaaaaaaaaaaaaaaaaaaaaaaaaaaaaaaaaaaaaaaaaaaaaaaaaaaaaaaaaaaaaaaaaaaaaaaaaaaaaaaaaaaaaaaaa

SEQ ID NO: 5275 - RNA, 1562 nt, synthetic construct
  misc_feature 1..1562: note = mRNA a-1 (A100) (opt3) from Homo sapiens__NP_000448.3__HNF4A(39-474)(T166A)
  source 1..1562: mol_type = other RNA
aggagagtcccgcagtcggcgtccagcggctctgcttgttcgtgtgtgtgtcgttgcaggccttattcaagcttaccatggacacctctccttcagaggggacaaacttaaatgcgccaaacagtctgggagtgagcgctctatgcgccatctgtggtgatagggcaactggcaaacactacggggcctcctcttgcgacggatgtaagggctttttccggcgctcggtacgtaaaaatcatatgtattcatgccgatttagcagacaatgtgtggtcgataaggacaaaaggaaccagtgccggtactgtcgcctcaagaagtgcttcagagctggtatgaaaaaggaagcagtgcagaatgagagggatcggattagtacccgccgatcctcttatgaagacagctccctgccgtcaataaacgcccttctgcaggctgaggttttgagtagacaaatcgccagccccgtgtctgggattaatggagatatcagggcgaaaaagattgcatccatcgccgacgtctgtgagtcaatgaaagaacagctcctggtgctggtagagtgggctaagtacatacctgccttttgcgaactcccattagatgaccaggttgcactgcttcgggctcacgccggcgagcatttgctgctaggcgcgacaaagcgtagcatggtgttcaaagacgtcctcctgcttgggaacgattatatcgtgccccgccactgtcctgagctggccgaaatgagtagagtgtctattaggatcttggacgagctcgtcctgccatttcaggaattacaaattgatgacaatgagtacgcatacctgaaggctatcatattctttgatcccgacgccaaaggactctccgatcctggtaagattaaacggcttcgaagccaggttcaggtgtcgctggaagactatatcaacgatcgccagtacgactctagaggcaggttcggggagttgctactgctcctgccaacccttcaatccattacttggcagatgatcgagcagatccaatttattaagctgttcggaatggctaaaatagataatttgctccaggaaatgctgttaggcggttcaccgagtgacgcaccccatgcccaccaccctctgcatccacacctaatgcaggagcatatggggacaaacgtaatcgtggccaataccatgcccacgcacctcagcaacggacagatgtgcgaatggcctcggccacgcggccaagctgcgactcccgagaccccgcagccttctcccccaggcgggtccggaagcgaaccttataagctgcttcccggtgcagtcgccacaattgtgaagccattgtcagctatcccccagcctactataaccaaacaggaggttatttgaggactagtccctgttcccagagcccacttttttttctttttttgaaataaaatagcctgtctttcagatctaaaaaaaaaaaaaaaaaaaaaaaaaaaaaaaaaaaaaaaaaaaaaaaaaaaaaaaaaaaaaaaaaaaaaaaaaaaaaaaaaaaaaaaaaaaaaaaaaaaa

SEQ ID NO: 5276 - RNA, 1562 nt, synthetic construct
  misc_feature 1..1562: note = mRNA a-1 (A100) (opt3) from Homo sapiens__NP_000448.3__HNF4A(39-474)(S167E)
  source 1..1562: mol_type = other RNA
aggagagtcccgcagtcggcgtccagcggctctgcttgttcgtgtgtgtgtcgttgcaggccttattcaagcttaccatggacacctctccttcagaggggacaaacttaaatgcgccaaacagtctgggagtgagcgctctatgcgccatctgtggtgatagggcaactggcaaacactacggggcctcctcttgcgacggatgtaagggctttttccggcgctcggtacgtaaaaatcatatgtattcatgccgatttagcagacaatgtgtggtcgataaggacaaaaggaaccagtgccggtactgtcgcctcaagaagtgcttcagagctggtatgaaaaaggaagcagtgcagaatgagagggatcggattagtacccgccgatcctcttatgaagacagctccctgccgtcaataaacgcccttctgcaggctgaggttttgagtagacaaatcacagagcccgtgagcgggattaatggagatatcagggccaaaaagattgcgtctatcgcagacgtctgtgaatccatgaaagagcagctcctggtgctggtagaatgggccaagtacatacctgctttttgcgagctcccattagatgaccaggttgccctgcttcgggcacacgctggcgagcatttgctgctaggcgccaccaagcgttcaatggtgttcaaagacgtcctcctgcttgggaacgattatatcgtgccccgccactgtcctgaactggcggagatgagcagagtgagtattaggatcttggacgaactcgtcctgccatttcaggagttacaaattgatgacaatgaatacgcctacctgaaggcaatcatattctttgatcccgacgctaaaggactctctgatcctggtaagattaaacggcttcgatcccaggttcaggtgagcctggaggactatatcaacgatcgccagtacgactcgagaggcaggttcggggagttgctactgctcctgccaactcttcaatctattacatggcagatgatcgaacagatccaatttattaagctgttcggaatggccaaaatagataatttgctccaggagatgctgttaggcggttccccgtcagacgctccccatgcccaccaccctctgcatccacacctaatgcaggaacatatggggaccaacgtaatcgtggcaaatacgatgcccactcacctcagtaacggacagatgtgcgagtggcctcggccacgcggccaagccgctacccccgaaacaccgcagcctagcccacccggcgggtccggatctgagccttataagctgcttcccggtgcggtcgcaactattgtgaagccattgagcgccatcccccagcctaccataacaaaacaggaggttatttgaggactagtccctgttcccagagcccacttttttttctttttttgaaataaaatagcctgtctttcagatctaaaaaaaaaaaaaaaaaaaaaaaaaaaaaaaaaaaaaaaaaaaaaaaaaaaaaaaaaaaaaaaaaaaaaaaaaaaaaaaaaaaaaaaaaaaaaaaaaaaa

SEQ ID NO: 5277 - RNA, 1562 nt, synthetic construct
  misc_feature 1..1562: note = mRNA a-1 (A100) (opt3) from Homo sapiens__NP_000448.3__HNF4A(39-474)(S167A)
  source 1..1562: mol_type = other RNA
aggagagtcccgcagtcggcgtccagcggctctgcttgttcgtgtgtgtgtcgttgcaggccttattcaagcttaccatggacacctctccttcagaggggacaaacttaaatgcgccaaacagtctgggagtgagcgctctatgcgccatctgtggtgatagggcaactggcaaacactacggggcctcctcttgcgacggatgtaagggctttttccggcgctcggtacgtaaaaatcatatgtattcatgccgatttagcagacaatgtgtggtcgataaggacaaaaggaaccagtgccggtactgtcgcctcaagaagtgcttcagagctggtatgaaaaaggaagcagtgcagaatgagagggatcggattagtacccgccgatcctcttatgaagacagctccctgccgtcaataaacgcccttctgcaggctgaggttttgagtagacaaatcacagcccccgtgagcgggattaatggagatatcagggcgaaaaagattgcatctatcgccgacgtctgtgagtccatgaaagaacagctcctggtgctggtagagtgggctaagtacatacctgccttttgcgaactcccattagatgaccaggttgcactgcttcgggctcacgccggcgagcatttgctgctaggcgcgaccaagcgttcaatggtgttcaaagacgtcctcctgcttgggaacgattatatcgtgccccgccactgtcctgagctggccgaaatgagcagagtgagtattaggatcttggacgagctcgtcctgccatttcaggaattacaaattgatgacaatgagtacgcatacctgaaggctatcatattctttgatcccgacgccaaaggactctctgatcctggtaagattaaacggcttcgatcccaggttcaggtgagcctggaagactatatcaacgatcgccagtacgactcgagaggcaggttcggggagttgctactgctcctgccaactcttcaatctattacatggcagatgatcgagcagatccaatttattaagctgttcggaatggctaaaatagataatttgctccaggaaatgctgttaggcggttccccgtcagacgcaccccatgcccaccaccctctgcatccacacctaatgcaggagcatatggggaccaacgtaatcgtggccaatacgatgcccactcacctcagtaacggacagatgtgcgaatggcctcggccacgcggccaagctgcgacccccgagacaccgcagcctagcccacccggcgggtccggatctgaaccttataagctgcttcccggtgcagtcgccactattgtgaagccattgagcgctatcccccagcctaccataacaaaacaggaggttatttgaggactagtccctgttcccagagcccacttttttttctttttttgaaataaaatagcctgtctttcagatctaaaaaaaaaaaaaaaaaaaaaaaaaaaaaaaaaaaaaaaaaaaaaaaaaaaaaaaaaaaaaaaaaaaaaaaaaaaaaaaaaaaaaaaaaaaaaaaaaaaa

SEQ ID NO: 5278 - RNA, 1562 nt, synthetic construct
  misc_feature 1..1562: note = mRNA a-1 (A100) (opt3) from Homo sapiens__NP_000448.3__HNF4A(39-474)(S167A_S378A_T429A_T432A _S436A)
  source 1..1562: mol_type = other RNA
aggagagtcccgcagtcggcgtccagcggctctgcttgttcgtgtgtgtgtcgttgcaggccttattcaagcttaccatggacacctctccttcagaggggacaaacttaaatgcgccaaacagtctgggagtgagcgctctatgcgccatctgtggtgatagggcaactggcaaacactacggggcctcctcttgcgacggatgtaagggctttttccggcgctcggtacgtaaaaatcatatgtattcatgccgatttagcagacaatgtgtggtcgataaggacaaaaggaaccagtgccggtactgtcgcctcaagaagtgcttcagagctggtatgaaaaaggaagcagtgcagaatgagagggatcggattagtacccgccgatcctcttatgaagacagctccctgccgtcaataaacgcccttctgcaggctgaggttttgagtagacaaatcacagcccccgtgagcgggattaatggagatatcagggcgaaaaagattgcatctatcgccgacgtctgtgagtccatgaaagaacagctcctggtgctggtagagtgggctaagtacatacctgccttttgcgaactcccattagatgaccaggttgcactgcttcgggctcacgccggcgagcatttgctgctaggcgcgaccaagcgttcaatggtgttcaaagacgtcctcctgcttgggaacgattatatcgtgccccgccactgtcctgagctggccgaaatgagcagagtgagtattaggatcttggacgagctcgtcctgccatttcaggaattacaaattgatgacaatgagtacgcatacctgaaggctatcatattctttgatcccgacgccaaaggactctctgatcctggtaagattaaacggcttcgatcccaggttcaggtgagcctggaagactatatcaacgatcgccagtacgactcgagaggcaggttcggggagttgctactgctcctgccaactcttcaatctattacatggcagatgatcgagcagatccaatttattaagctgttcggaatggctaaaatagataatttgctccaggaaatgctgttaggcggtgccccgtccgacgcaccccatgcccaccaccctctgcatccacacctaatgcaggagcatatggggaccaacgtaatcgtggctaatacgatgcccactcacctctcaaacggacagatgtgcgaatggcctcggccacgcggccaagcggcagcccccgaggctccgcagcctgcacccccaggcgggagtggaagcgaaccttataagctgcttcccggtgccgtcgccaccattgtgaagccattgtccgctatcccccagcctacaataactaaacaggaggttatttgaggactagtccctgttcccagagcccacttttttttctttttttgaaataaaatagcctgtctttcagatctaaaaaaaaaaaaaaaaaaaaaaaaaaaaaaaaaaaaaaaaaaaaaaaaaaaaaaaaaaaaaaaaaaaaaaaaaaaaaaaaaaaaaaaaaaaaaaaaaaaa

SEQ ID NO: 5279 - RNA, 1562 nt, synthetic construct
  misc_feature 1..1562: note = mRNA a-1 (A100) (opt3) from Homo sapiens__NP_000448.3__HNF4A(39-474)(S167E_S378E_T429E_T432E _S436E)
  source 1..1562: mol_type = other RNA
aggagagtcccgcagtcggcgtccagcggctctgcttgttcgtgtgtgtgtcgttgcaggccttattcaagcttaccatggacacctctccttcagaggggacaaacttaaatgcgccaaacagtctgggagtgagcgctctatgcgccatctgtggtgatagggcaactggcaaacactacggggcctcctcttgcgacggatgtaagggctttttccggcgctcggtacgtaaaaatcatatgtattcatgccgatttagcagacaatgtgtggtcgataaggacaaaaggaaccagtgccggtactgtcgcctcaagaagtgcttcagagctggtatgaaaaaggaagcagtgcagaatgagagggatcggattagtacccgccgatcctcttatgaagacagctccctgccgtcaataaacgcccttctgcaggctgaggttttgagtagacaaatcacagagcccgtgagcgggattaatggagatatcagggccaaaaagattgcgtctatcgcagacgtctgtgaatccatgaaagagcagctcctggtgctggtagaatgggccaagtacatacctgctttttgcgagctcccattagatgaccaggttgccctgcttcgggcacacgctggcgagcatttgctgctaggcgccaccaagcgttcaatggtgttcaaagacgtcctcctgcttgggaacgattatatcgtgccccgccactgtcctgaactggcggagatgagcagagtgagtattaggatcttggacgaactcgtcctgccatttcaggagttacaaattgatgacaatgaatacgcctacctgaaggcaatcatattctttgatcccgacgctaaaggactctctgatcctggtaagattaaacggcttcgatcccaggttcaggtgagcctggaggactatatcaacgatcgccagtacgactcgagaggcaggttcggggagttgctactgctcctgccaactcttcaatctattacatggcagatgatcgaacagatccaatttattaagctgttcggaatggccaaaatagataatttgctccaggagatgctgttaggcggtgaaccgtccgacgctccccatgcccaccaccctctgcatccacacctaatgcaggagcatatggggaccaacgtaatcgtggcaaatacgatgcccactcacctctcaaacggacagatgtgcgaatggcctcggccacgcggccaagccgctgagcccgaggaaccgcagcctgagcccccaggcgggagtggaagcgaaccttataagctgcttcccggtgcggtcgcaaccattgtgaagccattgtccgccatcccccagcctacaataactaaacaggaggttatttgaggactagtccctgttcccagagcccacttttttttctttttttgaaataaaatagcctgtctttcagatctaaaaaaaaaaaaaaaaaaaaaaaaaaaaaaaaaaaaaaaaaaaaaaaaaaaaaaaaaaaaaaaaaaaaaaaaaaaaaaaaaaaaaaaaaaaaaaaaaaaa

SEQ ID NO: 5280 - RNA, 1562 nt, synthetic construct
  misc_feature 1..1562: note = mRNA a-1 (A100) (opt3) from Homo sapiens__NP_000448.3__HNF4A(39-474)(S87A)
  source 1..1562: mol_type = other RNA
aggagagtcccgcagtcggcgtccagcggctctgcttgttcgtgtgtgtgtcgttgcaggccttattcaagcttaccatggacacctctccttcagaggggacaaacttaaatgcgccaaacagtctgggagtgagcgctctatgcgccatctgtggtgatagggcaactggcaaacactacggggcctcctcttgcgacggatgtaagggctttttccggcgcgctgtacgtaaaaatcatatgtattcgtgccgattttcaagacaatgtgtggtcgataaggacaaaaggaaccagtgccggtactgtcgcctcaagaagtgcttcagagcaggtatgaaaaaggaagccgtgcagaatgagagggatcggattagcacccgccgaagttcctatgaagactctagcctgccgtccataaacgcccttctgcaggccgaggttttgtcaagacaaatcacaagtcccgtgagcgggattaatggagatatcagggcgaaaaagattgcatctatcgccgacgtctgtgagtccatgaaagaacagctcctggtgctggtagagtgggctaagtacatacctgccttttgcgaactcccattagatgaccaggttgcactgcttcgggctcacgccggcgagcatttgctgctaggcgcgaccaagcgttcaatggtgttcaaagacgtcctcctgcttgggaacgattatatcgtgccccgccactgtcctgagctggccgaaatgagcagagtgagtattaggatcttggacgagctcgtcctgccatttcaggaattacaaattgatgacaatgagtacgcatacctgaaggctatcatattctttgatcccgacgccaaaggactctctgatcctggtaagattaaacggcttcgatcccaggttcaggtgagcctggaagactatatcaacgatcgccagtacgactcgagaggcaggttcggggagttgctactgctcctgccaactcttcaatctattacatggcagatgatcgagcagatccaatttattaagctgttcggaatggctaaaatagataatttgctccaggaaatgctgttaggcggttccccgtcagacgctccccatgcacaccaccctctgcatccacacctaatgcaggagcatatggggaccaacgtaatcgtggccaatacgatgcccactcacctcagtaacggacagatgtgcgaatggcctcggccacgcggccaagctgcgacccccgagacaccgcagcctagcccacccggcgggtccggatctgaaccttataagctgcttcccggtgcagtcgccactattgtgaagccattgagcgctatcccccagcctaccataacaaaacaggaggttatttgaggactagtccctgttcccagagcccacttttttttctttttttgaaataaaatagcctgtctttcagatctaaaaaaaaaaaaaaaaaaaaaaaaaaaaaaaaaaaaaaaaaaaaaaaaaaaaaaaaaaaaaaaaaaaaaaaaaaaaaaaaaaaaaaaaaaaaaaaaaaaa

SEQ ID NO: 5281 - RNA, 1562 nt, synthetic construct
  misc_feature 1..1562: note = mRNA a-1 (A100) (opt3) from Homo sapiens__NP_000448.3__HNF4A(39-474)(S87E)
  source 1..1562: mol_type = other RNA
aggagagtcccgcagtcggcgtccagcggctctgcttgttcgtgtgtgtgtcgttgcaggccttattcaagcttaccatggacacctctccttcagaggggacaaacttaaatgcgccaaacagtctgggagtgagcgctctatgcgccatctgtggtgatagggcaactggcaaacactacggggcctcctcttgcgacggatgtaagggctttttccggcgcgaagtacgtaaaaatcatatgtattcgtgccgattttcaagacaatgtgtggtcgataaggacaaaaggaaccagtgccggtactgtcgcctcaagaagtgcttcagagctggtatgaaaaaggaggcagtgcagaatgaaagggatcggattagcacccgccgaagttcctatgaggactctagcctgccgtccataaacgcccttctgcaggctgaggttttgtcaagacaaatcacaagtcccgtgagcgggattaatggagatatcagggccaaaaagattgcgtctatcgcagacgtctgtgaatccatgaaagagcagctcctggtgctggtagaatgggccaagtacatacctgctttttgcgagctcccattagatgaccaggttgccctgcttcgggcacacgctggcgagcatttgctgctaggcgccaccaagcgttcaatggtgttcaaagacgtcctcctgcttgggaacgattatatcgtgccccgccactgtcctgaactggcggagatgagcagagtgagtattaggatcttggacgaactcgtcctgccatttcaggagttacaaattgatgacaatgaatacgcctacctgaaggcaatcatattctttgatcccgacgctaaaggactctctgatcctggtaagattaaacggcttcgatcccaggttcaggtgagcctggaggactatatcaacgatcgccagtacgactcgagaggcaggttcggggagttgctactgctcctgccaactcttcaatctattacatggcagatgatcgaacagatccaatttattaagctgttcggaatggccaaaatagataatttgctccaggagatgctgttaggcggttccccgtcagacgctccccatgcccaccaccctctgcatccacacctaatgcaggaacatatggggaccaacgtaatcgtggcaaatacgatgcccactcacctcagtaacggacagatgtgcgagtggcctcggccacgcggccaagccgctacccccgaaacaccgcagcctagcccacccggcgggtccggatctgagccttataagctgcttcccggtgcggtcgcaactattgtgaagccattgagcgccatcccccagcctaccataacaaaacaggaggttatttgaggactagtccctgttcccagagcccacttttttttctttttttgaaataaaatagcctgtctttcagatctaaaaaaaaaaaaaaaaaaaaaaaaaaaaaaaaaaaaaaaaaaaaaaaaaaaaaaaaaaaaaaaaaaaaaaaaaaaaaaaaaaaaaaaaaaaaaaaaaaaa

SEQ ID NO: 5282 - RNA, 1562 nt, synthetic construct
  misc_feature 1..1562: note = mRNA a-1 (A100) (opt3) from Homo sapiens__NP_000448.3__HNF4A(39-474)(R2V)
  source 1..1562: mol_type = other RNA
aggagagtcccgcagtcggcgtccagcggctctgcttgttcgtgtgtgtgtcgttgcaggccttattcaagcttaccatggacacctctccttcagaggggacaaacttaaatgcgccaaacagtctgggagtaagcgctctatgcgccatctgtggtgatagagcaactggcaaacactacggggcctcctcttgcgacggatgtaagggctttttcaggcggtcggtgcgcaaaaatcatatgtattcatgccgatttagccgtcaatgtgtcgtggataaggacaaaagaaaccagtgcaggtactgtcggctcaagaagtgcttccgcgctggtatgaaaaaggaagcagttcagaatgagagagataggattagtacccggcgctcctcttatgaagacagctccctgccgtcaataaacgcccttctgcaggctgaggtgttgagtcgacaaatcacaagccccgtctctgggattaatggagatatcagagccaaaaagattgcgtccatcgcagacgtgtgtgagtcaatgaaagaacagctcctggtactggttgagtgggccaagtacatacctgctttttgcgaactcccattagatgaccaggtggccctgcttagggcacacgctggcgagcatttgctgctaggcgccaccaagcggagcatggtcttcaaagacgtgctcctgcttgggaacgattatatcgtgccccgtcactgtcctgagctggcggaaatgagtcgcgtctctattagaatcttggacgagctcgttctgccatttcaggaattacaaattgatgacaatgagtacgcctacctgaaggcaatcatattctttgatcccgacgctaaaggactctccgatcctggtaagattaaaaggcttcggagccaggtgcaggtatcgctggaagactatatcaacgatcgacagtacgactctcgcggcagattcggggagttgctactgctcctgccaactcttcaatccattacatggcagatgatcgagcagatccaatttattaagctgttcggaatggccaaaatagataatttgctccaggaaatgctgttaggcggttcaccgagtgacgctccccatgcccaccaccctctgcatccacacctaatgcaggagcatatggggaccaacgtgatcgtcgcaaatacgatgcccactcacctcagcaacggacagatgtgcgaatggcctaggccacggggccaagccgctacccccgagacaccgcagccttctcccccaggcgggtccggaagcgaaccttataagctgcttcccggtgcggtggcaactattgttaagccattgtcagccatcccccagcctaccataacaaaacaggaggtgatttgaggactagtccctgttcccagagcccacttttttttctttttttgaaataaaatagcctgtctttcagatctaaaaaaaaaaaaaaaaaaaaaaaaaaaaaaaaaaaaaaaaaaaaaaaaaaaaaaaaaaaaaaaaaaaaaaaaaaaaaaaaaaaaaaaaaaaaaaaaaaaa

SEQ ID NO: 5283 - RNA, 1562 nt, synthetic construct
  misc_feature 1..1562: note = mRNA a-1 (A100) (opt3) from Homo sapiens__NP_000448.3__HNF4A(39-474)(R2V_K5V)
  source 1..1562: mol_type = other RNA
aggagagtcccgcagtcggcgtccagcggctctgcttgttcgtgtgtgtgtcgttgcaggccttattcaagcttaccatggacacctctccttcagaggggacaaacttaaatgcgccaaacagtctgggagtgagcgctctatgcgccatctgtggtgatagagcaactggcaagcactacggggcctcctcttgcgacggatgtaaaggctttttcaggcggtcggtccgcaagaatcatatgtattcatgccgatttagccgtcaatgtgtggttgataaagacaagagaaaccagtgcaggtactgtcggctcaaaaagtgcttccgcgctggtatgaagaaagaagcagtgcagaatgagagagataggattagtacccggcgctcctcttatgaagacagctccctgccgtcaataaacgcccttctgcaggctgaggtcttgagtcgacaaatcacaagccccgtgtctgggattaatggagatatcagagccaagaaaattgcgtccatcgcagacgtatgtgagtcaatgaaggaacagctcctggttctggtggagtgggccaaatacatacctgctttttgcgaactcccattagatgaccaggtcgccctgcttagggcacacgctggcgagcatttgctgctaggcgccaccaagcggagcatggtgttcaaggacgtgctcctgcttgggaacgattatatcgtcccccgtcactgtcctgagctggcggaaatgagtcgcgtttctattagaatcttggacgagctcgtgctgccatttcaggaattacaaattgatgacaatgagtacgcctacctgaaagcaatcatattctttgatcccgacgctaagggactctccgatcctggtaaaattaagaggcttcggagccaggtacaggtgtcgctggaagactatatcaacgatcgacagtacgactctcgcggcagattcggggagttgctactgctcctgccaactcttcaatccattacatggcagatgatcgagcagatccaatttattaaactgttcggaatggccaagatagataatttgctccaggaaatgctgttaggcggttcaccgagtgacgctccccatgcccaccaccctctgcatccacacctaatgcaggagcatatggggaccaacgtcatcgtggcaaatacgatgcccactcacctcagcaacggacagatgtgcgaatggcctaggccacggggccaagccgctacccccgagacaccgcagccttctcccccaggcgggtccggaagcgaaccttataaactgcttcccggtgcggttgcaactattgtgaagccattgtcagccatcccccagcctaccataacaaagcaggaggtcatttgaggactagtccctgttcccagagcccacttttttttctttttttgaaataaaatagcctgtctttcagatctaaaaaaaaaaaaaaaaaaaaaaaaaaaaaaaaaaaaaaaaaaaaaaaaaaaaaaaaaaaaaaaaaaaaaaaaaaaaaaaaaaaaaaaaaaaaaaaaaaaa

SEQ ID NO: 5284 - RNA, 1562 nt, synthetic construct
  misc_feature 1..1562: note = mRNA a-1 (A100) (opt3) from Homo sapiens__NP_000448.3__HNF4A(39-474)(K179R_K180R)
  source 1..1562: mol_type = other RNA
aggagagtcccgcagtcggcgtccagcggctctgcttgttcgtgtgtgtgtcgttgcaggccttattcaagcttaccatggacacctctccttcagaggggacaaacttaaatgcgccaaacagtctgggagtgagcgctctatgcgccatctgtggtgatagggcaactggcaaacactacggggcctcctcttgcgacggatgtaagggctttttccggcgctcggtacgtaaaaatcatatgtattcatgccgatttagcagacaatgtgtggtcgataaggacaaaaggaaccagtgccggtactgtcgcctcaagaagtgcttcagagctggtatgaaaaaggaagcagtgcagaatgagagggatcggattagtacccgccgatcctcttatgaagacagctccctgccgtcaataaacgcccttctgcaggctgaggttttgagtagacaaatcacaagccccgtgtctgggattaatggagatatcagggcccggcgtattgcgtccatcgcagacgtctgtgagtcaatgaaagaacagctcctggtgctggtagagtgggccaagtacatacctgctttttgcgaactcccattagatgaccaggttgccctgcttcgcgcacacgctggcgagcatttgctgctaggcgccaccaaaagaagcatggtgttcaaggacgtcctcctgcttgggaacgattatatcgtgcccaggcactgtcctgagctggcggaaatgagtcgggtgtctattcgaatcttggacgagctcgtcctgccatttcaggaattacaaattgatgacaatgagtacgcctacctgaaggcaatcatattctttgatcccgacgctaaaggactctccgatcctggtaagattaaacgccttagaagccaggttcaggtgtcgctggaagactatatcaacgataggcagtacgactctcggggccgcttcggggagttgctactgctcctgccaactcttcaatccattacatggcagatgatcgagcagatccaatttattaagctgttcggaatggccaaaatagataatttgctccaggaaatgctgttaggcggttcaccgagtgacgctccccatgcccaccaccctctgcatccacacctaatgcaggagcatatggggaccaacgtaatcgtggcaaatacgatgcccactcacctcagcaacggacagatgtgcgaatggcctagaccaaggggccaagccgctacccccgagacaccgcagccttctcccccaggcgggtccggaagcgaaccttataagctgcttcccggtgcggtcgcaactattgtgaaaccattgtcagccatcccccagcctaccataacaaagcaggaggttatttgaggactagtccctgttcccagagcccacttttttttctttttttgaaataaaatagcctgtctttcagatctaaaaaaaaaaaaaaaaaaaaaaaaaaaaaaaaaaaaaaaaaaaaaaaaaaaaaaaaaaaaaaaaaaaaaaaaaaaaaaaaaaaaaaaaaaaaaaaaaaaa

SEQ ID NO: 5285 - RNA, 1562 nt, synthetic construct
  misc_feature 1..1562: note = mRNA a-1 (A100) (opt3) from Homo sapiens__NP_000448.3__HNF4A(39-474)(K234R)
  source 1..1562: mol_type = other RNA
aggagagtcccgcagtcggcgtccagcggctctgcttgttcgtgtgtgtgtcgttgcaggccttattcaagcttaccatggacacctctccttcagaggggacaaacttaaatgcgccaaacagtctgggagtgagcgctctatgcgccatctgtggtgatagggcaactggcaaacactacggggcctcctcttgcgacggatgtaagggctttttccggcgctcggtacgtaaaaatcatatgtattcatgccgatttagcagacaatgtgtggtcgataaggacaaaaggaaccagtgccggtactgtcgcctcaagaagtgcttcagagctggtatgaaaaaggaagcagtgcagaatgagagggatcggattagtacccgccgatcctcttatgaagacagctccctgccgtcaataaacgcccttctgcaggctgaggttttgagtagacaaatcacaagccccgtgtctgggattaatggagatatcagggccaaaaagattgcgtccatcgcagacgtctgtgagtcaatgaaagaacagctcctggtgctggtagagtgggccaagtacatacctgctttttgcgaactcccattagatgaccaggttgccctgcttcgggcacacgctggcgagcatttgctgctaggcgccacccgtcgcagcatggtgttcaaggacgtcctcctgcttgggaacgattatatcgtgcccagacactgtcctgagctggcggaaatgagtagggtgtctattcggatcttggacgagctcgtcctgccatttcaggaattacaaattgatgacaatgagtacgcctacctgaaagcaatcatattctttgatcccgacgctaagggactctccgatcctggtaaaattaagcgacttcgcagccaggttcaggtgtcgctggaagactatatcaacgatagacagtacgactctaggggccggttcggggagttgctactgctcctgccaactcttcaatccattacatggcagatgatcgagcagatccaatttattaaactgttcggaatggccaagatagataatttgctccaggaaatgctgttaggcggttcaccgagtgacgctccccatgcccaccaccctctgcatccacacctaatgcaggagcatatggggaccaacgtaatcgtggcaaatacgatgcccactcacctcagcaacggacagatgtgcgaatggcctcgcccaagaggccaagccgctacccccgagacaccgcagccttctcccccaggcgggtccggaagcgaaccttataaactgcttcccggtgcggtcgcaactattgtgaagccattgtcagccatcccccagcctaccataacaaagcaggaggttatttgaggactagtccctgttcccagagcccacttttttttctttttttgaaataaaatagcctgtctttcagatctaaaaaaaaaaaaaaaaaaaaaaaaaaaaaaaaaaaaaaaaaaaaaaaaaaaaaaaaaaaaaaaaaaaaaaaaaaaaaaaaaaaaaaaaaaaaaaaaaaaa

SEQ ID NO: 5286 - RNA, 1562 nt, synthetic construct
  misc_feature 1..1562: note = mRNA a-1 (A100) (opt3) from Homo sapiens__NP_000448.3__HNF4A(39-474)(K300R)
  source 1..1562: mol_type = other RNA
aggagagtcccgcagtcggcgtccagcggctctgcttgttcgtgtgtgtgtcgttgcaggccttattcaagcttaccatggacacctctccttcagaggggacaaacttaaatgcgccaaacagtctgggagtgagcgctctatgcgccatctgtggtgatagggcaactggcaaacactacggggcctcctcttgcgacggatgtaagggctttttccggcgctcggtacgtaaaaatcatatgtattcatgccgatttagcagacaatgtgtggtcgataaggacaaaaggaaccagtgccggtactgtcgcctcaagaagtgcttcagagctggtatgaaaaaggaagcagtgcagaatgagagggatcggattagtacccgccgatcctcttatgaagacagctccctgccgtcaataaacgcccttctgcaggctgaggttttgagtagacaaatcacaagccccgtgtctgggattaatggagatatcagggccaaaaagattgcgtccatcgcagacgtctgtgagtcaatgaaagaacagctcctggtgctggtagagtgggccaagtacatacctgctttttgcgaactcccattagatgaccaggttgccctgcttcgggcacacgctggcgagcatttgctgctaggcgccaccaagcgtagcatggtgttcaaagacgtcctcctgcttgggaacgattatatcgtgccccgccactgtcctgagctggcggaaatgagtagagtgtctattaggatcttggacgagctcgtcctgccatttcaggaattacaaattgatgacaatgagtacgcctacctgaaggcaatcatattctttgatcccgacgctcggggactctccgatcctggtaaaattaagcgacttcgcagccaggttcaggtgtcgctggaagactatatcaacgatagacagtacgactctaggggccggttcggggagttgctactgctcctgccaactcttcaatccattacatggcagatgatcgagcagatccaatttattaaactgttcggaatggccaagatagataatttgctccaggaaatgctgttaggcggttcaccgagtgacgctccccatgcccaccaccctctgcatccacacctaatgcaggagcatatggggaccaacgtaatcgtggcaaatacgatgcccactcacctcagcaacggacagatgtgcgaatggcctcgcccaagaggccaagccgctacccccgagacaccgcagccttctcccccaggcgggtccggaagcgaaccttataaactgcttcccggtgcggtcgcaactattgtgaagccattgtcagccatcccccagcctaccataacaaagcaggaggttatttgaggactagtccctgttcccagagcccacttttttttctttttttgaaataaaatagcctgtctttcagatctaaaaaaaaaaaaaaaaaaaaaaaaaaaaaaaaaaaaaaaaaaaaaaaaaaaaaaaaaaaaaaaaaaaaaaaaaaaaaaaaaaaaaaaaaaaaaaaaaaaa

SEQ ID NO: 5287 - RNA, 1562 nt, synthetic construct
  misc_feature 1..1562: note = mRNA a-1 (A100) (opt3) from Homo sapiens__NP_000448.3__HNF4A(39-474)(K300R_K307R_K309R)
  source 1..1562: mol_type = other RNA
aggagagtcccgcagtcggcgtccagcggctctgcttgttcgtgtgtgtgtcgttgcaggccttattcaagcttaccatggacacctctccttcagaggggacaaacttaaatgcgccaaacagtctgggagtgagcgctctatgcgccatctgtggtgatagggcaactggcaaacactacggggcctcctcttgcgacggatgtaagggctttttccggcgctcggtacgtaaaaatcatatgtattcatgccgatttagcagacaatgtgtggtcgataaggacaaaaggaaccagtgccggtactgtcgcctcaagaagtgcttcagagctggtatgaaaaaggaagcagtgcagaatgagagggatcggattagtacccgccgatcctcttatgaagacagctccctgccgtcaataaacgcccttctgcaggctgaggttttgagtagacaaatcacaagccccgtgtctgggattaatggagatatcagggccaaaaagattgcgtccatcgcagacgtctgtgagtcaatgaaagaacagctcctggtgctggtagagtgggccaagtacatacctgctttttgcgaactcccattagatgaccaggttgccctgcttcgggcacacgctggcgagcatttgctgctaggcgccaccaagcgtagcatggtgttcaaagacgtcctcctgcttgggaacgattatatcgtgccccgccactgtcctgagctggcggaaatgagtagagtgtctattaggatcttggacgagctcgtcctgccatttcaggaattacaaattgatgacaatgagtacgcctacctgaaggcaatcatattctttgatcccgacgctcggggactctccgatcctggtcgcattcgaagacttaggagccaggttcaggtgtcgctggaagactatatcaacgatcggcagtacgactctcgcggcagattcggggagttgctactgctcctgccaactcttcaatccattacatggcagatgatcgagcagatccaatttattaaactgttcggaatggccaagatagataatttgctccaggaaatgctgttaggcggttcaccgagtgacgctccccatgcccaccaccctctgcatccacacctaatgcaggagcatatggggaccaacgtaatcgtggcaaatacgatgcccactcacctcagcaacggacagatgtgcgaatggcctaggccacgtggccaagccgctacccccgagacaccgcagccttctcccccaggcgggtccggaagcgaaccttataaactgcttcccggtgcggtcgcaactattgtgaagccattgtcagccatcccccagcctaccataacaaaacaggaggttatttgaggactagtccctgttcccagagcccacttttttttctttttttgaaataaaatagcctgtctttcagatctaaaaaaaaaaaaaaaaaaaaaaaaaaaaaaaaaaaaaaaaaaaaaaaaaaaaaaaaaaaaaaaaaaaaaaaaaaaaaaaaaaaaaaaaaaaaaaaaaaaa

SEQ ID NO: 5288 - RNA, 1562 nt, synthetic construct
  misc_feature 1..1562: note = mRNA a-1 (A100) (opt3) from Homo sapiens__NP_000448.3__HNF4A(39-474)(K447R_K470R)
  source 1..1562: mol_type = other RNA
aggagagtcccgcagtcggcgtccagcggctctgcttgttcgtgtgtgtgtcgttgcaggccttattcaagcttaccatggacacctctccttcagaggggacaaacttaaatgcgccaaacagtctgggagtgagcgctctatgcgccatctgtggtgatagggcaactggcaaacactacggggcctcctcttgcgacggatgtaagggctttttccggcgctcggtacgtaaaaatcatatgtattcatgccgatttagcagacaatgtgtggtcgataaggacaaaaggaaccagtgccggtactgtcgcctcaagaagtgcttcagagctggtatgaaaaaggaagcagtgcagaatgagagggatcggattagtacccgccgatcctcttatgaagacagctccctgccgtcaataaacgcccttctgcaggctgaggttttgagtagacaaatcacaagccccgtgtctgggattaatggagatatcagggccaaaaagattgcgtccatcgcagacgtctgtgagtcaatgaaagaacagctcctggtgctggtagagtgggccaagtacatacctgctttttgcgaactcccattagatgaccaggttgccctgcttcgggcacacgctggcgagcatttgctgctaggcgccaccaagcgtagcatggtgttcaaagacgtcctcctgcttgggaacgattatatcgtgccccgccactgtcctgagctggcggaaatgagtagagtgtctattaggatcttggacgagctcgtcctgccatttcaggaattacaaattgatgacaatgagtacgcctacctgaaggcaatcatattctttgatcccgacgctaaaggactctccgatcctggtaagattaaacggcttcgaagccaggttcaggtgtcgctggaagactatatcaacgatcgccagtacgactctagaggcaggttcggggagttgctactgctcctgccaactcttcaatccattacatggcagatgatcgagcagatccaatttattaagctgttcggaatggccaaaatagataatttgctccaggaaatgctgttaggcggttcaccgagtgacgctccccatgcccaccaccctctgcatccacacctaatgcaggagcatatggggaccaacgtaatcgtggcaaatacgatgcccactcacctcagcaacggacagatgtgcgaatggcctcggccacgcggccaagccgctacccccgagacaccgcagccttctcccccaggcgggtccggaagcgaaccttatagactgcttcccggtgcggtcgcaactattgtgaagccattgtcagccatcccccagcctaccataacaaggcaggaggttatttgaggactagtccctgttcccagagcccacttttttttctttttttgaaataaaatagcctgtctttcagatctaaaaaaaaaaaaaaaaaaaaaaaaaaaaaaaaaaaaaaaaaaaaaaaaaaaaaaaaaaaaaaaaaaaaaaaaaaaaaaaaaaaaaaaaaaaaaaaaaaaa

SEQ ID NO: 5289 - RNA, 1562 nt, synthetic construct
  misc_feature 1..1562: note = mRNA a-1 (A100) (opt3) from Homo sapiens__NP_000448.3__HNF4A(39-474)(K458R)
  source 1..1562: mol_type = other RNA
aggagagtcccgcagtcggcgtccagcggctctgcttgttcgtgtgtgtgtcgttgcaggccttattcaagcttaccatggacacctctccttcagaggggacaaacttaaatgcgccaaacagtctgggagtgagcgctctatgcgccatctgtggtgatagggcaactggcaaacactacggggcctcctcttgcgacggatgtaagggctttttccggcgctcggtacgtaaaaatcatatgtattcatgccgatttagcagacaatgtgtggtcgataaggacaaaaggaaccagtgccggtactgtcgcctcaagaagtgcttcagagctggtatgaaaaaggaagcagtgcagaatgagagggatcggattagtacccgccgatcctcttatgaagacagctccctgccgtcaataaacgcccttctgcaggctgaggttttgagtagacaaatcacaagccccgtgtctgggattaatggagatatcagggccaaaaagattgcgtccatcgcagacgtctgtgagtcaatgaaagaacagctcctggtgctggtagagtgggccaagtacatacctgctttttgcgaactcccattagatgaccaggttgccctgcttcgggcacacgctggcgagcatttgctgctaggcgccaccaagcgtagcatggtgttcaaagacgtcctcctgcttgggaacgattatatcgtgccccgccactgtcctgagctggcggaaatgagtagagtgtctattaggatcttggacgagctcgtcctgccatttcaggaattacaaattgatgacaatgagtacgcctacctgaaggcaatcatattctttgatcccgacgctaaaggactctccgatcctggtaagattaaacggcttcgaagccaggttcaggtgtcgctggaagactatatcaacgatcgccagtacgactctagaggcaggttcggggagttgctactgctcctgccaactcttcaatccattacatggcagatgatcgagcagatccaatttattaagctgttcggaatggccaaaatagataatttgctccaggaaatgctgttaggcggttcaccgagtgacgctccccatgcccaccaccctctgcatccacacctaatgcaggagcatatggggaccaacgtaatcgtggcaaatacgatgcccactcacctcagcaacggacagatgtgcgaatggcctcggccacgcggccaagccgctacccccgagacaccgcagccttctcccccaggcgggtccggaagcgaaccttataagctgcttcccggtgcggtcgcaactattgtgagaccattgtcagccatcccccagcctaccataacaaagcaggaggttatttgaggactagtccctgttcccagagcccacttttttttctttttttgaaataaaatagcctgtctttcagatctaaaaaaaaaaaaaaaaaaaaaaaaaaaaaaaaaaaaaaaaaaaaaaaaaaaaaaaaaaaaaaaaaaaaaaaaaaaaaaaaaaaaaaaaaaaaaaaaaaaa

SEQ ID NO: 5290 - RNA, 1562 nt, synthetic construct
  misc_feature 1..1562: note = mRNA a-1 (A100) (opt3) from Homo sapiens__NP_000448.3__HNF4A(39-474)(K106R_K108R_K126R_K127R )
  source 1..1562: mol_type = other RNA
aggagagtcccgcagtcggcgtccagcggctctgcttgttcgtgtgtgtgtcgttgcaggccttattcaagcttaccatggacacctctccttcagaggggacaaacttaaatgcgccaaacagtctgggagtgagcgctctatgcgccatctgtggtgatagggcaactggcaaacactacggggcctcctcttgcgacggatgtaagggctttttccggcgctcggtacgtaaaaatcatatgtattcatgccgatttagcagacaatgtgtggtcgatagggaccggcgcaaccagtgcagatactgtaggctcaagaaatgcttccgggctggtatgcgccgagaagcagtgcagaatgagagagataggattagtacccggcgttcctcttatgaagacagctccctgccgtcaataaacgcccttctgcaggctgaggttttgagtcgccaaatcacaagccccgtgtctgggattaatggagatatcagagccaagaagattgcgtccatcgcagacgtctgtgagtcaatgaaagaacagctcctggtgctggtagagtgggccaagtacatacctgctttttgcgaactcccattagatgaccaggttgccctgcttagggcacacgctggcgagcatttgctgctaggcgccaccaaacggagcatggtgttcaaggacgtcctcctgcttgggaacgattatatcgtgccccgacactgtcctgagctggcggaaatgagtcgcgtgtctattagaatcttggacgagctcgtcctgccatttcaggaattacaaattgatgacaatgagtacgcctacctgaaagcaatcatattctttgatcccgacgctaagggactctccgatcctggtaagattaaaaggcttcggagccaggttcaggtgtcgctggaagactatatcaacgatcgccagtacgactctagaggcaggttcggggagttgctactgctcctgccaactcttcaatccattacatggcagatgatcgagcagatccaatttattaagctgttcggaatggccaaaatagataatttgctccaggaaatgctgttaggcggttcaccgagtgacgctccccatgcccaccaccctctgcatccacacctaatgcaggagcatatggggaccaacgtaatcgtggcaaatacgatgcccactcacctcagcaacggacagatgtgcgaatggcctcgtccacggggccaagccgctacccccgagacaccgcagccttctcccccaggcgggtccggaagcgaaccttataagctgcttcccggtgcggtcgcaactattgtgaaaccattgtcagccatcccccagcctaccataacaaagcaggaggttatttgaggactagtccctgttcccagagcccacttttttttctttttttgaaataaaatagcctgtctttcagatctaaaaaaaaaaaaaaaaaaaaaaaaaaaaaaaaaaaaaaaaaaaaaaaaaaaaaaaaaaaaaaaaaaaaaaaaaaaaaaaaaaaaaaaaaaaaaaaaaaaa

SEQ ID NO: 5291 - RNA, 1562 nt, synthetic construct
  misc_feature 1..1562: note = mRNA a-1 (A100) (opt3) from Homo sapiens__NP_000448.3__HNF4A(39-474)(E285Q)
  source 1..1562: mol_type = other RNA
aggagagtcccgcagtcggcgtccagcggctctgcttgttcgtgtgtgtgtcgttgcaggccttattcaagcttaccatggacacctctccttcagaggggacaaacttaaatgcgccaaacagtctgggagtgagcgctctatgcgccatctgtggtgatagggcaactggcaaacactacggggcctcctcttgcgacggatgtaagggctttttccggcgctcggtacgtaaaaatcatatgtattcatgccgatttagcagacaatgtgtggtcgataaggacaaaaggaaccagtgccggtactgtcgcctcaagaagtgcttcagagctggtatgaaaaaggaagcagtgcagaatgagagggatcggattagtacccgccgatcctcttatgaagacagctccctgccgtcaataaacgcccttctgcaggctgaggttttgagtagacaaatcacaagccccgtgtctgggattaatggagatatcagggccaaaaagattgcgtccatcgcagacgtctgtgagtcaatgaaagaacagctcctggtgctggtagagtgggccaagtacatacctgctttttgcgaactcccattagatgaccaggttgccctgcttcgggcacacgctggcgagcatttgctgctaggcgccaccaagcgtagcatggtgttcaaagacgtcctcctgcttgggaacgattatatcgtgccccgccactgtcctgagctggcggaaatgagtagagtgtctattaggatcttggacgagctcgtcctgccatttcaggaattacaaattgatgacaatcagtacgcctacctgaaggcaatcatattctttgatcccgacgctaaaggactctccgatcctggtaagattaaacggcttcgaagccaggttcaggtgtcgctggaggactatatcaacgatcgccaatacgactctagaggcaggttcggggaattgctactgctcctgccaactcttcagtccattacatggcagatgatcgagcaaatccagtttattaagctgttcggaatggccaaaatagataatttgctccaggagatgctgttaggcggttcaccgagtgacgctccccatgcccaccaccctctgcatccacacctaatgcaggaacatatggggaccaacgtaatcgtggcaaatacgatgcccactcacctcagcaacggacaaatgtgcgagtggcctcggccacgcggccaggccgctacccccgaaacaccgcagccttctcccccaggcgggtccggaagcgagccttataagctgcttcccggtgcggtcgcaactattgtgaagccattgtcagccatcccccagcctaccataacaaaacaagaagttatttgaggactagtccctgttcccagagcccacttttttttctttttttgaaataaaatagcctgtctttcagatctaaaaaaaaaaaaaaaaaaaaaaaaaaaaaaaaaaaaaaaaaaaaaaaaaaaaaaaaaaaaaaaaaaaaaaaaaaaaaaaaaaaaaaaaaaaaaaaaaaaa

SEQ ID NO: 5292 - RNA, 1562 nt, synthetic construct
  misc_feature 1..1562: note = mRNA a-1 (A100) (opt3) from Homo sapiens__NP_000448.3__HNF4A(39-474)(T166E)
  source 1..1562: mol_type = other RNA
aggagagtcccgcagtcggcgtccagcggctctgcttgttcgtgtgtgtgtcgttgcaggccttattcaagcttaccatggacacctctccttcagaggggacaaacttaaatgcgccaaacagtctgggagtgagcgctctatgcgccatctgtggtgatagggcaactggcaaacactacggggcctcctcttgcgacggatgtaagggctttttccggcgctcggtacgtaaaaatcatatgtattcatgccgatttagcagacaatgtgtggtcgataaggacaaaaggaaccagtgccggtactgtcgcctcaagaagtgcttcagagctggtatgaaaaaggaagcagtgcagaatgagagggatcggattagtacccgccgatcctcttatgaagacagctccctgccgtcaataaacgcccttctgcaggctgaggttttgagtagacaaatcgagagccccgtgtctgggattaatggagatatcagggccaaaaagattgcgtccatcgcagacgtctgtgaatcaatgaaagagcagctcctggtgctggtagaatgggccaagtacatacctgctttttgcgagctcccattagatgaccaggttgccctgcttcgggcacacgctggcgagcatttgctgctaggcgccacaaagcgtagcatggtgttcaaagacgtcctcctgcttgggaacgattatatcgtgccccgccactgtcctgaactggcggagatgagtagagtgtctattaggatcttggacgaactcgtcctgccatttcaggagttacaaattgatgacaatgaatacgcctacctgaaggcaatcatattctttgatcccgacgctaaaggactctccgatcctggtaagattaaacggcttcgaagccaggttcaggtgtcgctggaggactatatcaacgatcgccagtacgactctagaggcaggttcggggagttgctactgctcctgccaacccttcaatccattacttggcagatgatcgaacagatccaatttattaagctgttcggaatggccaaaatagataatttgctccaggagatgctgttaggcggttcaccgagtgacgctccccatgcccaccaccctctgcatccacacctaatgcaggaacatatggggacaaacgtaatcgtggcaaataccatgcccacgcacctcagcaacggacagatgtgcgagtggcctcggccacgcggccaagccgctactcccgaaaccccgcagccttctcccccaggcgggtccggaagcgagccttataagctgcttcccggtgcggtcgcaacaattgtgaagccattgtcagccatcccccagcctactataaccaaacaggaggttatttgaggactagtccctgttcccagagcccacttttttttctttttttgaaataaaatagcctgtctttcagatctaaaaaaaaaaaaaaaaaaaaaaaaaaaaaaaaaaaaaaaaaaaaaaaaaaaaaaaaaaaaaaaaaaaaaaaaaaaaaaaaaaaaaaaaaaaaaaaaaaaa

SEQ ID NO: 5293 - RNA, 1562 nt, synthetic construct
  misc_feature 1..1562: note = mRNA a-1 (A100) (opt3) from Homo sapiens__NP_000448.3__HNF4A(39-474)(S148A)
  source 1..1562: mol_type = other RNA
aggagagtcccgcagtcggcgtccagcggctctgcttgttcgtgtgtgtgtcgttgcaggccttattcaagcttaccatggacacctctccttcagaggggacaaacttaaatgcgccaaacagtctgggagtgagcgctctatgcgccatctgtggtgatagggcaactggcaaacactacggggcctcctcttgcgacggatgtaagggctttttccggcgctcggtacgtaaaaatcatatgtattcatgccgatttagcagacaatgtgtggtcgataaggacaaaaggaaccagtgccggtactgtcgcctcaagaagtgcttcagagctggtatgaaaaaggaagcagtgcagaatgagagggatcggattagtacccgccgatcctcttatgaagacagcgccctgccgtccataaacgcccttctgcaggccgaggttttgtcaagacaaatcacaagtcccgtgagcgggattaatggagatatcagggcgaaaaagattgcatctatcgccgacgtctgtgagtccatgaaagaacagctcctggtgctggtagagtgggctaagtacatacctgccttttgcgaactcccattagatgaccaggttgcactgcttcgggctcacgccggcgagcatttgctgctaggcgcgaccaagcgttcaatggtgttcaaagacgtcctcctgcttgggaacgattatatcgtgccccgccactgtcctgagctggccgaaatgagcagagtgagtattaggatcttggacgagctcgtcctgccatttcaggaattacaaattgatgacaatgagtacgcatacctgaaggctatcatattctttgatcccgacgccaaaggactctctgatcctggtaagattaaacggcttcgatcccaggttcaggtgagcctggaagactatatcaacgatcgccagtacgactcgagaggcaggttcggggagttgctactgctcctgccaactcttcaatctattacatggcagatgatcgagcagatccaatttattaagctgttcggaatggctaaaatagataatttgctccaggaaatgctgttaggcggttccccgtcagacgctccccatgcacaccaccctctgcatccacacctaatgcaggagcatatggggaccaacgtaatcgtggccaatacgatgcccactcacctcagtaacggacagatgtgcgaatggcctcggccacgcggccaagctgcgacccccgagacaccgcagcctagcccacccggcgggtccggatctgaaccttataagctgcttcccggtgcagtcgccactattgtgaagccattgagcgctatcccccagcctaccataacaaaacaggaggttatttgaggactagtccctgttcccagagcccacttttttttctttttttgaaataaaatagcctgtctttcagatctaaaaaaaaaaaaaaaaaaaaaaaaaaaaaaaaaaaaaaaaaaaaaaaaaaaaaaaaaaaaaaaaaaaaaaaaaaaaaaaaaaaaaaaaaaaaaaaaaaaa

SEQ ID NO: 5294 - RNA, 1562 nt, synthetic construct
  misc_feature 1..1562: note = mRNA a-1 (A100) (opt3) from Homo sapiens__NP_000448.3__HNF4A(39-474)(S148E)
  source 1..1562: mol_type = other RNA
aggagagtcccgcagtcggcgtccagcggctctgcttgttcgtgtgtgtgtcgttgcaggccttattcaagcttaccatggacacctctccttcagaggggacaaacttaaatgcgccaaacagtctgggagtgagcgctctatgcgccatctgtggtgatagggcaactggcaaacactacggggcctcctcttgcgacggatgtaagggctttttccggcgctcggtacgtaaaaatcatatgtattcatgccgatttagcagacaatgtgtggtcgataaggacaaaaggaaccagtgccggtactgtcgcctcaagaagtgcttcagagctggtatgaaaaaggaagcagtgcagaatgagagggatcggattagtacccgccgatcctcttatgaagacagcgagctgccgtccataaacgcccttctgcaggctgaggttttgtcaagacaaatcacaagtcccgtgagcgggattaatggagatatcagggccaaaaagattgcgtctatcgcagacgtctgtgaatccatgaaagagcagctcctggtgctggtagaatgggccaagtacatacctgctttttgcgagctcccattagatgaccaggttgccctgcttcgggcacacgctggcgagcatttgctgctaggcgccaccaagcgttcaatggtgttcaaagacgtcctcctgcttgggaacgattatatcgtgccccgccactgtcctgaactggcggagatgagcagagtgagtattaggatcttggacgaactcgtcctgccatttcaggagttacaaattgatgacaatgaatacgcctacctgaaggcaatcatattctttgatcccgacgctaaaggactctctgatcctggtaagattaaacggcttcgatcccaggttcaggtgagcctggaggactatatcaacgatcgccagtacgactcgagaggcaggttcggggagttgctactgctcctgccaactcttcaatctattacatggcagatgatcgaacagatccaatttattaagctgttcggaatggccaaaatagataatttgctccaggagatgctgttaggcggttccccgtcagacgctccccatgcccaccaccctctgcatccacacctaatgcaggaacatatggggaccaacgtaatcgtggcaaatacgatgcccactcacctcagtaacggacagatgtgcgagtggcctcggccacgcggccaagccgctacccccgaaacaccgcagcctagcccacccggcgggtccggatctgagccttataagctgcttcccggtgcggtcgcaactattgtgaagccattgagcgccatcccccagcctaccataacaaaacaggaggttatttgaggactagtccctgttcccagagcccacttttttttctttttttgaaataaaatagcctgtctttcagatctaaaaaaaaaaaaaaaaaaaaaaaaaaaaaaaaaaaaaaaaaaaaaaaaaaaaaaaaaaaaaaaaaaaaaaaaaaaaaaaaaaaaaaaaaaaaaaaaaaaa

SEQ ID NO: 5295 - RNA, 1562 nt, synthetic construct
  misc_feature 1..1562: note = mRNA a-1 (A100) (opt3) from Homo sapiens__NP_000448.3__HNF4A(39-474)(S183A)
  source 1..1562: mol_type = other RNA
aggagagtcccgcagtcggcgtccagcggctctgcttgttcgtgtgtgtgtcgttgcaggccttattcaagcttaccatggacacctctccttcagaggggacaaacttaaatgcgccaaacagtctgggagtgagcgctctatgcgccatctgtggtgatagggcaactggcaaacactacggggcctcctcttgcgacggatgtaagggctttttccggcgctcggtacgtaaaaatcatatgtattcatgccgatttagcagacaatgtgtggtcgataaggacaaaaggaaccagtgccggtactgtcgcctcaagaagtgcttcagagctggtatgaaaaaggaagcagtgcagaatgagagggatcggattagtacccgccgatcctcttatgaagacagctccctgccgtcaataaacgcccttctgcaggctgaggttttgagtagacaaatcacaagccccgtgtctgggattaatggagatatcagggccaaaaagattgcggcaatcgccgacgtctgtgagtccatgaaagaacagctcctggtgctggtagagtgggctaagtacatacctgccttttgcgaactcccattagatgaccaggttgcactgcttcgggctcacgccggcgagcatttgctgctaggcgcgaccaagcgttcaatggtgttcaaagacgtcctcctgcttgggaacgattatatcgtgccccgccactgtcctgagctggccgaaatgagcagagtgagtattaggatcttggacgagctcgtcctgccatttcaggaattacaaattgatgacaatgagtacgcatacctgaaggctatcatattctttgatcccgacgccaaaggactctctgatcctggtaagattaaacggcttcgatcccaggttcaggtgagcctggaagactatatcaacgatcgccagtacgactcgagaggcaggttcggggagttgctactgctcctgccaactcttcaatctattacatggcagatgatcgagcagatccaatttattaagctgttcggaatggctaaaatagataatttgctccaggaaatgctgttaggcggttccccgtcagacgcaccccatgcccaccaccctctgcatccacacctaatgcaggagcatatggggaccaacgtaatcgtggccaatacgatgcccactcacctcagtaacggacagatgtgcgaatggcctcggccacgcggccaagctgcgacccccgagacaccgcagcctagcccacccggcgggtccggatctgaaccttataagctgcttcccggtgcagtcgccactattgtgaagccattgagcgctatcccccagcctaccataacaaaacaggaggttatttgaggactagtccctgttcccagagcccacttttttttctttttttgaaataaaatagcctgtctttcagatctaaaaaaaaaaaaaaaaaaaaaaaaaaaaaaaaaaaaaaaaaaaaaaaaaaaaaaaaaaaaaaaaaaaaaaaaaaaaaaaaaaaaaaaaaaaaaaaaaaaa

SEQ ID NO: 5296 - RNA, 1562 nt, synthetic construct
  misc_feature 1..1562: note = mRNA a-1 (A100) (opt3) from Homo sapiens__NP_000448.3__HNF4A(39-474)(S183E)
  source 1..1562: mol_type = other RNA
aggagagtcccgcagtcggcgtccagcggctctgcttgttcgtgtgtgtgtcgttgcaggccttattcaagcttaccatggacacctctccttcagaggggacaaacttaaatgcgccaaacagtctgggagtgagcgctctatgcgccatctgtggtgatagggcaactggcaaacactacggggcctcctcttgcgacggatgtaagggctttttccggcgctcggtacgtaaaaatcatatgtattcatgccgatttagcagacaatgtgtggtcgataaggacaaaaggaaccagtgccggtactgtcgcctcaagaagtgcttcagagctggtatgaaaaaggaagcagtgcagaatgagagggatcggattagtacccgccgatcctcttatgaagacagctccctgccgtcaataaacgcccttctgcaggctgaggttttgagtagacaaatcacaagccccgtgtctgggattaatggagatatcagggccaaaaagattgcggagatcgcagacgtctgtgaatccatgaaagagcagctcctggtgctggtagaatgggccaagtacatacctgctttttgcgagctcccattagatgaccaggttgccctgcttcgggcacacgctggcgagcatttgctgctaggcgccaccaagcgttcaatggtgttcaaagacgtcctcctgcttgggaacgattatatcgtgccccgccactgtcctgaactggcggagatgagcagagtgagtattaggatcttggacgaactcgtcctgccatttcaggagttacaaattgatgacaatgaatacgcctacctgaaggcaatcatattctttgatcccgacgctaaaggactctctgatcctggtaagattaaacggcttcgatcccaggttcaggtgagcctggaggactatatcaacgatcgccagtacgactcgagaggcaggttcggggagttgctactgctcctgccaactcttcaatctattacatggcagatgatcgaacagatccaatttattaagctgttcggaatggccaaaatagataatttgctccaggagatgctgttaggcggttccccgtcagacgctccccatgcccaccaccctctgcatccacacctaatgcaggaacatatggggaccaacgtaatcgtggcaaatacgatgcccactcacctcagtaacggacagatgtgcgagtggcctcggccacgcggccaagccgctacccccgaaacaccgcagcctagcccacccggcgggtccggatctgagccttataagctgcttcccggtgcggtcgcaactattgtgaagccattgagcgccatcccccagcctaccataacaaaacaggaggttatttgaggactagtccctgttcccagagcccacttttttttctttttttgaaataaaatagcctgtctttcagatctaaaaaaaaaaaaaaaaaaaaaaaaaaaaaaaaaaaaaaaaaaaaaaaaaaaaaaaaaaaaaaaaaaaaaaaaaaaaaaaaaaaaaaaaaaaaaaaaaaaa

SEQ ID NO: 5297 - RNA, 1562 nt, synthetic construct
  misc_feature 1..1562: note = mRNA a-1 (A100) (opt3) from Homo sapiens__NP_000448.3__HNF4A(39-474)(S461A)
  source 1..1562: mol_type = other RNA
aggagagtcccgcagtcggcgtccagcggctctgcttgttcgtgtgtgtgtcgttgcaggccttattcaagcttaccatggacacctctccttcagaggggacaaacttaaatgcgccaaacagtctgggagtgagcgctctatgcgccatctgtggtgatagggcaactggcaaacactacggggcctcctcttgcgacggatgtaagggctttttccggcgctcggtacgtaaaaatcatatgtattcatgccgatttagcagacaatgtgtggtcgataaggacaaaaggaaccagtgccggtactgtcgcctcaagaagtgcttcagagctggtatgaaaaaggaagcagtgcagaatgagagggatcggattagtacccgccgatcctcttatgaagacagctccctgccgtcaataaacgcccttctgcaggctgaggttttgagtagacaaatcacaagccccgtgtctgggattaatggagatatcagggccaaaaagattgcgtccatcgcagacgtctgtgagtcaatgaaagaacagctcctggtgctggtagagtgggccaagtacatacctgctttttgcgaactcccattagatgaccaggttgccctgcttcgggcacacgctggcgagcatttgctgctaggcgccaccaagcgtagcatggtgttcaaagacgtcctcctgcttgggaacgattatatcgtgccccgccactgtcctgagctggcggaaatgagtagagtgtctattaggatcttggacgagctcgtcctgccatttcaggaattacaaattgatgacaatgagtacgcctacctgaaggcaatcatattctttgatcccgacgctaaaggactctccgatcctggtaagattaaacggcttcgaagccaggttcaggtgtcgctggaagactatatcaacgatcgccagtacgactctagaggcaggttcggggagttgctactgctcctgccaactcttcaatccattacatggcagatgatcgagcagatccaatttattaagctgttcggaatggccaaaatagataatttgctccaggaaatgctgttaggcggttcaccgagtgacgctccccatgcccaccaccctctgcatccacacctaatgcaggagcatatggggaccaacgtaatcgtggcaaatacgatgcccactcacctcagcaacggacagatgtgcgaatggcctcggccacgcggccaagccgctacccccgagacaccgcagccttctcccccaggcgggtccggaagcgaaccttataagctgcttcccggtgcggtcgcaactattgtgaagccattggccgctatcccccagcctaccataacaaaacaggaggttatttgaggactagtccctgttcccagagcccacttttttttctttttttgaaataaaatagcctgtctttcagatctaaaaaaaaaaaaaaaaaaaaaaaaaaaaaaaaaaaaaaaaaaaaaaaaaaaaaaaaaaaaaaaaaaaaaaaaaaaaaaaaaaaaaaaaaaaaaaaaaaaa

SEQ ID NO: 5298 - RNA, 1562 nt, synthetic construct
  misc_feature 1..1562: note = mRNA a-1 (A100) (opt3) from Homo sapiens__NP_000448.3__HNF4A(39-474)(S461E)
  source 1..1562: mol_type = other RNA
aggagagtcccgcagtcggcgtccagcggctctgcttgttcgtgtgtgtgtcgttgcaggccttattcaagcttaccatggacacctctccttcagaggggacaaacttaaatgcgccaaacagtctgggagtgagcgctctatgcgccatctgtggtgatagggcaactggcaaacactacggggcctcctcttgcgacggatgtaagggctttttccggcgctcggtacgtaaaaatcatatgtattcatgccgatttagcagacaatgtgtggtcgataaggacaaaaggaaccagtgccggtactgtcgcctcaagaagtgcttcagagctggtatgaaaaaggaagcagtgcagaatgagagggatcggattagtacccgccgatcctcttatgaagacagctccctgccgtcaataaacgcccttctgcaggctgaggttttgagtagacaaatcacaagccccgtgtctgggattaatggagatatcagggccaaaaagattgcgtccatcgcagacgtctgtgagtcaatgaaagaacagctcctggtgctggtagagtgggccaagtacatacctgctttttgcgaactcccattagatgaccaggttgccctgcttcgggcacacgctggcgagcatttgctgctaggcgccaccaagcgtagcatggtgttcaaagacgtcctcctgcttgggaacgattatatcgtgccccgccactgtcctgagctggcggaaatgagtagagtgtctattaggatcttggacgagctcgtcctgccatttcaggaattacaaattgatgacaatgagtacgcctacctgaaggcaatcatattctttgatcccgacgctaaaggactctccgatcctggtaagattaaacggcttcgaagccaggttcaggtgtcgctggaagactatatcaacgatcgccagtacgactctagaggcaggttcggggagttgctactgctcctgccaactcttcaatccattacatggcagatgatcgagcagatccaatttattaagctgttcggaatggccaaaatagataatttgctccaggaaatgctgttaggcggttcaccgagtgacgctccccatgcccaccaccctctgcatccacacctaatgcaggagcatatggggaccaacgtaatcgtggcaaatacgatgcccactcacctcagcaacggacagatgtgcgaatggcctcggccacgcggccaagccgctacccccgagacaccgcagccttctcccccaggcgggtccggaagcgaaccttataagctgcttcccggtgcggtcgcaactattgtgaagccattggaggccatcccccagcctaccataacaaaacaggaggttatttgaggactagtccctgttcccagagcccacttttttttctttttttgaaataaaatagcctgtctttcagatctaaaaaaaaaaaaaaaaaaaaaaaaaaaaaaaaaaaaaaaaaaaaaaaaaaaaaaaaaaaaaaaaaaaaaaaaaaaaaaaaaaaaaaaaaaaaaaaaaaaa

SEQ ID NO: 5299 - RNA, 1562 nt, synthetic construct
  misc_feature 1..1562: note = mRNA a-1 (A100) (opt3) from Homo sapiens__NP_000448.3__HNF4A(39-474)(S142A_S143A_S313A)
  source 1..1562: mol_type = other RNA
aggagagtcccgcagtcggcgtccagcggctctgcttgttcgtgtgtgtgtcgttgcaggccttattcaagcttaccatggacacctctccttcagaggggacaaacttaaatgcgccaaacagtctgggagtgagcgctctatgcgccatctgtggtgatagggcaactggcaaacactacggggcctcctcttgcgacggatgtaagggctttttccggcgctcggtacgtaaaaatcatatgtattcatgccgatttagcagacaatgtgtggtcgataaggacaaaaggaaccagtgccggtactgtcgcctcaagaagtgcttcagagctggtatgaaaaaggaagcagtgcagaatgagagggatcggattagtacccgccgagccgcttatgaagactcctctctgccgagcataaacgcccttctgcaggcggaggttttgtccagacaaatcacatcacccgtgagtgggattaatggagatatcagggccaaaaagattgccagcatcgctgacgtctgtgagtctatgaaagaacagctcctggtgctggtagagtgggccaagtacatacctgcattttgcgaactcccattagatgaccaggttgctctgcttcgggcccacgcgggcgagcatttgctgctaggcgccaccaagcgttccatggtgttcaaagacgtcctcctgcttgggaacgattatatcgtgccccgccactgtcctgagctggcagaaatgtcaagagtgagcattaggatcttggacgagctcgtcctgccatttcaggaattacaaattgatgacaatgagtacgcttacctgaaggccatcatattctttgatcccgacgctaaaggactcagtgatcctggtaagattaaacggcttcgagcccaggttcaggtgtctctggaagactatatcaacgatcgccagtacgactccagaggcaggttcggggagttgctactgctcctgccaactcttcaaagcattacatggcagatgatcgagcagatccaatttattaagctgttcggaatggcaaaaatagataatttgctccaggaaatgctgttaggcggttcgccgtctgacgcaccccatgctcaccaccctctgcatccacacctaatgcaggagcatatggggaccaacgtaatcgtggcgaatacgatgcccactcacctctccaacggacagatgtgcgaatggcctcggccacgcggccaagcagccacccccgagacaccgcagccttcacccccaggcgggagtggaagcgaaccttataagctgcttcccggtgctgtcgccactattgtgaagccattgtccgcaatcccccagcctaccataacaaaacaggaggttatttgaggactagtccctgttcccagagcccacttttttttctttttttgaaataaaatagcctgtctttcagatctaaaaaaaaaaaaaaaaaaaaaaaaaaaaaaaaaaaaaaaaaaaaaaaaaaaaaaaaaaaaaaaaaaaaaaaaaaaaaaaaaaaaaaaaaaaaaaaaaaaa

SEQ ID NO: 5300 - RNA, 1562 nt, synthetic construct
  misc_feature 1..1562: note = mRNA a-1 (A100) (opt3) from Homo sapiens__NP_000448.3__HNF4A(39-474)(S142A_S143A_S313A_K458R )
  source 1..1562: mol_type = other RNA
aggagagtcccgcagtcggcgtccagcggctctgcttgttcgtgtgtgtgtcgttgcaggccttattcaagcttaccatggacacctctccttcagaggggacaaacttaaatgcgccaaacagtctgggagtgagcgctctatgcgccatctgtggtgatagggcaactggcaaacactacggggcctcctcttgcgacggatgtaagggctttttccggcgctcggtacgtaaaaatcatatgtattcatgccgatttagcagacaatgtgtggtcgataaggacaaaaggaaccagtgccggtactgtcgcctcaagaagtgcttcagagctggtatgaaaaaggaagcagtgcagaatgagagggatcggattagtacccgccgagccgcttatgaagactcctctctgccgagcataaacgcccttctgcaggcggaggttttgtccagacaaatcacatcacccgtgagtgggattaatggagatatcagggccaaaaagattgccagcatcgctgacgtctgtgagtctatgaaagaacagctcctggtgctggtagagtgggccaagtacatacctgcattttgcgaactcccattagatgaccaggttgctctgcttcgggcccacgcgggcgagcatttgctgctaggcgccaccaagcgttccatggtgttcaaagacgtcctcctgcttgggaacgattatatcgtgccccgccactgtcctgagctggcagaaatgtcaagagtgagcattaggatcttggacgagctcgtcctgccatttcaggaattacaaattgatgacaatgagtacgcttacctgaaggccatcatattctttgatcccgacgctaaaggactcagtgatcctggtaagattaaacggcttcgagcccaggttcaggtgtctctggaagactatatcaacgatcgccagtacgactccagaggcaggttcggggagttgctactgctcctgccaactcttcaaagcattacatggcagatgatcgagcagatccaatttattaagctgttcggaatggcaaaaatagataatttgctccaggaaatgctgttaggcggttcgccgtctgacgcaccccatgctcaccaccctctgcatccacacctaatgcaggagcatatggggaccaacgtaatcgtggcgaatacgatgcccactcacctctccaacggacagatgtgcgaatggcctcggccacgcggccaagcagccacccccgagacaccgcagccttcacccccaggcgggagtggaagcgaaccttataagctgcttcccggtgctgtcgccactattgtgagaccattgtccgcaatcccccagcctaccataacaaagcaggaggttatttgaggactagtccctgttcccagagcccacttttttttctttttttgaaataaaatagcctgtctttcagatctaaaaaaaaaaaaaaaaaaaaaaaaaaaaaaaaaaaaaaaaaaaaaaaaaaaaaaaaaaaaaaaaaaaaaaaaaaaaaaaaaaaaaaaaaaaaaaaaaaaa

SEQ ID NO: 5301 - RNA, 1562 nt, synthetic construct
  misc_feature 1..1562: note = mRNA a-1 (A100) (opt3) from Homo sapiens__NP_000448.3__HNF4A(39-474)(S142A_S143A_S167A_S313A _S378A_T429A_T432A_S436A_K458R)
  source 1..1562: mol_type = other RNA
aggagagtcccgcagtcggcgtccagcggctctgcttgttcgtgtgtgtgtcgttgcaggccttattcaagcttaccatggacacctctccttcagaggggacaaacttaaatgcgccaaacagtctgggagtgagcgctctatgcgccatctgtggtgatagggcaactggcaaacactacggggcctcctcttgcgacggatgtaagggctttttccggcgctcggtacgtaaaaatcatatgtattcatgccgatttagcagacaatgtgtggtcgataaggacaaaaggaaccagtgccggtactgtcgcctcaagaagtgcttcagagctggtatgaaaaaggaagcagtgcagaatgagagggatcggattagtacccgccgagccgcttatgaagactcctctctgccgagcataaacgcccttctgcaggcggaggttttgtccagacaaatcacagcacccgtgtcagggattaatggagatatcagggccaaaaagattgctagtatcgccgacgtctgtgagagcatgaaagaacagctcctggtgctggtagagtgggcaaagtacatacctgctttttgcgaactcccattagatgaccaggttgccctgcttcgggcgcacgccggcgagcatttgctgctaggcgcaaccaagcgttctatggtgttcaaagacgtcctcctgcttgggaacgattatatcgtgccccgccactgtcctgagctggctgaaatgtccagagtgtcaattaggatcttggacgagctcgtcctgccatttcaggaattacaaattgatgacaatgagtacgcctacctgaaggctatcatattctttgatcccgacgccaaaggactcagcgatcctggtaagattaaacggcttcgagcacaggttcaggtgagtctggaagactatatcaacgatcgccagtacgactctagaggcaggttcggggagttgctactgctcctgccaactcttcaatccattacatggcagatgatcgagcagatccaatttattaagctgttcggaatggccaaaatagataatttgctccaggaaatgctgttaggcggtgctccgagcgacgcgccccatgcacaccaccctctgcatccacacctaatgcaggagcatatggggaccaacgtaatcgtggccaatacgatgcccactcacctctcgaacggacagatgtgcgaatggcctcggccacgcggccaagctgccgcacccgaggccccgcagcctgctcccccaggcgggtctggatccgaaccttataagctgcttcccggtgccgtcgcaaccattgtgagaccattgtcagcgatcccccagcctacaataactaagcaggaggttatttgaggactagtccctgttcccagagcccacttttttttctttttttgaaataaaatagcctgtctttcagatctaaaaaaaaaaaaaaaaaaaaaaaaaaaaaaaaaaaaaaaaaaaaaaaaaaaaaaaaaaaaaaaaaaaaaaaaaaaaaaaaaaaaaaaaaaaaaaaaaaaa

SEQ ID NO: 5302 - RNA, 1562 nt, synthetic construct
  misc_feature 1..1562: note = mRNA a-1 (A100) (opt3) from Homo sapiens__NP_000448.3__HNF4A(39-474)(S142A_S143A_S148A_S167A _S313A_S378A_T429A_T432A_S436A_K458R)
  source 1..1562: mol_type = other RNA
aggagagtcccgcagtcggcgtccagcggctctgcttgttcgtgtgtgtgtcgttgcaggccttattcaagcttaccatggacacctctccttcagaggggacaaacttaaatgcgccaaacagtctgggagtgagcgctctatgcgccatctgtggtgatagggcaactggcaaacactacggggcctcctcttgcgacggatgtaagggctttttccggcgctcggtacgtaaaaatcatatgtattcatgccgatttagcagacaatgtgtggtcgataaggacaaaaggaaccagtgccggtactgtcgcctcaagaagtgcttcagagctggtatgaaaaaggaagcagtgcagaatgagagggatcggattagtacccgccgagccgcttatgaagactccgccctgccgtctataaacgcgcttctgcaggcagaggttttgagcagacaaatcacagcccccgtgtccgggattaatggagatatcagggctaaaaagattgcctcaatcgcagacgtctgtgagagtatgaaagaacagctcctggtgctggtagagtgggctaagtacatacctgccttttgcgaactcccattagatgaccaggttgcgctgcttcgggcccacgcaggcgagcatttgctgctaggcgctaccaagcgtagcatggtgttcaaagacgtcctcctgcttgggaacgattatatcgtgccccgccactgtcctgagctggccgaaatgtctagagtgtccattaggatcttggacgagctcgtcctgccatttcaggaattacaaattgatgacaatgagtacgcttacctgaaggccatcatattctttgatcccgacgcaaaaggactctcagatcctggtaagattaaacggcttcgagcccaggttcaggtgagcctggaagactatatcaacgatcgccagtacgacagtagaggcaggttcggggagttgctactgctcctgccaactcttcaatctattacatggcagatgatcgagcagatccaatttattaagctgttcggaatggctaaaatagataatttgctccaggaaatgctgttaggcggtgcgccgtccgacgcaccccatgcccaccaccctctgcatccacacctaatgcaggagcatatggggaccaacgtaatcgtggctaatacgatgcccactcacctcagcaacggacagatgtgcgaatggcctcggccacgcggccaagccgcagcccccgaggctccgcagcctgcacccccaggcgggtcgggatctgaaccttataagctgcttcccggtgccgtcgcgaccattgtgagaccattgtccgctatcccccagcctacaataactaagcaggaggttatttgaggactagtccctgttcccagagcccacttttttttctttttttgaaataaaatagcctgtctttcagatctaaaaaaaaaaaaaaaaaaaaaaaaaaaaaaaaaaaaaaaaaaaaaaaaaaaaaaaaaaaaaaaaaaaaaaaaaaaaaaaaaaaaaaaaaaaaaaaaaaaa

SEQ ID NO: 5303 - RNA, 1562 nt, synthetic construct
  misc_feature 1..1562: note = mRNA a-1 (A100) (opt3) from Homo sapiens__NP_000448.3__HNF4A(39-474)(K106R_K108R_K126R_K127R _S142A_S143A_S148A_S167A_S313A_S378A_T429A_T432A_S436A_K458 R)
  source 1..1562: mol_type = other RNA
aggagagtcccgcagtcggcgtccagcggctctgcttgttcgtgtgtgtgtcgttgcaggccttattcaagcttaccatggacacctctccttcagaggggacaaacttaaatgcgccaaacagtctgggagtgagcgctctatgcgccatctgtggtgatagggcaactggcaaacactacggggcctcctcttgcgacggatgtaagggctttttccggcgctcggtacgtaaaaatcatatgtattcatgccgatttagcagacaatgtgtggtcgatagggaccggcgcaaccagtgcagatactgtaggctcaagaaatgcttccgggctggtatgcgccgagaagcagtgcagaatgagagagataggattagtacccggcgtgccgcttatgaagactccgccctgccgtctataaacgcgcttctgcaggcagaggttttgagccgccaaatcacagcccccgtgtccgggattaatggagatatcagagctaagaagattgcctcaatcgcagacgtctgtgagagtatgaaagaacagctcctggtgctggtagagtgggctaagtacatacctgccttttgcgaactcccattagatgaccaggttgcgctgcttagggcccacgcaggcgagcatttgctgctaggcgctaccaaacggagcatggtgttcaaggacgtcctcctgcttgggaacgattatatcgtgccccgacactgtcctgagctggccgaaatgtctcgcgtgtccattagaatcttggacgagctcgtcctgccatttcaggaattacaaattgatgacaatgagtacgcttacctgaaagccatcatattctttgatcccgacgcaaagggactctcagatcctggtaagattaaaaggcttcgggcccaggttcaggtgagcctggaagactatatcaacgatcgccagtacgacagtagaggcaggttcggggagttgctactgctcctgccaactcttcaatctattacatggcagatgatcgagcagatccaatttattaagctgttcggaatggctaaaatagataatttgctccaggaaatgctgttaggcggtgcgccgtccgacgcaccccatgcccaccaccctctgcatccacacctaatgcaggagcatatggggaccaacgtaatcgtggctaatacgatgcccactcacctcagcaacggacagatgtgcgaatggcctcgtccacggggccaagccgcagcccccgaggctccgcagcctgcacccccaggcgggtcgggatctgaaccttataagctgcttcccggtgccgtcgcgaccattgtgcgaccattgtccgctatcccccagcctacaataactaaacaggaggttatttgaggactagtccctgttcccagagcccacttttttttctttttttgaaataaaatagcctgtctttcagatctaaaaaaaaaaaaaaaaaaaaaaaaaaaaaaaaaaaaaaaaaaaaaaaaaaaaaaaaaaaaaaaaaaaaaaaaaaaaaaaaaaaaaaaaaaaaaaaaaaaa

SEQ ID NO: 5304 - RNA, 1562 nt, synthetic construct
  misc_feature 1..1562: note = mRNA a-1 (A100) (opt3) from Homo sapiens__NP_000448.3__HNF4A(39-474)(S142A_S143A_S148A_T166A _S167A_S313A_S378A_T429A_T432A_S436A_K458R)
  source 1..1562: mol_type = other RNA
aggagagtcccgcagtcggcgtccagcggctctgcttgttcgtgtgtgtgtcgttgcaggccttattcaagcttaccatggacacctctccttcagaggggacaaacttaaatgcgccaaacagtctgggagtgagcgctctatgcgccatctgtggtgatagggcaactggcaaacactacggggcctcctcttgcgacggatgtaagggctttttccggcgctcggtacgtaaaaatcatatgtattcatgccgatttagcagacaatgtgtggtcgataaggacaaaaggaaccagtgccggtactgtcgcctcaagaagtgcttcagagctggtatgaaaaaggaagcagtgcagaatgagagggatcggattagtacccgccgagccgcttatgaagactccgccctgccgtctataaacgcgcttctgcaggcagaggttttgagcagacaaatcgccgctcccgtgtccgggattaatggagatatcagggccaaaaagattgcatcaatcgctgacgtctgtgagagtatgaaagaacagctcctggtgctggtagagtgggccaagtacatacctgcgttttgcgaactcccattagatgaccaggttgccctgcttcgggcacacgctggcgagcatttgctgctaggcgccacaaagcgtagcatggtgttcaaagacgtcctcctgcttgggaacgattatatcgtgccccgccactgtcctgagctggctgaaatgtctagagtgtccattaggatcttggacgagctcgtcctgccatttcaggaattacaaattgatgacaatgagtacgcctacctgaaggcaatcatattctttgatcccgacgccaaaggactctcagatcctggtaagattaaacggcttcgagctcaggttcaggtgagcctggaagactatatcaacgatcgccagtacgacagtagaggcaggttcggggagttgctactgctcctgccaacccttcaatctattacttggcagatgatcgagcagatccaatttattaagctgttcggaatggcgaaaatagataatttgctccaggaaatgctgttaggcggtgcaccgtccgacgctccccatgcccaccaccctctgcatccacacctaatgcaggagcatatggggacaaacgtaatcgtggccaataccatgcccacgcacctcagcaacggacagatgtgcgaatggcctcggccacgcggccaagcagccgctcccgaggccccgcagcctgcacccccaggcgggtcgggatctgaaccttataagctgcttcccggtgcggtcgctactattgtgagaccattgtccgccatcccccagcctaccataacaaagcaggaggttatttgaggactagtccctgttcccagagcccacttttttttctttttttgaaataaaatagcctgtctttcagatctaaaaaaaaaaaaaaaaaaaaaaaaaaaaaaaaaaaaaaaaaaaaaaaaaaaaaaaaaaaaaaaaaaaaaaaaaaaaaaaaaaaaaaaaaaaaaaaaaaaa

SEQ ID NO: 5305 - RNA, 1562 nt, synthetic construct
  misc_feature 1..1562: note = mRNA a-1 (A100) (opt3) from Homo sapiens__NP_000448.3__HNF4A(39-474)(S87A_S142A_S143A_S148A_ T166A_S167A_S313A_S378A_T429A_T432A_S436A_K458R)
  source 1..1562: mol_type = other RNA
aggagagtcccgcagtcggcgtccagcggctctgcttgttcgtgtgtgtgtcgttgcaggccttattcaagcttaccatggacacctctccttcagaggggacaaacttaaatgcgccaaacagtctgggagtgagcgctctatgcgccatctgtggtgatagggcaactggcaaacactacggggcctcctcttgcgacggatgtaagggctttttccggcgcgctgtacgtaaaaatcatatgtattcgtgccgattttcaagacaatgtgtggtcgataaggacaaaaggaaccagtgccggtactgtcgcctcaagaagtgcttcagagcaggtatgaaaaaggaagccgtgcagaatgagagggatcggattagcacccgccgagctgcctatgaagacagtgcgctgccgtccataaacgcacttctgcaggccgaggttttgtctagacaaatcgctgcccccgtgagcgggattaatggagatatcagggctaaaaagattgcatccatcgccgacgtctgtgagtcaatgaaagaacagctcctggtgctggtagagtgggcgaagtacatacctgccttttgcgaactcccattagatgaccaggttgcactgcttcgggctcacgccggcgagcatttgctgctaggcgctacaaagcgtagtatggtgttcaaagacgtcctcctgcttgggaacgattatatcgtgccccgccactgtcctgagctggccgaaatgagcagagtgtctattaggatcttggacgagctcgtcctgccatttcaggaattacaaattgatgacaatgagtacgcatacctgaaggccatcatattctttgatcccgacgctaaaggactctccgatcctggtaagattaaacggcttcgagcgcaggttcaggtgtcactggaagactatatcaacgatcgccagtacgacagcagaggcaggttcggggagttgctactgctcctgccaacccttcaaagtattacttggcagatgatcgagcagatccaatttattaagctgttcggaatggcaaaaatagataatttgctccaggaaatgctgttaggcggtgccccgtctgacgctccccatgcccaccaccctctgcatccacacctaatgcaggagcatatggggacaaacgtaatcgtggcaaataccatgcccacgcacctctccaacggacagatgtgcgaatggcctcggccacgcggccaagccgctgcccccgaggcaccgcagcctgcgcccccaggcgggagcggatcggaaccttataagctgcttcccggtgctgtcgccactattgtgagaccattgtctgcaatcccccagcctaccataacaaagcaggaggttatttgaggactagtccctgttcccagagcccacttttttttctttttttgaaataaaatagcctgtctttcagatctaaaaaaaaaaaaaaaaaaaaaaaaaaaaaaaaaaaaaaaaaaaaaaaaaaaaaaaaaaaaaaaaaaaaaaaaaaaaaaaaaaaaaaaaaaaaaaaaaaaa

SEQ ID NO: 5306 - RNA, 1562 nt, synthetic construct
  misc_feature 1..1562: note = mRNA a-1 (A100) (opt3) from Homo sapiens__NP_000448.3__HNF4A(39-474)(S87A_K106R_K108R_K126R_ K127R_S142A_S143A_S148A_T166A_S167A_S313A_S378A_T429A_T432A _S436A_K458R)
  source 1..1562: mol_type = other RNA
aggagagtcccgcagtcggcgtccagcggctctgcttgttcgtgtgtgtgtcgttgcaggccttattcaagcttaccatggacacctctccttcagaggggacaaacttaaatgcgccaaacagtctgggagtgagcgctctatgcgccatctgtggtgatagggcaactggcaaacactacggggcctcctcttgcgacggatgtaagggctttttccggcgcgctgtacgtaaaaatcatatgtattcgtgccgattttcaagacaatgtgtggtcgatagggaccggcgcaaccagtgcagatactgtaggctcaagaaatgcttccgggcaggtatgcgccgagaagccgtgcagaatgagagagataggattagcacccggcgtgctgcctatgaagacagtgcgctgccgtccataaacgcacttctgcaggccgaggttttgtctcgccaaatcgctgcccccgtgagcgggattaatggagatatcagagcaaagaagattgcttccatcgccgacgtctgtgagtcaatgaaagaacagctcctggtgctggtagagtgggcgaagtacatacctgccttttgcgaactcccattagatgaccaggttgcactgcttagggctcacgccggcgagcatttgctgctaggcgctacaaaacggagtatggtgttcaaggacgtcctcctgcttgggaacgattatatcgtgccccgacactgtcctgagctggccgaaatgagccgcgtgtctattagaatcttggacgagctcgtcctgccatttcaggaattacaaattgatgacaatgagtacgcatacctgaaagccatcatattctttgatcccgacgctaagggactctccgatcctggtaagattaaaaggcttcgggcgcaggttcaggtgtcactggaagactatatcaacgatcgccagtacgacagcagaggcaggttcggggagttgctactgctcctgccaacccttcaaagtattacttggcagatgatcgagcagatccaatttattaagctgttcggaatggcaaaaatagataatttgctccaggaaatgctgttaggcggtgccccgtctgacgctccccatgcccaccaccctctgcatccacacctaatgcaggagcatatggggacaaacgtaatcgtggcaaataccatgcccacgcacctctccaacggacagatgtgcgaatggcctcgtccacggggccaagccgctgcccccgaggcaccgcagcctgcgcccccaggcgggagcggatcggaaccttataagctgcttcccggtgctgtcgccactattgtgcgaccattgtctgcaatcccccagcctaccataacaaaacaggaggttatttgaggactagtccctgttcccagagcccacttttttttctttttttgaaataaaatagcctgtctttcagatctaaaaaaaaaaaaaaaaaaaaaaaaaaaaaaaaaaaaaaaaaaaaaaaaaaaaaaaaaaaaaaaaaaaaaaaaaaaaaaaaaaaaaaaaaaaaaaaaaaaa

SEQ ID NO: 5307 - RNA, 1562 nt, synthetic construct
  misc_feature 1..1562: note = mRNA a-1 (A100) (opt3) from Homo sapiens__NP_000448.3__HNF4A(39-474)(S87A_K106R_K108R_K126R_ K127R)
  source 1..1562: mol_type = other RNA
aggagagtcccgcagtcggcgtccagcggctctgcttgttcgtgtgtgtgtcgttgcaggccttattcaagcttaccatggacacctctccttcagaggggacaaacttaaatgcgccaaacagtctgggagtgagcgctctatgcgccatctgtggtgatagggcaactggcaaacactacggggcctcctcttgcgacggatgtaagggctttttccggcgcgctgtacgtaaaaatcatatgtattcgtgccgattttcaagacaatgtgtggtcgatagggaccggcgcaaccagtgcagatactgtaggctcaagaaatgcttccgggcaggtatgcgccgagaagccgtgcagaatgagagagataggattagcacccggcgtagttcctatgaagactctagcctgccgtccataaacgcccttctgcaggccgaggttttgtcacgccaaatcacaagtcccgtgagcgggattaatggagatatcagagcgaagaagattgcatctatcgccgacgtctgtgagtccatgaaagaacagctcctggtgctggtagagtgggctaagtacatacctgccttttgcgaactcccattagatgaccaggttgcactgcttagggctcacgccggcgagcatttgctgctaggcgcgaccaaacggtcaatggtgttcaaggacgtcctcctgcttgggaacgattatatcgtgccccgacactgtcctgagctggccgaaatgagccgcgtgagtattagaatcttggacgagctcgtcctgccatttcaggaattacaaattgatgacaatgagtacgcatacctgaaagctatcatattctttgatcccgacgccaagggactctctgatcctggtaagattaaaaggcttcggtcccaggttcaggtgagcctggaagactatatcaacgatcgccagtacgactcgagaggcaggttcggggagttgctactgctcctgccaactcttcaatctattacatggcagatgatcgagcagatccaatttattaagctgttcggaatggctaaaatagataatttgctccaggaaatgctgttaggcggttccccgtcagacgctccccatgcacaccaccctctgcatccacacctaatgcaggagcatatggggaccaacgtaatcgtggccaatacgatgcccactcacctcagtaacggacagatgtgcgaatggcctcgtccacggggccaagctgcgacccccgagacaccgcagcctagcccacccggcgggtccggatctgaaccttataagctgcttcccggtgcagtcgccactattgtgaaaccattgagcgctatcccccagcctaccataacaaagcaggaggttatttgaggactagtccctgttcccagagcccacttttttttctttttttgaaataaaatagcctgtctttcagatctaaaaaaaaaaaaaaaaaaaaaaaaaaaaaaaaaaaaaaaaaaaaaaaaaaaaaaaaaaaaaaaaaaaaaaaaaaaaaaaaaaaaaaaaaaaaaaaaaaaa

SEQ ID NO: 5308 - RNA, 1562 nt, synthetic construct
  misc_feature 1..1562: note = mRNA a-1 (A100) (opt3) from Homo sapiens__NP_000448.3__HNF4A(39-474)(S87A_K106R_K108R_K126R_ K127R_S142A_S143A_S148A_T166A_S167A_S313A_S378A_T429A_T432A _S436A_K458R_S461A)
  source 1..1562: mol_type = other RNA
aggagagtcccgcagtcggcgtccagcggctctgcttgttcgtgtgtgtgtcgttgcaggccttattcaagcttaccatggacacctctccttcagaggggacaaacttaaatgcgccaaacagtctgggagtgagcgctctatgcgccatctgtggtgatagggcaactggcaaacactacggggcctcctcttgcgacggatgtaagggctttttccggcgcgctgtacgtaaaaatcatatgtattcgtgccgattttcaagacaatgtgtggtcgatagggaccggcgcaaccagtgcagatactgtaggctcaagaaatgcttccgggcaggtatgcgccgagaagccgtgcagaatgagagagataggattagcacccggcgtgctgcctatgaagacagtgcgctgccgtccataaacgcacttctgcaggccgaggttttgtctcgccaaatcgctgcccccgtgagcgggattaatggagatatcagagcaaagaagattgcttccatcgccgacgtctgtgagtcaatgaaagaacagctcctggtgctggtagagtgggcgaagtacatacctgccttttgcgaactcccattagatgaccaggttgcactgcttagggctcacgccggcgagcatttgctgctaggcgctacaaaacggagtatggtgttcaaggacgtcctcctgcttgggaacgattatatcgtgccccgacactgtcctgagctggccgaaatgagccgcgtgtctattagaatcttggacgagctcgtcctgccatttcaggaattacaaattgatgacaatgagtacgcatacctgaaagccatcatattctttgatcccgacgctaagggactctccgatcctggtaagattaaaaggcttcgggcgcaggttcaggtgtcactggaagactatatcaacgatcgccagtacgacagcagaggcaggttcggggagttgctactgctcctgccaacccttcaaagtattacttggcagatgatcgagcagatccaatttattaagctgttcggaatggcaaaaatagataatttgctccaggaaatgctgttaggcggtgccccgtctgacgctccccatgcccaccaccctctgcatccacacctaatgcaggagcatatggggacaaacgtaatcgtggcaaataccatgcccacgcacctctccaacggacagatgtgcgaatggcctcgtccacggggccaagccgctgcccccgaggcaccgcagcctgcgcccccaggcgggagcggatcggaaccttataagctgcttcccggtgctgtcgccactattgtgcgaccattggcagccatcccccagcctaccataacaaaacaggaggttatttgaggactagtccctgttcccagagcccacttttttttctttttttgaaataaaatagcctgtctttcagatctaaaaaaaaaaaaaaaaaaaaaaaaaaaaaaaaaaaaaaaaaaaaaaaaaaaaaaaaaaaaaaaaaaaaaaaaaaaaaaaaaaaaaaaaaaaaaaaaaaaa

SEQ ID NO: 5309 - RNA, 1562 nt, synthetic construct
  misc_feature 1..1562: note = mRNA a-1 (A100) (opt3) from Homo sapiens__NP_000448.3__HNF4A(39-474)(S87A_K106R_K108R_K126R_ K127R_S142A_S143A_S148A_T166A_S167A_S313A_S378A_T429A_T432A _S436A_K458R_S461E)
  source 1..1562: mol_type = other RNA
aggagagtcccgcagtcggcgtccagcggctctgcttgttcgtgtgtgtgtcgttgcaggccttattcaagcttaccatggacacctctccttcagaggggacaaacttaaatgcgccaaacagtctgggagtgagcgctctatgcgccatctgtggtgatagggcaactggcaaacactacggggcctcctcttgcgacggatgtaagggctttttccggcgcgctgtacgtaaaaatcatatgtattcgtgccgattttcaagacaatgtgtggtcgatagggaccggcgcaaccagtgcagatactgtaggctcaagaaatgcttccgggcaggtatgcgccgagaagccgtgcagaatgagagagataggattagcacccggcgtgctgcctatgaagacagtgcgctgccgtccataaacgcacttctgcaggccgaggttttgtctcgccaaatcgctgcccccgtgagcgggattaatggagatatcagagcaaagaagattgcttccatcgccgacgtctgtgagtcaatgaaagaacagctcctggtgctggtagagtgggcgaagtacatacctgccttttgcgaactcccattagatgaccaggttgcactgcttagggctcacgccggcgagcatttgctgctaggcgctacaaaacggagtatggtgttcaaggacgtcctcctgcttgggaacgattatatcgtgccccgacactgtcctgagctggccgaaatgagccgcgtgtctattagaatcttggacgagctcgtcctgccatttcaggaattacaaattgatgacaatgagtacgcatacctgaaagccatcatattctttgatcccgacgctaagggactctccgatcctggtaagattaaaaggcttcgggcgcaggttcaggtgtcactggaagactatatcaacgatcgccagtacgacagcagaggcaggttcggggagttgctactgctcctgccaacccttcaaagtattacttggcagatgatcgagcagatccaatttattaagctgttcggaatggcaaaaatagataatttgctccaggaaatgctgttaggcggtgccccgtctgacgctccccatgcccaccaccctctgcatccacacctaatgcaggagcatatggggacaaacgtaatcgtggcaaataccatgcccacgcacctctccaacggacagatgtgcgaatggcctcgtccacggggccaagccgctgcccccgaggcaccgcagcctgcgcccccaggcgggagcggatcggaaccttataagctgcttcccggtgctgtcgccactattgtgcgaccattggaggcaatcccccagcctaccataacaaaacaggaggttatttgaggactagtccctgttcccagagcccacttttttttctttttttgaaataaaatagcctgtctttcagatctaaaaaaaaaaaaaaaaaaaaaaaaaaaaaaaaaaaaaaaaaaaaaaaaaaaaaaaaaaaaaaaaaaaaaaaaaaaaaaaaaaaaaaaaaaaaaaaaaaaa

SEQ ID NO: 5310 - RNA, 1562 nt, synthetic construct
  misc_feature 1..1562: note = mRNA a-1 (A100) (opt3) from Homo sapiens__NP_000448.3__HNF4A(39-474)(S87A_K106R_K108R_K126R_ K127R_S142A_S143A_S148E_T166A_S167E_S313A_S378E_T429E_T432E _S436E_K458R_S461E)
  source 1..1562: mol_type = other RNA
aggagagtcccgcagtcggcgtccagcggctctgcttgttcgtgtgtgtgtcgttgcaggccttattcaagcttaccatggacacctctccttcagaggggacaaacttaaatgcgccaaacagtctgggagtgagcgctctatgcgccatctgtggtgatagggcaactggcaaacactacggggcctcctcttgcgacggatgtaagggctttttccggcgcgctgtacgtaaaaatcatatgtattcgtgccgattttcaagacaatgtgtggtcgatagggaccggcgcaaccagtgcagatactgtaggctcaagaaatgcttccgggcaggtatgcgccgagaagccgtgcagaatgagagagataggattagcacccggcgtgctgcctatgaagacagtgagctgccgtccataaacgcgcttctgcaggcagaggttttgtctcgccaaatcgccgaacccgtgagcgggattaatggagatatcagagctaagaagattgcctccatcgcagacgtctgtgagtcaatgaaagaacagctcctggtgctggtagagtgggctaagtacatacctgccttttgcgagctcccattagatgaccaggttgcgctgcttagggcccacgcaggcgaacatttgctgctaggcgctacaaaacggagtatggtgttcaaggacgtcctcctgcttgggaacgattatatcgtgccccgacactgtcctgagctggccgaaatgagccgcgtgtctattagaatcttggacgagctcgtcctgccatttcaggaattacaaattgatgacaatgagtacgcttacctgaaagccatcatattctttgatcccgacgcaaagggactctccgatcctggtaagattaaaaggcttcgggcccaggttcaggtgtcactggaggactatatcaacgatcgccagtacgacagcagaggcaggttcggggaattgctactgctcctgccaacccttcaaagtattacttggcagatgatcgagcagatccaatttattaagctgttcggaatggctaaaatagataatttgctccaggaaatgctgttaggcggtgagccgtctgacgcgccccatgcacaccaccctctgcatccacacctaatgcaggaacatatggggacaaacgtaatcgtggccaataccatgcccacgcacctctccaacggacagatgtgcgagtggcctcgtccacggggccaagctgccgagcccgaggaaccgcagcctgaacccccaggcgggagcggatcggagccttataagctgcttcccggtgcagtcgccactattgtgcgaccattggaagctatcccccagcctaccataacaaaacaggaggttatttgaggactagtccctgttcccagagcccacttttttttctttttttgaaataaaatagcctgtctttcagatctaaaaaaaaaaaaaaaaaaaaaaaaaaaaaaaaaaaaaaaaaaaaaaaaaaaaaaaaaaaaaaaaaaaaaaaaaaaaaaaaaaaaaaaaaaaaaaaaaaaa

SEQ ID NO: 5311 - RNA, 1562 nt, synthetic construct
  misc_feature 1..1562: note = mRNA a-1 (A100) (opt3) from Homo sapiens__NP_000448.3__HNF4A(39-474)(S87A_K106R_K108R_K126R_ K127R_S142A_S143A_S148A_T166A_S167A_K179R_K180R_S313A_S378A _T429A_T432A_S436A_K458R_S461E)
  source 1..1562: mol_type = other RNA
aggagagtcccgcagtcggcgtccagcggctctgcttgttcgtgtgtgtgtcgttgcaggccttattcaagcttaccatggacacctctccttcagaggggacaaacttaaatgcgccaaacagtctgggagtgagcgctctatgcgccatctgtggtgatagggcaactggcaaacactacggggcctcctcttgcgacggatgtaagggctttttccggcgcgctgtacgtaaaaatcatatgtattcgtgccgattttcaagacaatgtgtggtcgatagggaccggcgcaaccagtgcagatactgtaggctcaagaaatgcttccgggcaggtatgcgccgagaagccgtgcagaatgagagagataggattagcacccggcgtgctgcctatgaagacagtgcgctgccgtccataaacgcacttctgcaggccgaggttttgtctcgccaaatcgctgcccccgtgagcgggattaatggagatatcagagcaaggcggattgcttccatcgccgacgtctgtgagtcaatgaaggaacagctcctggtgctggtagagtgggcgaagtacatacctgccttttgcgaactcccattagatgaccaggttgcactgcttcgagctcacgccggcgagcatttgctgctaggcgctacaaaacgcagtatggtgttcaaggacgtcctcctgcttgggaacgattatatcgtgcccagacactgtcctgagctggccgaaatgagcagggtgtctattcggatcttggacgagctcgtcctgccatttcaggaattacaaattgatgacaatgagtacgcatacctgaaagccatcatattctttgatcccgacgctaagggactctccgatcctggtaaaattaagcgccttagagcgcaggttcaggtgtcactggaagactatatcaacgataggcagtacgacagccgtggccggttcggggagttgctactgctcctgccaacccttcaaagtattacttggcagatgatcgagcagatccaatttattaagctgttcggaatggcaaaaatagataatttgctccaggaaatgctgttaggcggtgccccgtctgacgctccccatgcccaccaccctctgcatccacacctaatgcaggagcatatggggacaaacgtaatcgtggcaaataccatgcccacgcacctctccaacggacagatgtgcgaatggcctcgaccaagaggccaagccgctgcccccgaggcaccgcagcctgcgcccccaggcgggagcggatcggaaccttataagctgcttcccggtgctgtcgccactattgtgaggccattggaggcaatcccccagcctaccataacaaaacaggaggttatttgaggactagtccctgttcccagagcccacttttttttctttttttgaaataaaatagcctgtctttcagatctaaaaaaaaaaaaaaaaaaaaaaaaaaaaaaaaaaaaaaaaaaaaaaaaaaaaaaaaaaaaaaaaaaaaaaaaaaaaaaaaaaaaaaaaaaaaaaaaaaaa

SEQ ID NO: 5312 - RNA, 1562 nt, synthetic construct
  misc_feature 1..1562: note = mRNA a-1 (A100) (opt3) from Homo sapiens__NP_000448.3__HNF4A(39-474)(S87A_K106R_K108R_K126R_ K127R_S142A_S143A_S148A_T166A_S167A_K300R_K307R_K309R_S313A _S378A_T429A_T432A_S436A_K458R_S461E)
  source 1..1562: mol_type = other RNA
aggagagtcccgcagtcggcgtccagcggctctgcttgttcgtgtgtgtgtcgttgcaggccttattcaagcttaccatggacacctctccttcagaggggacaaacttaaatgcgccaaacagtctgggagtgagcgctctatgcgccatctgtggtgatagggcaactggcaaacactacggggcctcctcttgcgacggatgtaagggctttttccggcgcgctgtacgtaaaaatcatatgtattcgtgccgattttcaagacaatgtgtggtcgatagggaccggcgcaaccagtgcagatactgtaggctcaagaaatgcttccgggcaggtatgcgccgagaagccgtgcagaatgagagagataggattagcacccggcgtgctgcctatgaagacagtgcgctgccgtccataaacgcacttctgcaggccgaggttttgtctcgccaaatcgctgcccccgtgagcgggattaatggagatatcagagcaaagaagattgcttccatcgccgacgtctgtgagtcaatgaaagaacagctcctggtgctggtagagtgggcgaagtacatacctgccttttgcgaactcccattagatgaccaggttgcactgcttagggctcacgccggcgagcatttgctgctaggcgctacaaaacggagtatggtgttcaaggacgtcctcctgcttgggaacgattatatcgtgccccgacactgtcctgagctggccgaaatgagccgcgtgtctattagaatcttggacgagctcgtcctgccatttcaggaattacaaattgatgacaatgagtacgcatacctgaaagccatcatattctttgatcccgacgctaggggactctccgatcctggtcggattcgcagacttagggcgcaggttcaggtgtcactggaagactatatcaacgatcgtcagtacgacagccggggccgattcggggagttgctactgctcctgccaacccttcaaagtattacttggcagatgatcgagcagatccaatttattaagctgttcggaatggcaaagatagataatttgctccaggaaatgctgttaggcggtgccccgtctgacgctccccatgcccaccaccctctgcatccacacctaatgcaggagcatatggggacaaacgtaatcgtggcaaataccatgcccacgcacctctccaacggacagatgtgcgaatggcctagaccaaggggccaagccgctgcccccgaggcaccgcagcctgcgcccccaggcgggagcggatcggaaccttataaactgcttcccggtgctgtcgccactattgtgcgcccattggaggcaatcccccagcctaccataacaaagcaggaggttatttgaggactagtccctgttcccagagcccacttttttttctttttttgaaataaaatagcctgtctttcagatctaaaaaaaaaaaaaaaaaaaaaaaaaaaaaaaaaaaaaaaaaaaaaaaaaaaaaaaaaaaaaaaaaaaaaaaaaaaaaaaaaaaaaaaaaaaaaaaaaaaa

SEQ ID NO: 5313 - RNA, 1562 nt, synthetic construct
  misc_feature 1..1562: note = mRNA a-1 (A100) (opt3) from Homo sapiens__NP_000448.3__HNF4A(39-474)(S87A_K106R_K108R_K126R_ K127R_S142A_S143A_S148A_T166A_S167A_S313A_S378A_T429A_T432A _S436A_K447R_K458R_S461E_K470R)
  source 1..1562: mol_type = other RNA
aggagagtcccgcagtcggcgtccagcggctctgcttgttcgtgtgtgtgtcgttgcaggccttattcaagcttaccatggacacctctccttcagaggggacaaacttaaatgcgccaaacagtctgggagtgagcgctctatgcgccatctgtggtgatagggcaactggcaaacactacggggcctcctcttgcgacggatgtaagggctttttccggcgcgctgtacgtaaaaatcatatgtattcgtgccgattttcaagacaatgtgtggtcgatagggaccggcgcaaccagtgcagatactgtaggctcaagaaatgcttccgggcaggtatgcgccgagaagccgtgcagaatgagagagataggattagcacccggcgtgctgcctatgaagacagtgcgctgccgtccataaacgcacttctgcaggccgaggttttgtctcgccaaatcgctgcccccgtgagcgggattaatggagatatcagagcaaagaagattgcttccatcgccgacgtctgtgagtcaatgaaagaacagctcctggtgctggtagagtgggcgaagtacatacctgccttttgcgaactcccattagatgaccaggttgcactgcttagggctcacgccggcgagcatttgctgctaggcgctacaaaacggagtatggtgttcaaggacgtcctcctgcttgggaacgattatatcgtgccccgacactgtcctgagctggccgaaatgagccgcgtgtctattagaatcttggacgagctcgtcctgccatttcaggaattacaaattgatgacaatgagtacgcatacctgaaagccatcatattctttgatcccgacgctaagggactctccgatcctggtaagattaaaaggcttcgggcgcaggttcaggtgtcactggaagactatatcaacgatcgccagtacgacagcagaggcaggttcggggagttgctactgctcctgccaacccttcaaagtattacttggcagatgatcgagcagatccaatttattaagctgttcggaatggcaaaaatagataatttgctccaggaaatgctgttaggcggtgccccgtctgacgctccccatgcccaccaccctctgcatccacacctaatgcaggagcatatggggacaaacgtaatcgtggcaaataccatgcccacgcacctctccaacggacagatgtgcgaatggcctcgtccacggggccaagccgctgcccccgaggcaccgcagcctgcgcccccaggcgggagcggatcggaaccttatcgactgcttcccggtgctgtcgccactattgtgagaccattggaggcaatcccccagcctaccataacaaggcaggaggttatttgaggactagtccctgttcccagagcccacttttttttctttttttgaaataaaatagcctgtctttcagatctaaaaaaaaaaaaaaaaaaaaaaaaaaaaaaaaaaaaaaaaaaaaaaaaaaaaaaaaaaaaaaaaaaaaaaaaaaaaaaaaaaaaaaaaaaaaaaaaaaaa

SEQ ID NO: 5314 - RNA, 1562 nt, synthetic construct
  misc_feature 1..1562: note = mRNA a-1 (A100) (opt3) from Homo sapiens__NP_000448.3__HNF4A(39-474)(S87A_K106R_K108R_K126R_ K127R_S142A_S143A_S148A_T166A_S167A_K179R_K180R_K234R_K300R _K307R_K309R_S313A_S378A_T429A_T432A_S436A_K447R_K458R_S461 E_K470R)
  source 1..1562: mol_type = other RNA
aggagagtcccgcagtcggcgtccagcggctctgcttgttcgtgtgtgtgtcgttgcaggccttattcaagcttaccatggacacctctccttcagaggggacaaacttaaatgcgccaaacagtctgggagtgagcgctctatgcgccatctgtggtgatagggcaactggcaaacactacggggcctcctcttgcgacggatgtaagggctttttccggcgcgctgtacgtaaaaatcatatgtattcgtgccgattttcaagacaatgtgtggtcgatagggaccggcgcaaccagtgcagatactgtaggctcaagaaatgcttccgggcaggtatgcgccgagaagccgtgcagaatgagagagataggattagcacccggcgtgctgcctatgaagacagtgcgctgccgtccataaacgcacttctgcaggccgaggttttgtctcgccaaatcgctgcccccgtgagcgggattaatggagatatcagagcaaggcggattgcttccatcgccgacgtctgtgagtcaatgaaggaacagctcctggtgctggtagagtgggcgaagtacatacctgccttttgcgaactcccattagatgaccaggttgcactgcttcgagctcacgccggcgagcatttgctgctaggcgctacacgcagaagtatggtgttcaaagacgtcctcctgcttgggaacgattatatcgtgcccaggcactgtcctgagctggccgaaatgagccgggtgtctattcgcatcttggacgagctcgtcctgccatttcaggaattacaaattgatgacaatgagtacgcatacctgaaggccatcatattctttgatcccgacgctagaggactctccgatcctggtaggattcgtcggcttcgagcgcaggttcaggtgtcactggaagactatatcaacgatagacagtacgacagcaggggccgcttcggggagttgctactgctcctgccaacccttcaaagtattacttggcagatgatcgagcagatccaatttattaaactgttcggaatggcaaagatagataatttgctccaggaaatgctgttaggcggtgccccgtctgacgctccccatgcccaccaccctctgcatccacacctaatgcaggagcatatggggacaaacgtaatcgtggcaaataccatgcccacgcacctctccaacggacagatgtgcgaatggcctcggccaagaggccaagccgctgcccccgaggcaccgcagcctgcgcccccaggcgggagcggatcggaaccttataggctgcttcccggtgctgtcgccactattgtgcgcccattggaggcaatcccccagcctaccataacacgacaggaggttatttgaggactagtccctgttcccagagcccacttttttttctttttttgaaataaaatagcctgtctttcagatctaaaaaaaaaaaaaaaaaaaaaaaaaaaaaaaaaaaaaaaaaaaaaaaaaaaaaaaaaaaaaaaaaaaaaaaaaaaaaaaaaaaaaaaaaaaaaaaaaaaa

SEQ ID NO: 5315 - RNA, 1562 nt, synthetic construct
  misc_feature 1..1562: note = mRNA a-1 (A100) (opt3) from Homo sapiens__NP_000448.3__HNF4A(39-474)(S87A_S95A_S99A_K106R_K1 08R_K126R_K127R_S142A_S143A_S148A_T166A_S167A_S313A_S378A_T 429A_T432A_S436A_K458R_S461E)
  source 1..1562: mol_type = other RNA
aggagagtcccgcagtcggcgtccagcggctctgcttgttcgtgtgtgtgtcgttgcaggccttattcaagcttaccatggacacctctccttcagaggggacaaacttaaatgcgccaaacagtctgggagtgagcgctctatgcgccatctgtggtgatagggcaactggcaaacactacggggcctcctcttgcgacggatgtaagggctttttccggcgcgctgtacgtaaaaatcatatgtatgcatgccgatttgccagacaatgtgtggtcgatagggaccggcgcaaccagtgcagatactgtaggctcaagaaatgcttccgggctggtatgcgccgagaagccgtgcagaatgagagagataggatttcgacccggcgtgcggcatatgaagactcagccctgccgagcataaacgcccttctgcaggccgaggttttgagtcgccaaatcgcagctcccgtgtccgggattaatggagatatcagagccaagaagattgcgtctatcgccgacgtctgtgagagcatgaaagaacagctcctggtgctggtagagtgggcaaagtacatacctgctttttgcgaactcccattagatgaccaggttgccctgcttagggctcacgccggcgagcatttgctgctaggcgcaacaaaacggtccatggtgttcaaggacgtcctcctgcttgggaacgattatatcgtgccccgacactgtcctgagctggccgaaatgtcacgcgtgagtattagaatcttggacgagctcgtcctgccatttcaggaattacaaattgatgacaatgagtacgcttacctgaaagcgatcatattctttgatcccgacgcaaagggactcagcgatcctggtaagattaaaaggcttcgggcccaggttcaggtgtctctggaagactatatcaacgatcgccagtacgactccagaggcaggttcggggagttgctactgctcctgccaacccttcaatcaattacttggcagatgatcgagcagatccaatttattaagctgttcggaatggctaaaatagataatttgctccaggaaatgctgttaggcggtgccccgagcgacgcaccccatgcccaccaccctctgcatccacacctaatgcaggagcatatggggacaaacgtaatcgtggctaataccatgcccacgcacctcagtaacggacagatgtgcgaatggcctcgtccacggggccaagccgcagcgcccgaggctccgcagcctgctcccccaggcgggtctggatccgaaccttataagctgcttcccggtgcagtcgccactattgtgcgaccattggaggctatcccccagcctaccataacaaaacaggaggttatttgaggactagtccctgttcccagagcccacttttttttctttttttgaaataaaatagcctgtctttcagatctaaaaaaaaaaaaaaaaaaaaaaaaaaaaaaaaaaaaaaaaaaaaaaaaaaaaaaaaaaaaaaaaaaaaaaaaaaaaaaaaaaaaaaaaaaaaaaaaaaaa

SEQ ID NO: 5316 - RNA, 1562 nt, synthetic construct
  misc_feature 1..1562: note = mRNA a-1 (A100) (opt3) from Homo sapiens__NP_000448.3__HNF4A(39-474)(S87A_K106R_K108R_K126R_ K127R_S138A_T139A_S142A_S143A_S148A_T166A_S167A_S313A_S378A _T429A_T432A_S436A_K458R_S461E)
  source 1..1562: mol_type = other RNA
aggagagtcccgcagtcggcgtccagcggctctgcttgttcgtgtgtgtgtcgttgcaggccttattcaagcttaccatggacacctctccttcagaggggacaaacttaaatgcgccaaacagtctgggagtgagcgctctatgcgccatctgtggtgatagggcaactggcaaacactacggggcctcctcttgcgacggatgtaagggctttttccggcgcgctgtacgtaaaaatcatatgtattcgtgccgattttcaagacaatgtgtggtcgatagggaccggcgcaaccagtgcagatactgtaggctcaagaaatgcttccgggcaggtatgcgccgagaagccgtgcagaatgagagagataggattgctgcccggcgtgcggcatatgaagacagcgccctgccgagtataaacgcccttctgcaggccgaggttttgtcccgccaaatcgcagctcccgtgtctgggattaatggagatatcagagccaagaagattgcgagcatcgccgacgtctgtgagtccatgaaagaacagctcctggtgctggtagagtgggcaaagtacatacctgctttttgcgaactcccattagatgaccaggttgccctgcttagggctcacgccggcgagcatttgctgctaggcgcaaccaaacggtcaatggtgttcaaggacgtcctcctgcttgggaacgattatatcgtgccccgacactgtcctgagctggccgaaatgagtcgcgtgagcattagaatcttggacgagctcgtcctgccatttcaggaattacaaattgatgacaatgagtacgcttacctgaaagcgatcatattctttgatcccgacgcaaagggactctctgatcctggtaagattaaaaggcttcgggcccaggttcaggtgtccctggaagactatatcaacgatcgccagtacgactcaagaggcaggttcggggagttgctactgctcctgccaacacttcaaagcattacctggcagatgatcgagcagatccaatttattaagctgttcggaatggctaaaatagataatttgctccaggaaatgctgttaggcggtgccccgagtgacgcaccccatgcccaccaccctctgcatccacacctaatgcaggagcatatggggactaacgtaatcgtggctaatacaatgcccacccacctctctaacggacagatgtgcgaatggcctcgtccacggggccaagccgcagcgcccgaggctccgcagcctgctcccccaggcgggtccggaagcgaaccttataagctgcttcccggtgcagtcgccacgattgtgcgaccattggaggctatcccccagcctactataaccaaacaggaggttatttgaggactagtccctgttcccagagcccacttttttttctttttttgaaataaaatagcctgtctttcagatctaaaaaaaaaaaaaaaaaaaaaaaaaaaaaaaaaaaaaaaaaaaaaaaaaaaaaaaaaaaaaaaaaaaaaaaaaaaaaaaaaaaaaaaaaaaaaaaaaaaa

SEQ ID NO: 5317 - RNA, 1562 nt, synthetic construct
  misc_feature 1..1562: note = mRNA a-1 (A100) (opt3) from Homo sapiens__NP_000448.3__HNF4A(39-474)(S87A_S95A_S99A_K106R_K1 08R_K126R_K127R_S138A_T139A_S142A_S143A_S148A_T166A_S167A_S 313A_S378A_T429A_T432A_S436A_K458R_S461E)
  source 1..1562: mol_type = other RNA
aggagagtcccgcagtcggcgtccagcggctctgcttgttcgtgtgtgtgtcgttgcaggccttattcaagcttaccatggacacctctccttcagaggggacaaacttaaatgcgccaaacagtctgggagtgagcgctctatgcgccatctgtggtgatagggcaactggcaaacactacggggcctcctcttgcgacggatgtaagggctttttccggcgcgctgtacgtaaaaatcatatgtatgcatgccgatttgccagacaatgtgtggtcgatagggaccggcgcaaccagtgcagatactgtaggctcaagaaatgcttccgggctggtatgcgccgagaagccgtgcagaatgagagagataggattgcggcacggcgtgccgcttatgaagactcggccctgccgtcaataaacgcacttctgcaggctgaggttttgagccgccaaatcgccgcgcccgtgagtgggattaatggagatatcagagccaagaagattgcatccatcgctgacgtctgtgagtctatgaaagaacagctcctggtgctggtagagtgggccaagtacatacctgctttttgcgaactcccattagatgaccaggttgccctgcttagggcacacgccggcgagcatttgctgctaggcgctaccaaacggagcatggtgttcaaggacgtcctcctgcttgggaacgattatatcgtgccccgacactgtcctgagctggcggaaatgtcccgcgtgtcaattagaatcttggacgagctcgtcctgccatttcaggaattacaaattgatgacaatgagtacgcatacctgaaagccatcatattctttgatcccgacgctaagggactcagtgatcctggtaagattaaaaggcttcgggcccaggttcaggtgagcctggaagactatatcaacgatcgccagtacgactctagaggcaggttcggggagttgctactgctcctgccaacacttcaatccattacctggcagatgatcgagcagatccaatttattaagctgttcggaatggcaaaaatagataatttgctccaggaaatgctgttaggcggtgccccgtcagacgctccccatgcccaccaccctctgcatccacacctaatgcaggagcatatggggactaacgtaatcgtggcaaatacaatgcccacccacctcagcaacggacagatgtgcgaatggcctcgtccacggggccaagcggctgcccccgaggcaccgcagcctgctcccccaggcgggagtggatctgaaccttataagctgcttcccggtgccgtcgccacgattgtgcgaccattggaggcaatcccccagcctactataaccaaacaggaggttatttgaggactagtccctgttcccagagcccacttttttttctttttttgaaataaaatagcctgtctttcagatctaaaaaaaaaaaaaaaaaaaaaaaaaaaaaaaaaaaaaaaaaaaaaaaaaaaaaaaaaaaaaaaaaaaaaaaaaaaaaaaaaaaaaaaaaaaaaaaaaaaa

SEQ ID NO: 5318 - RNA, 1562 nt, synthetic construct
  misc_feature 1..1562: note = mRNA a-1 (A100) (opt4) from Homo sapiens__NP_000448.3__HNF4A(39-474)
  source 1..1562: mol_type = other RNA
aggagagtcccgcagtcggcgtccagcggctctgcttgttcgtgtgtgtgtcgttgcaggccttattcaagcttaccatggacaccagccccagcgagggcaccaacctgaacgcccccaacagcctgggcgtgagcgccctgtgcgccatctgcggcgacagagccaccggcaagcactacggcgccagcagctgcgacggctgcaagggcttcttcagaagaagcgtgagaaagaaccacatgtacagctgcagattcagcagacagtgcgtggtggacaaggacaagagaaaccagtgcagatactgcagactgaagaagtgcttcagagccggcatgaagaaggaggccgtgcagaacgagagagacagaatcagcaccagaagaagcagctacgaggacagcagcctgcccagcatcaacgccctgctgcaggccgaggtgctgagcagacagatcaccagccccgtgagcggcatcaacggcgacatcagagccaagaagatcgccagcatcgccgacgtgtgcgagagcatgaaggagcagctgctggtgctggtggagtgggccaagtacatccccgccttctgcgagctgcccctggacgaccaggtggccctgctgagagcccacgccggcgagcacctgctgctgggcgccaccaagagaagcatggtgttcaaggacgtgctgctgctgggcaacgactacatcgtgcccagacactgccccgagctggccgagatgagcagagtgagcatcagaatcctggacgagctggtgctgcccttccaggagctgcagatcgacgacaacgagtacgcctacctgaaggccatcatcttcttcgaccccgacgccaagggcctgagcgaccccggcaagatcaagagactgagaagccaggtgcaggtgagcctggaggactacatcaacgacagacagtacgacagcagaggcagattcggcgagctgctgctgctgctgcccaccctgcagagcatcacctggcagatgatcgagcagatccagttcatcaagctgttcggcatggccaagatcgacaacctgctgcaggagatgctgctgggcggcagccccagcgacgccccccacgcccaccaccccctgcacccccacctgatgcaggagcacatgggcaccaacgtgatcgtggccaacaccatgcccacccacctgagcaacggccagatgtgcgagtggcccagacccagaggccaggccgccacccccgagaccccccagcccagcccccccggcggcagcggcagcgagccctacaagctgctgcccggcgccgtggccaccatcgtgaagcccctgagcgccatcccccagcccaccatcaccaagcaggaggtgatctgaggactagtccctgttcccagagcccacttttttttctttttttgaaataaaatagcctgtctttcagatctaaaaaaaaaaaaaaaaaaaaaaaaaaaaaaaaaaaaaaaaaaaaaaaaaaaaaaaaaaaaaaaaaaaaaaaaaaaaaaaaaaaaaaaaaaaaaaaaaaaa

SEQ ID NO: 5319 - RNA, 1562 nt, synthetic construct
  misc_feature 1..1562: note = mRNA a-1 (A100) (opt4) from Homo sapiens__NP_000448.3__HNF4A(39-474)(S313A)
  source 1..1562: mol_type = other RNA
aggagagtcccgcagtcggcgtccagcggctctgcttgttcgtgtgtgtgtcgttgcaggccttattcaagcttaccatggacaccagccccagcgagggcaccaacctgaacgcccccaacagcctgggcgtgagcgccctgtgcgccatctgcggcgacagagccaccggcaagcactacggcgccagcagctgcgacggctgcaagggcttcttcagaagaagcgtgagaaagaaccacatgtacagctgcagattcagcagacagtgcgtggtggacaaggacaagagaaaccagtgcagatactgcagactgaagaagtgcttcagagccggcatgaagaaggaggccgtgcagaacgagagagacagaatcagcaccagaagaagcagctacgaggacagcagcctgcccagcatcaacgccctgctgcaggccgaggtgctgagcagacagatcaccagccccgtgagcggcatcaacggcgacatcagagccaagaagatcgccagcatcgccgacgtgtgcgagagcatgaaggagcagctgctggtgctggtggagtgggccaagtacatccccgccttctgcgagctgcccctggacgaccaggtggccctgctgagagcccacgccggcgagcacctgctgctgggcgccaccaagagaagcatggtgttcaaggacgtgctgctgctgggcaacgactacatcgtgcccagacactgccccgagctggccgagatgagcagagtgagcatcagaatcctggacgagctggtgctgcccttccaggagctgcagatcgacgacaacgagtacgcctacctgaaggccatcatcttcttcgaccccgacgccaagggcctgagcgaccccggcaagatcaagagactgagagcccaggtgcaggtgagcctggaggactacatcaacgacagacagtacgacagcagaggcagattcggcgagctgctgctgctgctgcccaccctgcagagcatcacctggcagatgatcgagcagatccagttcatcaagctgttcggcatggccaagatcgacaacctgctgcaggagatgctgctgggcggcagccccagcgacgccccccacgcccaccaccccctgcacccccacctgatgcaggagcacatgggcaccaacgtgatcgtggccaacaccatgcccacccacctgagcaacggccagatgtgcgagtggcccagacccagaggccaggccgccacccccgagaccccccagcccagcccccccggcggcagcggcagcgagccctacaagctgctgcccggcgccgtggccaccatcgtgaagcccctgagcgccatcccccagcccaccatcaccaagcaggaggtgatctgaggactagtccctgttcccagagcccacttttttttctttttttgaaataaaatagcctgtctttcagatctaaaaaaaaaaaaaaaaaaaaaaaaaaaaaaaaaaaaaaaaaaaaaaaaaaaaaaaaaaaaaaaaaaaaaaaaaaaaaaaaaaaaaaaaaaaaaaaaaaaa

SEQ ID NO: 5320 - RNA, 1562 nt, synthetic construct
  misc_feature 1..1562: note = mRNA a-1 (A100) (opt4) from Homo sapiens__NP_000448.3__HNF4A(39-474)(S313E)
  source 1..1562: mol_type = other RNA
aggagagtcccgcagtcggcgtccagcggctctgcttgttcgtgtgtgtgtcgttgcaggccttattcaagcttaccatggacaccagccccagcgagggcaccaacctgaacgcccccaacagcctgggcgtgagcgccctgtgcgccatctgcggcgacagagccaccggcaagcactacggcgccagcagctgcgacggctgcaagggcttcttcagaagaagcgtgagaaagaaccacatgtacagctgcagattcagcagacagtgcgtggtggacaaggacaagagaaaccagtgcagatactgcagactgaagaagtgcttcagagccggcatgaagaaggaggccgtgcagaacgagagagacagaatcagcaccagaagaagcagctacgaggacagcagcctgcccagcatcaacgccctgctgcaggccgaggtgctgagcagacagatcaccagccccgtgagcggcatcaacggcgacatcagagccaagaagatcgccagcatcgccgacgtgtgcgagagcatgaaggagcagctgctggtgctggtggagtgggccaagtacatccccgccttctgcgagctgcccctggacgaccaggtggccctgctgagagcccacgccggcgagcacctgctgctgggcgccaccaagagaagcatggtgttcaaggacgtgctgctgctgggcaacgactacatcgtgcccagacactgccccgagctggccgagatgagcagagtgagcatcagaatcctggacgagctggtgctgcccttccaggagctgcagatcgacgacaacgagtacgcctacctgaaggccatcatcttcttcgaccccgacgccaagggcctgagcgaccccggcaagatcaagagactgagagagcaggtgcaggtgagcctggaggactacatcaacgacagacagtacgacagcagaggcagattcggcgagctgctgctgctgctgcccaccctgcagagcatcacctggcagatgatcgagcagatccagttcatcaagctgttcggcatggccaagatcgacaacctgctgcaggagatgctgctgggcggcagccccagcgacgccccccacgcccaccaccccctgcacccccacctgatgcaggagcacatgggcaccaacgtgatcgtggccaacaccatgcccacccacctgagcaacggccagatgtgcgagtggcccagacccagaggccaggccgccacccccgagaccccccagcccagcccccccggcggcagcggcagcgagccctacaagctgctgcccggcgccgtggccaccatcgtgaagcccctgagcgccatcccccagcccaccatcaccaagcaggaggtgatctgaggactagtccctgttcccagagcccacttttttttctttttttgaaataaaatagcctgtctttcagatctaaaaaaaaaaaaaaaaaaaaaaaaaaaaaaaaaaaaaaaaaaaaaaaaaaaaaaaaaaaaaaaaaaaaaaaaaaaaaaaaaaaaaaaaaaaaaaaaaaaa

SEQ ID NO: 5321 - RNA, 1562 nt, synthetic construct
  misc_feature 1..1562: note = mRNA a-1 (A100) (opt4) from Homo sapiens__NP_000448.3__HNF4A(39-474)(S142A_S143A)
  source 1..1562: mol_type = other RNA
aggagagtcccgcagtcggcgtccagcggctctgcttgttcgtgtgtgtgtcgttgcaggccttattcaagcttaccatggacaccagccccagcgagggcaccaacctgaacgcccccaacagcctgggcgtgagcgccctgtgcgccatctgcggcgacagagccaccggcaagcactacggcgccagcagctgcgacggctgcaagggcttcttcagaagaagcgtgagaaagaaccacatgtacagctgcagattcagcagacagtgcgtggtggacaaggacaagagaaaccagtgcagatactgcagactgaagaagtgcttcagagccggcatgaagaaggaggccgtgcagaacgagagagacagaatcagcaccagaagagccgcctacgaggacagcagcctgcccagcatcaacgccctgctgcaggccgaggtgctgagcagacagatcaccagccccgtgagcggcatcaacggcgacatcagagccaagaagatcgccagcatcgccgacgtgtgcgagagcatgaaggagcagctgctggtgctggtggagtgggccaagtacatccccgccttctgcgagctgcccctggacgaccaggtggccctgctgagagcccacgccggcgagcacctgctgctgggcgccaccaagagaagcatggtgttcaaggacgtgctgctgctgggcaacgactacatcgtgcccagacactgccccgagctggccgagatgagcagagtgagcatcagaatcctggacgagctggtgctgcccttccaggagctgcagatcgacgacaacgagtacgcctacctgaaggccatcatcttcttcgaccccgacgccaagggcctgagcgaccccggcaagatcaagagactgagaagccaggtgcaggtgagcctggaggactacatcaacgacagacagtacgacagcagaggcagattcggcgagctgctgctgctgctgcccaccctgcagagcatcacctggcagatgatcgagcagatccagttcatcaagctgttcggcatggccaagatcgacaacctgctgcaggagatgctgctgggcggcagccccagcgacgccccccacgcccaccaccccctgcacccccacctgatgcaggagcacatgggcaccaacgtgatcgtggccaacaccatgcccacccacctgagcaacggccagatgtgcgagtggcccagacccagaggccaggccgccacccccgagaccccccagcccagcccccccggcggcagcggcagcgagccctacaagctgctgcccggcgccgtggccaccatcgtgaagcccctgagcgccatcccccagcccaccatcaccaagcaggaggtgatctgaggactagtccctgttcccagagcccacttttttttctttttttgaaataaaatagcctgtctttcagatctaaaaaaaaaaaaaaaaaaaaaaaaaaaaaaaaaaaaaaaaaaaaaaaaaaaaaaaaaaaaaaaaaaaaaaaaaaaaaaaaaaaaaaaaaaaaaaaaaaaa

SEQ ID NO: 5322 - RNA, 1562 nt, synthetic construct
  misc_feature 1..1562: note = mRNA a-1 (A100) (opt4) from Homo sapiens__NP_000448.3__HNF4A(39-474)(S142E_S143E)
  source 1..1562: mol_type = other RNA
aggagagtcccgcagtcggcgtccagcggctctgcttgttcgtgtgtgtgtcgttgcaggccttattcaagcttaccatggacaccagccccagcgagggcaccaacctgaacgcccccaacagcctgggcgtgagcgccctgtgcgccatctgcggcgacagagccaccggcaagcactacggcgccagcagctgcgacggctgcaagggcttcttcagaagaagcgtgagaaagaaccacatgtacagctgcagattcagcagacagtgcgtggtggacaaggacaagagaaaccagtgcagatactgcagactgaagaagtgcttcagagccggcatgaagaaggaggccgtgcagaacgagagagacagaatcagcaccagaagagaggagtacgaggacagcagcctgcccagcatcaacgccctgctgcaggccgaggtgctgagcagacagatcaccagccccgtgagcggcatcaacggcgacatcagagccaagaagatcgccagcatcgccgacgtgtgcgagagcatgaaggagcagctgctggtgctggtggagtgggccaagtacatccccgccttctgcgagctgcccctggacgaccaggtggccctgctgagagcccacgccggcgagcacctgctgctgggcgccaccaagagaagcatggtgttcaaggacgtgctgctgctgggcaacgactacatcgtgcccagacactgccccgagctggccgagatgagcagagtgagcatcagaatcctggacgagctggtgctgcccttccaggagctgcagatcgacgacaacgagtacgcctacctgaaggccatcatcttcttcgaccccgacgccaagggcctgagcgaccccggcaagatcaagagactgagaagccaggtgcaggtgagcctggaggactacatcaacgacagacagtacgacagcagaggcagattcggcgagctgctgctgctgctgcccaccctgcagagcatcacctggcagatgatcgagcagatccagttcatcaagctgttcggcatggccaagatcgacaacctgctgcaggagatgctgctgggcggcagccccagcgacgccccccacgcccaccaccccctgcacccccacctgatgcaggagcacatgggcaccaacgtgatcgtggccaacaccatgcccacccacctgagcaacggccagatgtgcgagtggcccagacccagaggccaggccgccacccccgagaccccccagcccagcccccccggcggcagcggcagcgagccctacaagctgctgcccggcgccgtggccaccatcgtgaagcccctgagcgccatcccccagcccaccatcaccaagcaggaggtgatctgaggactagtccctgttcccagagcccacttttttttctttttttgaaataaaatagcctgtctttcagatctaaaaaaaaaaaaaaaaaaaaaaaaaaaaaaaaaaaaaaaaaaaaaaaaaaaaaaaaaaaaaaaaaaaaaaaaaaaaaaaaaaaaaaaaaaaaaaaaaaaa

SEQ ID NO: 5323 - RNA, 1562 nt, synthetic construct
  misc_feature 1..1562: note = mRNA a-1 (A100) (opt4) from Homo sapiens__NP_000448.3__HNF4A(39-474)(S143A)
  source 1..1562: mol_type = other RNA
aggagagtcccgcagtcggcgtccagcggctctgcttgttcgtgtgtgtgtcgttgcaggccttattcaagcttaccatggacaccagccccagcgagggcaccaacctgaacgcccccaacagcctgggcgtgagcgccctgtgcgccatctgcggcgacagagccaccggcaagcactacggcgccagcagctgcgacggctgcaagggcttcttcagaagaagcgtgagaaagaaccacatgtacagctgcagattcagcagacagtgcgtggtggacaaggacaagagaaaccagtgcagatactgcagactgaagaagtgcttcagagccggcatgaagaaggaggccgtgcagaacgagagagacagaatcagcaccagaagaagcgcctacgaggacagcagcctgcccagcatcaacgccctgctgcaggccgaggtgctgagcagacagatcaccagccccgtgagcggcatcaacggcgacatcagagccaagaagatcgccagcatcgccgacgtgtgcgagagcatgaaggagcagctgctggtgctggtggagtgggccaagtacatccccgccttctgcgagctgcccctggacgaccaggtggccctgctgagagcccacgccggcgagcacctgctgctgggcgccaccaagagaagcatggtgttcaaggacgtgctgctgctgggcaacgactacatcgtgcccagacactgccccgagctggccgagatgagcagagtgagcatcagaatcctggacgagctggtgctgcccttccaggagctgcagatcgacgacaacgagtacgcctacctgaaggccatcatcttcttcgaccccgacgccaagggcctgagcgaccccggcaagatcaagagactgagaagccaggtgcaggtgagcctggaggactacatcaacgacagacagtacgacagcagaggcagattcggcgagctgctgctgctgctgcccaccctgcagagcatcacctggcagatgatcgagcagatccagttcatcaagctgttcggcatggccaagatcgacaacctgctgcaggagatgctgctgggcggcagccccagcgacgccccccacgcccaccaccccctgcacccccacctgatgcaggagcacatgggcaccaacgtgatcgtggccaacaccatgcccacccacctgagcaacggccagatgtgcgagtggcccagacccagaggccaggccgccacccccgagaccccccagcccagcccccccggcggcagcggcagcgagccctacaagctgctgcccggcgccgtggccaccatcgtgaagcccctgagcgccatcccccagcccaccatcaccaagcaggaggtgatctgaggactagtccctgttcccagagcccacttttttttctttttttgaaataaaatagcctgtctttcagatctaaaaaaaaaaaaaaaaaaaaaaaaaaaaaaaaaaaaaaaaaaaaaaaaaaaaaaaaaaaaaaaaaaaaaaaaaaaaaaaaaaaaaaaaaaaaaaaaaaaa

SEQ ID NO: 5324 - RNA, 1562 nt, synthetic construct
  misc_feature 1..1562: note = mRNA a-1 (A100) (opt4) from Homo sapiens__NP_000448.3__HNF4A(39-474)(T166A)
  source 1..1562: mol_type = other RNA
aggagagtcccgcagtcggcgtccagcggctctgcttgttcgtgtgtgtgtcgttgcaggccttattcaagcttaccatggacaccagccccagcgagggcaccaacctgaacgcccccaacagcctgggcgtgagcgccctgtgcgccatctgcggcgacagagccaccggcaagcactacggcgccagcagctgcgacggctgcaagggcttcttcagaagaagcgtgagaaagaaccacatgtacagctgcagattcagcagacagtgcgtggtggacaaggacaagagaaaccagtgcagatactgcagactgaagaagtgcttcagagccggcatgaagaaggaggccgtgcagaacgagagagacagaatcagcaccagaagaagcagctacgaggacagcagcctgcccagcatcaacgccctgctgcaggccgaggtgctgagcagacagatcgccagccccgtgagcggcatcaacggcgacatcagagccaagaagatcgccagcatcgccgacgtgtgcgagagcatgaaggagcagctgctggtgctggtggagtgggccaagtacatccccgccttctgcgagctgcccctggacgaccaggtggccctgctgagagcccacgccggcgagcacctgctgctgggcgccaccaagagaagcatggtgttcaaggacgtgctgctgctgggcaacgactacatcgtgcccagacactgccccgagctggccgagatgagcagagtgagcatcagaatcctggacgagctggtgctgcccttccaggagctgcagatcgacgacaacgagtacgcctacctgaaggccatcatcttcttcgaccccgacgccaagggcctgagcgaccccggcaagatcaagagactgagaagccaggtgcaggtgagcctggaggactacatcaacgacagacagtacgacagcagaggcagattcggcgagctgctgctgctgctgcccaccctgcagagcatcacctggcagatgatcgagcagatccagttcatcaagctgttcggcatggccaagatcgacaacctgctgcaggagatgctgctgggcggcagccccagcgacgccccccacgcccaccaccccctgcacccccacctgatgcaggagcacatgggcaccaacgtgatcgtggccaacaccatgcccacccacctgagcaacggccagatgtgcgagtggcccagacccagaggccaggccgccacccccgagaccccccagcccagcccccccggcggcagcggcagcgagccctacaagctgctgcccggcgccgtggccaccatcgtgaagcccctgagcgccatcccccagcccaccatcaccaagcaggaggtgatctgaggactagtccctgttcccagagcccacttttttttctttttttgaaataaaatagcctgtctttcagatctaaaaaaaaaaaaaaaaaaaaaaaaaaaaaaaaaaaaaaaaaaaaaaaaaaaaaaaaaaaaaaaaaaaaaaaaaaaaaaaaaaaaaaaaaaaaaaaaaaaa

SEQ ID NO: 5325 - RNA, 1562 nt, synthetic construct
  misc_feature 1..1562: note = mRNA a-1 (A100) (opt4) from Homo sapiens__NP_000448.3__HNF4A(39-474)(S167E)
  source 1..1562: mol_type = other RNA
aggagagtcccgcagtcggcgtccagcggctctgcttgttcgtgtgtgtgtcgttgcaggccttattcaagcttaccatggacaccagccccagcgagggcaccaacctgaacgcccccaacagcctgggcgtgagcgccctgtgcgccatctgcggcgacagagccaccggcaagcactacggcgccagcagctgcgacggctgcaagggcttcttcagaagaagcgtgagaaagaaccacatgtacagctgcagattcagcagacagtgcgtggtggacaaggacaagagaaaccagtgcagatactgcagactgaagaagtgcttcagagccggcatgaagaaggaggccgtgcagaacgagagagacagaatcagcaccagaagaagcagctacgaggacagcagcctgcccagcatcaacgccctgctgcaggccgaggtgctgagcagacagatcaccgagcccgtgagcggcatcaacggcgacatcagagccaagaagatcgccagcatcgccgacgtgtgcgagagcatgaaggagcagctgctggtgctggtggagtgggccaagtacatccccgccttctgcgagctgcccctggacgaccaggtggccctgctgagagcccacgccggcgagcacctgctgctgggcgccaccaagagaagcatggtgttcaaggacgtgctgctgctgggcaacgactacatcgtgcccagacactgccccgagctggccgagatgagcagagtgagcatcagaatcctggacgagctggtgctgcccttccaggagctgcagatcgacgacaacgagtacgcctacctgaaggccatcatcttcttcgaccccgacgccaagggcctgagcgaccccggcaagatcaagagactgagaagccaggtgcaggtgagcctggaggactacatcaacgacagacagtacgacagcagaggcagattcggcgagctgctgctgctgctgcccaccctgcagagcatcacctggcagatgatcgagcagatccagttcatcaagctgttcggcatggccaagatcgacaacctgctgcaggagatgctgctgggcggcagccccagcgacgccccccacgcccaccaccccctgcacccccacctgatgcaggagcacatgggcaccaacgtgatcgtggccaacaccatgcccacccacctgagcaacggccagatgtgcgagtggcccagacccagaggccaggccgccacccccgagaccccccagcccagcccccccggcggcagcggcagcgagccctacaagctgctgcccggcgccgtggccaccatcgtgaagcccctgagcgccatcccccagcccaccatcaccaagcaggaggtgatctgaggactagtccctgttcccagagcccacttttttttctttttttgaaataaaatagcctgtctttcagatctaaaaaaaaaaaaaaaaaaaaaaaaaaaaaaaaaaaaaaaaaaaaaaaaaaaaaaaaaaaaaaaaaaaaaaaaaaaaaaaaaaaaaaaaaaaaaaaaaaaa

SEQ ID NO: 5326 - RNA, 1562 nt, synthetic construct
  misc_feature 1..1562: note = mRNA a-1 (A100) (opt4) from Homo sapiens__NP_000448.3__HNF4A(39-474)(S167A)
  source 1..1562: mol_type = other RNA
aggagagtcccgcagtcggcgtccagcggctctgcttgttcgtgtgtgtgtcgttgcaggccttattcaagcttaccatggacaccagccccagcgagggcaccaacctgaacgcccccaacagcctgggcgtgagcgccctgtgcgccatctgcggcgacagagccaccggcaagcactacggcgccagcagctgcgacggctgcaagggcttcttcagaagaagcgtgagaaagaaccacatgtacagctgcagattcagcagacagtgcgtggtggacaaggacaagagaaaccagtgcagatactgcagactgaagaagtgcttcagagccggcatgaagaaggaggccgtgcagaacgagagagacagaatcagcaccagaagaagcagctacgaggacagcagcctgcccagcatcaacgccctgctgcaggccgaggtgctgagcagacagatcaccgcccccgtgagcggcatcaacggcgacatcagagccaagaagatcgccagcatcgccgacgtgtgcgagagcatgaaggagcagctgctggtgctggtggagtgggccaagtacatccccgccttctgcgagctgcccctggacgaccaggtggccctgctgagagcccacgccggcgagcacctgctgctgggcgccaccaagagaagcatggtgttcaaggacgtgctgctgctgggcaacgactacatcgtgcccagacactgccccgagctggccgagatgagcagagtgagcatcagaatcctggacgagctggtgctgcccttccaggagctgcagatcgacgacaacgagtacgcctacctgaaggccatcatcttcttcgaccccgacgccaagggcctgagcgaccccggcaagatcaagagactgagaagccaggtgcaggtgagcctggaggactacatcaacgacagacagtacgacagcagaggcagattcggcgagctgctgctgctgctgcccaccctgcagagcatcacctggcagatgatcgagcagatccagttcatcaagctgttcggcatggccaagatcgacaacctgctgcaggagatgctgctgggcggcagccccagcgacgccccccacgcccaccaccccctgcacccccacctgatgcaggagcacatgggcaccaacgtgatcgtggccaacaccatgcccacccacctgagcaacggccagatgtgcgagtggcccagacccagaggccaggccgccacccccgagaccccccagcccagcccccccggcggcagcggcagcgagccctacaagctgctgcccggcgccgtggccaccatcgtgaagcccctgagcgccatcccccagcccaccatcaccaagcaggaggtgatctgaggactagtccctgttcccagagcccacttttttttctttttttgaaataaaatagcctgtctttcagatctaaaaaaaaaaaaaaaaaaaaaaaaaaaaaaaaaaaaaaaaaaaaaaaaaaaaaaaaaaaaaaaaaaaaaaaaaaaaaaaaaaaaaaaaaaaaaaaaaaaa

SEQ ID NO: 5327 - RNA, 1562 nt, synthetic construct
  misc_feature 1..1562: note = mRNA a-1 (A100) (opt4) from Homo sapiens__NP_000448.3__HNF4A(39-474)(S167A_S378A_T429A_T432A _S436A)
  source 1..1562: mol_type = other RNA
aggagagtcccgcagtcggcgtccagcggctctgcttgttcgtgtgtgtgtcgttgcaggccttattcaagcttaccatggacaccagccccagcgagggcaccaacctgaacgcccccaacagcctgggcgtgagcgccctgtgcgccatctgcggcgacagagccaccggcaagcactacggcgccagcagctgcgacggctgcaagggcttcttcagaagaagcgtgagaaagaaccacatgtacagctgcagattcagcagacagtgcgtggtggacaaggacaagagaaaccagtgcagatactgcagactgaagaagtgcttcagagccggcatgaagaaggaggccgtgcagaacgagagagacagaatcagcaccagaagaagcagctacgaggacagcagcctgcccagcatcaacgccctgctgcaggccgaggtgctgagcagacagatcaccgcccccgtgagcggcatcaacggcgacatcagagccaagaagatcgccagcatcgccgacgtgtgcgagagcatgaaggagcagctgctggtgctggtggagtgggccaagtacatccccgccttctgcgagctgcccctggacgaccaggtggccctgctgagagcccacgccggcgagcacctgctgctgggcgccaccaagagaagcatggtgttcaaggacgtgctgctgctgggcaacgactacatcgtgcccagacactgccccgagctggccgagatgagcagagtgagcatcagaatcctggacgagctggtgctgcccttccaggagctgcagatcgacgacaacgagtacgcctacctgaaggccatcatcttcttcgaccccgacgccaagggcctgagcgaccccggcaagatcaagagactgagaagccaggtgcaggtgagcctggaggactacatcaacgacagacagtacgacagcagaggcagattcggcgagctgctgctgctgctgcccaccctgcagagcatcacctggcagatgatcgagcagatccagttcatcaagctgttcggcatggccaagatcgacaacctgctgcaggagatgctgctgggcggcgcccccagcgacgccccccacgcccaccaccccctgcacccccacctgatgcaggagcacatgggcaccaacgtgatcgtggccaacaccatgcccacccacctgagcaacggccagatgtgcgagtggcccagacccagaggccaggccgccgcccccgaggccccccagcccgccccccccggcggcagcggcagcgagccctacaagctgctgcccggcgccgtggccaccatcgtgaagcccctgagcgccatcccccagcccaccatcaccaagcaggaggtgatctgaggactagtccctgttcccagagcccacttttttttctttttttgaaataaaatagcctgtctttcagatctaaaaaaaaaaaaaaaaaaaaaaaaaaaaaaaaaaaaaaaaaaaaaaaaaaaaaaaaaaaaaaaaaaaaaaaaaaaaaaaaaaaaaaaaaaaaaaaaaaaa

SEQ ID NO: 5328 - RNA, 1562 nt, synthetic construct
  misc_feature 1..1562: note = mRNA a-1 (A100) (opt4) from Homo sapiens__NP_000448.3__HNF4A(39-474)(S167E_S378E_T429E_T432E _S436E)
  source 1..1562: mol_type = other RNA
aggagagtcccgcagtcggcgtccagcggctctgcttgttcgtgtgtgtgtcgttgcaggccttattcaagcttaccatggacaccagccccagcgagggcaccaacctgaacgcccccaacagcctgggcgtgagcgccctgtgcgccatctgcggcgacagagccaccggcaagcactacggcgccagcagctgcgacggctgcaagggcttcttcagaagaagcgtgagaaagaaccacatgtacagctgcagattcagcagacagtgcgtggtggacaaggacaagagaaaccagtgcagatactgcagactgaagaagtgcttcagagccggcatgaagaaggaggccgtgcagaacgagagagacagaatcagcaccagaagaagcagctacgaggacagcagcctgcccagcatcaacgccctgctgcaggccgaggtgctgagcagacagatcaccgagcccgtgagcggcatcaacggcgacatcagagccaagaagatcgccagcatcgccgacgtgtgcgagagcatgaaggagcagctgctggtgctggtggagtgggccaagtacatccccgccttctgcgagctgcccctggacgaccaggtggccctgctgagagcccacgccggcgagcacctgctgctgggcgccaccaagagaagcatggtgttcaaggacgtgctgctgctgggcaacgactacatcgtgcccagacactgccccgagctggccgagatgagcagagtgagcatcagaatcctggacgagctggtgctgcccttccaggagctgcagatcgacgacaacgagtacgcctacctgaaggccatcatcttcttcgaccccgacgccaagggcctgagcgaccccggcaagatcaagagactgagaagccaggtgcaggtgagcctggaggactacatcaacgacagacagtacgacagcagaggcagattcggcgagctgctgctgctgctgcccaccctgcagagcatcacctggcagatgatcgagcagatccagttcatcaagctgttcggcatggccaagatcgacaacctgctgcaggagatgctgctgggcggcgagcccagcgacgccccccacgcccaccaccccctgcacccccacctgatgcaggagcacatgggcaccaacgtgatcgtggccaacaccatgcccacccacctgagcaacggccagatgtgcgagtggcccagacccagaggccaggccgccgagcccgaggagccccagcccgagccccccggcggcagcggcagcgagccctacaagctgctgcccggcgccgtggccaccatcgtgaagcccctgagcgccatcccccagcccaccatcaccaagcaggaggtgatctgaggactagtccctgttcccagagcccacttttttttctttttttgaaataaaatagcctgtctttcagatctaaaaaaaaaaaaaaaaaaaaaaaaaaaaaaaaaaaaaaaaaaaaaaaaaaaaaaaaaaaaaaaaaaaaaaaaaaaaaaaaaaaaaaaaaaaaaaaaaaaa

SEQ ID NO: 5329 - RNA, 1562 nt, synthetic construct
  misc_feature 1..1562: note = mRNA a-1 (A100) (opt4) from Homo sapiens__NP_000448.3__HNF4A(39-474)(S87A)
  source 1..1562: mol_type = other RNA
aggagagtcccgcagtcggcgtccagcggctctgcttgttcgtgtgtgtgtcgttgcaggccttattcaagcttaccatggacaccagccccagcgagggcaccaacctgaacgcccccaacagcctgggcgtgagcgccctgtgcgccatctgcggcgacagagccaccggcaagcactacggcgccagcagctgcgacggctgcaagggcttcttcagaagagccgtgagaaagaaccacatgtacagctgcagattcagcagacagtgcgtggtggacaaggacaagagaaaccagtgcagatactgcagactgaagaagtgcttcagagccggcatgaagaaggaggccgtgcagaacgagagagacagaatcagcaccagaagaagcagctacgaggacagcagcctgcccagcatcaacgccctgctgcaggccgaggtgctgagcagacagatcaccagccccgtgagcggcatcaacggcgacatcagagccaagaagatcgccagcatcgccgacgtgtgcgagagcatgaaggagcagctgctggtgctggtggagtgggccaagtacatccccgccttctgcgagctgcccctggacgaccaggtggccctgctgagagcccacgccggcgagcacctgctgctgggcgccaccaagagaagcatggtgttcaaggacgtgctgctgctgggcaacgactacatcgtgcccagacactgccccgagctggccgagatgagcagagtgagcatcagaatcctggacgagctggtgctgcccttccaggagctgcagatcgacgacaacgagtacgcctacctgaaggccatcatcttcttcgaccccgacgccaagggcctgagcgaccccggcaagatcaagagactgagaagccaggtgcaggtgagcctggaggactacatcaacgacagacagtacgacagcagaggcagattcggcgagctgctgctgctgctgcccaccctgcagagcatcacctggcagatgatcgagcagatccagttcatcaagctgttcggcatggccaagatcgacaacctgctgcaggagatgctgctgggcggcagccccagcgacgccccccacgcccaccaccccctgcacccccacctgatgcaggagcacatgggcaccaacgtgatcgtggccaacaccatgcccacccacctgagcaacggccagatgtgcgagtggcccagacccagaggccaggccgccacccccgagaccccccagcccagcccccccggcggcagcggcagcgagccctacaagctgctgcccggcgccgtggccaccatcgtgaagcccctgagcgccatcccccagcccaccatcaccaagcaggaggtgatctgaggactagtccctgttcccagagcccacttttttttctttttttgaaataaaatagcctgtctttcagatctaaaaaaaaaaaaaaaaaaaaaaaaaaaaaaaaaaaaaaaaaaaaaaaaaaaaaaaaaaaaaaaaaaaaaaaaaaaaaaaaaaaaaaaaaaaaaaaaaaaa

SEQ ID NO: 5330 - RNA, 1562 nt, synthetic construct
  misc_feature 1..1562: note = mRNA a-1 (A100) (opt4) from Homo sapiens__NP_000448.3__HNF4A(39-474)(S87E)
  source 1..1562: mol_type = other RNA
aggagagtcccgcagtcggcgtccagcggctctgcttgttcgtgtgtgtgtcgttgcaggccttattcaagcttaccatggacaccagccccagcgagggcaccaacctgaacgcccccaacagcctgggcgtgagcgccctgtgcgccatctgcggcgacagagccaccggcaagcactacggcgccagcagctgcgacggctgcaagggcttcttcagaagagaggtgagaaagaaccacatgtacagctgcagattcagcagacagtgcgtggtggacaaggacaagagaaaccagtgcagatactgcagactgaagaagtgcttcagagccggcatgaagaaggaggccgtgcagaacgagagagacagaatcagcaccagaagaagcagctacgaggacagcagcctgcccagcatcaacgccctgctgcaggccgaggtgctgagcagacagatcaccagccccgtgagcggcatcaacggcgacatcagagccaagaagatcgccagcatcgccgacgtgtgcgagagcatgaaggagcagctgctggtgctggtggagtgggccaagtacatccccgccttctgcgagctgcccctggacgaccaggtggccctgctgagagcccacgccggcgagcacctgctgctgggcgccaccaagagaagcatggtgttcaaggacgtgctgctgctgggcaacgactacatcgtgcccagacactgccccgagctggccgagatgagcagagtgagcatcagaatcctggacgagctggtgctgcccttccaggagctgcagatcgacgacaacgagtacgcctacctgaaggccatcatcttcttcgaccccgacgccaagggcctgagcgaccccggcaagatcaagagactgagaagccaggtgcaggtgagcctggaggactacatcaacgacagacagtacgacagcagaggcagattcggcgagctgctgctgctgctgcccaccctgcagagcatcacctggcagatgatcgagcagatccagttcatcaagctgttcggcatggccaagatcgacaacctgctgcaggagatgctgctgggcggcagccccagcgacgccccccacgcccaccaccccctgcacccccacctgatgcaggagcacatgggcaccaacgtgatcgtggccaacaccatgcccacccacctgagcaacggccagatgtgcgagtggcccagacccagaggccaggccgccacccccgagaccccccagcccagcccccccggcggcagcggcagcgagccctacaagctgctgcccggcgccgtggccaccatcgtgaagcccctgagcgccatcccccagcccaccatcaccaagcaggaggtgatctgaggactagtccctgttcccagagcccacttttttttctttttttgaaataaaatagcctgtctttcagatctaaaaaaaaaaaaaaaaaaaaaaaaaaaaaaaaaaaaaaaaaaaaaaaaaaaaaaaaaaaaaaaaaaaaaaaaaaaaaaaaaaaaaaaaaaaaaaaaaaaa

SEQ ID NO: 5331 - RNA, 1562 nt, synthetic construct; identical to SEQ ID NO: 5318
  misc_feature 1..1562: note = mRNA a-1 (A100) (opt4) from Homo sapiens__NP_000448.3__HNF4A(39-474)(R2V)
  source 1..1562: mol_type = other RNA

SEQ ID NO: 5332 - RNA, 1562 nt, synthetic construct; identical to SEQ ID NO: 5318
  misc_feature 1..1562: note = mRNA a-1 (A100) (opt4) from Homo sapiens__NP_000448.3__HNF4A(39-474)(R2V_K5V)
  source 1..1562: mol_type = other RNA

SEQ ID NO: 5333 - RNA, 1562 nt, synthetic construct
  misc_feature 1..1562: note = mRNA a-1 (A100) (opt4) from Homo sapiens__NP_000448.3__HNF4A(39-474)(K179R_K180R)
  source 1..1562: mol_type = other RNA
aggagagtcccgcagtcggcgtccagcggctctgcttgttcgtgtgtgtgtcgttgcaggccttattcaagcttaccatggacaccagccccagcgagggcaccaacctgaacgcccccaacagcctgggcgtgagcgccctgtgcgccatctgcggcgacagagccaccggcaagcactacggcgccagcagctgcgacggctgcaagggcttcttcagaagaagcgtgagaaagaaccacatgtacagctgcagattcagcagacagtgcgtggtggacaaggacaagagaaaccagtgcagatactgcagactgaagaagtgcttcagagccggcatgaagaaggaggccgtgcagaacgagagagacagaatcagcaccagaagaagcagctacgaggacagcagcctgcccagcatcaacgccctgctgcaggccgaggtgctgagcagacagatcaccagccccgtgagcggcatcaacggcgacatcagagccagaagaatcgccagcatcgccgacgtgtgcgagagcatgaaggagcagctgctggtgctggtggagtgggccaagtacatccccgccttctgcgagctgcccctggacgaccaggtggccctgctgagagcccacgccggcgagcacctgctgctgggcgccaccaagagaagcatggtgttcaaggacgtgctgctgctgggcaacgactacatcgtgcccagacactgccccgagctggccgagatgagcagagtgagcatcagaatcctggacgagctggtgctgcccttccaggagctgcagatcgacgacaacgagtacgcctacctgaaggccatcatcttcttcgaccccgacgccaagggcctgagcgaccccggcaagatcaagagactgagaagccaggtgcaggtgagcctggaggactacatcaacgacagacagtacgacagcagaggcagattcggcgagctgctgctgctgctgcccaccctgcagagcatcacctggcagatgatcgagcagatccagttcatcaagctgttcggcatggccaagatcgacaacctgctgcaggagatgctgctgggcggcagccccagcgacgccccccacgcccaccaccccctgcacccccacctgatgcaggagcacatgggcaccaacgtgatcgtggccaacaccatgcccacccacctgagcaacggccagatgtgcgagtggcccagacccagaggccaggccgccacccccgagaccccccagcccagcccccccggcggcagcggcagcgagccctacaagctgctgcccggcgccgtggccaccatcgtgaagcccctgagcgccatcccccagcccaccatcaccaagcaggaggtgatctgaggactagtccctgttcccagagcccacttttttttctttttttgaaataaaatagcctgtctttcagatctaaaaaaaaaaaaaaaaaaaaaaaaaaaaaaaaaaaaaaaaaaaaaaaaaaaaaaaaaaaaaaaaaaaaaaaaaaaaaaaaaaaaaaaaaaaaaaaaaaaa

SEQ ID NO: 5334 - RNA, 1562 nt, synthetic construct
  misc_feature 1..1562: note = mRNA a-1 (A100) (opt4) from Homo sapiens__NP_000448.3__HNF4A(39-474)(K234R)
  source 1..1562: mol_type = other RNA
aggagagtcccgcagtcggcgtccagcggctctgcttgttcgtgtgtgtgtcgttgcaggccttattcaagcttaccatggacaccagccccagcgagggcaccaacctgaacgcccccaacagcctgggcgtgagcgccctgtgcgccatctgcggcgacagagccaccggcaagcactacggcgccagcagctgcgacggctgcaagggcttcttcagaagaagcgtgagaaagaaccacatgtacagctgcagattcagcagacagtgcgtggtggacaaggacaagagaaaccagtgcagatactgcagactgaagaagtgcttcagagccggcatgaagaaggaggccgtgcagaacgagagagacagaatcagcaccagaagaagcagctacgaggacagcagcctgcccagcatcaacgccctgctgcaggccgaggtgctgagcagacagatcaccagccccgtgagcggcatcaacggcgacatcagagccaagaagatcgccagcatcgccgacgtgtgcgagagcatgaaggagcagctgctggtgctggtggagtgggccaagtacatccccgccttctgcgagctgcccctggacgaccaggtggccctgctgagagcccacgccggcgagcacctgctgctgggcgccaccagaagaagcatggtgttcaaggacgtgctgctgctgggcaacgactacatcgtgcccagacactgccccgagctggccgagatgagcagagtgagcatcagaatcctggacgagctggtgctgcccttccaggagctgcagatcgacgacaacgagtacgcctacctgaaggccatcatcttcttcgaccccgacgccaagggcctgagcgaccccggcaagatcaagagactgagaagccaggtgcaggtgagcctggaggactacatcaacgacagacagtacgacagcagaggcagattcggcgagctgctgctgctgctgcccaccctgcagagcatcacctggcagatgatcgagcagatccagttcatcaagctgttcggcatggccaagatcgacaacctgctgcaggagatgctgctgggcggcagccccagcgacgccccccacgcccaccaccccctgcacccccacctgatgcaggagcacatgggcaccaacgtgatcgtggccaacaccatgcccacccacctgagcaacggccagatgtgcgagtggcccagacccagaggccaggccgccacccccgagaccccccagcccagcccccccggcggcagcggcagcgagccctacaagctgctgcccggcgccgtggccaccatcgtgaagcccctgagcgccatcccccagcccaccatcaccaagcaggaggtgatctgaggactagtccctgttcccagagcccacttttttttctttttttgaaataaaatagcctgtctttcagatctaaaaaaaaaaaaaaaaaaaaaaaaaaaaaaaaaaaaaaaaaaaaaaaaaaaaaaaaaaaaaaaaaaaaaaaaaaaaaaaaaaaaaaaaaaaaaaaaaaaa

SEQ ID NO: 5335 - RNA, 1562 nt, synthetic construct
  misc_feature 1..1562: note = mRNA a-1 (A100) (opt4) from Homo sapiens__NP_000448.3__HNF4A(39-474)(K300R)
  source 1..1562: mol_type = other RNA
aggagagtcccgcagtcggcgtccagcggctctgcttgttcgtgtgtgtgtcgttgcaggccttattcaagcttaccatggacaccagccccagcgagggcaccaacctgaacgcccccaacagcctgggcgtgagcgccctgtgcgccatctgcggcgacagagccaccggcaagcactacggcgccagcagctgcgacggctgcaagggcttcttcagaagaagcgtgagaaagaaccacatgtacagctgcagattcagcagacagtgcgtggtggacaaggacaagagaaaccagtgcagatactgcagactgaagaagtgcttcagagccggcatgaagaaggaggccgtgcagaacgagagagacagaatcagcaccagaagaagcagctacgaggacagcagcctgcccagcatcaacgccctgctgcaggccgaggtgctgagcagacagatcaccagccccgtgagcggcatcaacggcgacatcagagccaagaagatcgccagcatcgccgacgtgtgcgagagcatgaaggagcagctgctggtgctggtggagtgggccaagtacatccccgccttctgcgagctgcccctggacgaccaggtggccctgctgagagcccacgccggcgagcacctgctgctgggcgccaccaagagaagcatggtgttcaaggacgtgctgctgctgggcaacgactacatcgtgcccagacactgccccgagctggccgagatgagcagagtgagcatcagaatcctggacgagctggtgctgcccttccaggagctgcagatcgacgacaacgagtacgcctacctgaaggccatcatcttcttcgaccccgacgccagaggcctgagcgaccccggcaagatcaagagactgagaagccaggtgcaggtgagcctggaggactacatcaacgacagacagtacgacagcagaggcagattcggcgagctgctgctgctgctgcccaccctgcagagcatcacctggcagatgatcgagcagatccagttcatcaagctgttcggcatggccaagatcgacaacctgctgcaggagatgctgctgggcggcagccccagcgacgccccccacgcccaccaccccctgcacccccacctgatgcaggagcacatgggcaccaacgtgatcgtggccaacaccatgcccacccacctgagcaacggccagatgtgcgagtggcccagacccagaggccaggccgccacccccgagaccccccagcccagcccccccggcggcagcggcagcgagccctacaagctgctgcccggcgccgtggccaccatcgtgaagcccctgagcgccatcccccagcccaccatcaccaagcaggaggtgatctgaggactagtccctgttcccagagcccacttttttttctttttttgaaataaaatagcctgtctttcagatctaaaaaaaaaaaaaaaaaaaaaaaaaaaaaaaaaaaaaaaaaaaaaaaaaaaaaaaaaaaaaaaaaaaaaaaaaaaaaaaaaaaaaaaaaaaaaaaaaaaa

SEQ ID NO: 5336 - RNA, 1562 nt, synthetic construct
  misc_feature 1..1562: note = mRNA a-1 (A100) (opt4) from Homo sapiens__NP_000448.3__HNF4A(39-474)(K300R_K307R_K309R)
  source 1..1562: mol_type = other RNA
aggagagtcccgcagtcggcgtccagcggctctgcttgttcgtgtgtgtgtcgttgcaggccttattcaagcttaccatggacaccagccccagcgagggcaccaacctgaacgcccccaacagcctgggcgtgagcgccctgtgcgccatctgcggcgacagagccaccggcaagcactacggcgccagcagctgcgacggctgcaagggcttcttcagaagaagcgtgagaaagaaccacatgtacagctgcagattcagcagacagtgcgtggtggacaaggacaagagaaaccagtgcagatactgcagactgaagaagtgcttcagagccggcatgaagaaggaggccgtgcagaacgagagagacagaatcagcaccagaagaagcagctacgaggacagcagcctgcccagcatcaacgccctgctgcaggccgaggtgctgagcagacagatcaccagccccgtgagcggcatcaacggcgacatcagagccaagaagatcgccagcatcgccgacgtgtgcgagagcatgaaggagcagctgctggtgctggtggagtgggccaagtacatccccgccttctgcgagctgcccctggacgaccaggtggccctgctgagagcccacgccggcgagcacctgctgctgggcgccaccaagagaagcatggtgttcaaggacgtgctgctgctgggcaacgactacatcgtgcccagacactgccccgagctggccgagatgagcagagtgagcatcagaatcctggacgagctggtgctgcccttccaggagctgcagatcgacgacaacgagtacgcctacctgaaggccatcatcttcttcgaccccgacgccagaggcctgagcgaccccggcagaatcagaagactgagaagccaggtgcaggtgagcctggaggactacatcaacgacagacagtacgacagcagaggcagattcggcgagctgctgctgctgctgcccaccctgcagagcatcacctggcagatgatcgagcagatccagttcatcaagctgttcggcatggccaagatcgacaacctgctgcaggagatgctgctgggcggcagccccagcgacgccccccacgcccaccaccccctgcacccccacctgatgcaggagcacatgggcaccaacgtgatcgtggccaacaccatgcccacccacctgagcaacggccagatgtgcgagtggcccagacccagaggccaggccgccacccccgagaccccccagcccagcccccccggcggcagcggcagcgagccctacaagctgctgcccggcgccgtggccaccatcgtgaagcccctgagcgccatcccccagcccaccatcaccaagcaggaggtgatctgaggactagtccctgttcccagagcccacttttttttctttttttgaaataaaatagcctgtctttcagatctaaaaaaaaaaaaaaaaaaaaaaaaaaaaaaaaaaaaaaaaaaaaaaaaaaaaaaaaaaaaaaaaaaaaaaaaaaaaaaaaaaaaaaaaaaaaaaaaaaaa

SEQ ID NO: 5337 - RNA, 1562 nt, synthetic construct
  misc_feature 1..1562: note = mRNA a-1 (A100) (opt4) from Homo sapiens__NP_000448.3__HNF4A(39-474)(K447R_K470R)
  source 1..1562: mol_type = other RNA
aggagagtcccgcagtcggcgtccagcggctctgcttgttcgtgtgtgtgtcgttgcaggccttattcaagcttaccatggacaccagccccagcgagggcaccaacctgaacgcccccaacagcctgggcgtgagcgccctgtgcgccatctgcggcgacagagccaccggcaagcactacggcgccagcagctgcgacggctgcaagggcttcttcagaagaagcgtgagaaagaaccacatgtacagctgcagattcagcagacagtgcgtggtggacaaggacaagagaaaccagtgcagatactgcagactgaagaagtgcttcagagccggcatgaagaaggaggccgtgcagaacgagagagacagaatcagcaccagaagaagcagctacgaggacagcagcctgcccagcatcaacgccctgctgcaggccgaggtgctgagcagacagatcaccagccccgtgagcggcatcaacggcgacatcagagccaagaagatcgccagcatcgccgacgtgtgcgagagcatgaaggagcagctgctggtgctggtggagtgggccaagtacatccccgccttctgcgagctgcccctggacgaccaggtggccctgctgagagcccacgccggcgagcacctgctgctgggcgccaccaagagaagcatggtgttcaaggacgtgctgctgctgggcaacgactacatcgtgcccagacactgccccgagctggccgagatgagcagagtgagcatcagaatcctggacgagctggtgctgcccttccaggagctgcagatcgacgacaacgagtacgcctacctgaaggccatcatcttcttcgaccccgacgccaagggcctgagcgaccccggcaagatcaagagactgagaagccaggtgcaggtgagcctggaggactacatcaacgacagacagtacgacagcagaggcagattcggcgagctgctgctgctgctgcccaccctgcagagcatcacctggcagatgatcgagcagatccagttcatcaagctgttcggcatggccaagatcgacaacctgctgcaggagatgctgctgggcggcagccccagcgacgccccccacgcccaccaccccctgcacccccacctgatgcaggagcacatgggcaccaacgtgatcgtggccaacaccatgcccacccacctgagcaacggccagatgtgcgagtggcccagacccagaggccaggccgccacccccgagaccccccagcccagcccccccggcggcagcggcagcgagccctacagactgctgcccggcgccgtggccaccatcgtgaagcccctgagcgccatcccccagcccaccatcaccagacaggaggtgatctgaggactagtccctgttcccagagcccacttttttttctttttttgaaataaaatagcctgtctttcagatctaaaaaaaaaaaaaaaaaaaaaaaaaaaaaaaaaaaaaaaaaaaaaaaaaaaaaaaaaaaaaaaaaaaaaaaaaaaaaaaaaaaaaaaaaaaaaaaaaaaa

SEQ ID NO: 5338 - RNA, 1562 nt, synthetic construct
  misc_feature 1..1562: note = mRNA a-1 (A100) (opt4) from Homo sapiens__NP_000448.3__HNF4A(39-474)(K458R)
  source 1..1562: mol_type = other RNA
aggagagtcccgcagtcggcgtccagcggctctgcttgttcgtgtgtgtgtcgttgcaggccttattcaagcttaccatggacaccagccccagcgagggcaccaacctgaacgcccccaacagcctgggcgtgagcgccctgtgcgccatctgcggcgacagagccaccggcaagcactacggcgccagcagctgcgacggctgcaagggcttcttcagaagaagcgtgagaaagaaccacatgtacagctgcagattcagcagacagtgcgtggtggacaaggacaagagaaaccagtgcagatactgcagactgaagaagtgcttcagagccggcatgaagaaggaggccgtgcagaacgagagagacagaatcagcaccagaagaagcagctacgaggacagcagcctgcccagcatcaacgccctgctgcaggccgaggtgctgagcagacagatcaccagccccgtgagcggcatcaacggcgacatcagagccaagaagatcgccagcatcgccgacgtgtgcgagagcatgaaggagcagctgctggtgctggtggagtgggccaagtacatccccgccttctgcgagctgcccctggacgaccaggtggccctgctgagagcccacgccggcgagcacctgctgctgggcgccaccaagagaagcatggtgttcaaggacgtgctgctgctgggcaacgactacatcgtgcccagacactgccccgagctggccgagatgagcagagtgagcatcagaatcctggacgagctggtgctgcccttccaggagctgcagatcgacgacaacgagtacgcctacctgaaggccatcatcttcttcgaccccgacgccaagggcctgagcgaccccggcaagatcaagagactgagaagccaggtgcaggtgagcctggaggactacatcaacgacagacagtacgacagcagaggcagattcggcgagctgctgctgctgctgcccaccctgcagagcatcacctggcagatgatcgagcagatccagttcatcaagctgttcggcatggccaagatcgacaacctgctgcaggagatgctgctgggcggcagccccagcgacgccccccacgcccaccaccccctgcacccccacctgatgcaggagcacatgggcaccaacgtgatcgtggccaacaccatgcccacccacctgagcaacggccagatgtgcgagtggcccagacccagaggccaggccgccacccccgagaccccccagcccagcccccccggcggcagcggcagcgagccctacaagctgctgcccggcgccgtggccaccatcgtgagacccctgagcgccatcccccagcccaccatcaccaagcaggaggtgatctgaggactagtccctgttcccagagcccacttttttttctttttttgaaataaaatagcctgtctttcagatctaaaaaaaaaaaaaaaaaaaaaaaaaaaaaaaaaaaaaaaaaaaaaaaaaaaaaaaaaaaaaaaaaaaaaaaaaaaaaaaaaaaaaaaaaaaaaaaaaaaa

SEQ ID NO: 5339 - RNA, 1562 nt, synthetic construct
  misc_feature 1..1562: note = mRNA a-1 (A100) (opt4) from Homo sapiens__NP_000448.3__HNF4A(39-474)(K106R_K108R_K126R_K127R )
  source 1..1562: mol_type = other RNA
aggagagtcccgcagtcggcgtccagcggctctgcttgttcgtgtgtgtgtcgttgcaggccttattcaagcttaccatggacaccagccccagcgagggcaccaacctgaacgcccccaacagcctgggcgtgagcgccctgtgcgccatctgcggcgacagagccaccggcaagcactacggcgccagcagctgcgacggctgcaagggcttcttcagaagaagcgtgagaaagaaccacatgtacagctgcagattcagcagacagtgcgtggtggacagagacagaagaaaccagtgcagatactgcagactgaagaagtgcttcagagccggcatgagaagagaggccgtgcagaacgagagagacagaatcagcaccagaagaagcagctacgaggacagcagcctgcccagcatcaacgccctgctgcaggccgaggtgctgagcagacagatcaccagccccgtgagcggcatcaacggcgacatcagagccaagaagatcgccagcatcgccgacgtgtgcgagagcatgaaggagcagctgctggtgctggtggagtgggccaagtacatccccgccttctgcgagctgcccctggacgaccaggtggccctgctgagagcccacgccggcgagcacctgctgctgggcgccaccaagagaagcatggtgttcaaggacgtgctgctgctgggcaacgactacatcgtgcccagacactgccccgagctggccgagatgagcagagtgagcatcagaatcctggacgagctggtgctgcccttccaggagctgcagatcgacgacaacgagtacgcctacctgaaggccatcatcttcttcgaccccgacgccaagggcctgagcgaccccggcaagatcaagagactgagaagccaggtgcaggtgagcctggaggactacatcaacgacagacagtacgacagcagaggcagattcggcgagctgctgctgctgctgcccaccctgcagagcatcacctggcagatgatcgagcagatccagttcatcaagctgttcggcatggccaagatcgacaacctgctgcaggagatgctgctgggcggcagccccagcgacgccccccacgcccaccaccccctgcacccccacctgatgcaggagcacatgggcaccaacgtgatcgtggccaacaccatgcccacccacctgagcaacggccagatgtgcgagtggcccagacccagaggccaggccgccacccccgagaccccccagcccagcccccccggcggcagcggcagcgagccctacaagctgctgcccggcgccgtggccaccatcgtgaagcccctgagcgccatcccccagcccaccatcaccaagcaggaggtgatctgaggactagtccctgttcccagagcccacttttttttctttttttgaaataaaatagcctgtctttcagatctaaaaaaaaaaaaaaaaaaaaaaaaaaaaaaaaaaaaaaaaaaaaaaaaaaaaaaaaaaaaaaaaaaaaaaaaaaaaaaaaaaaaaaaaaaaaaaaaaaaa

SEQ ID NO: 5340 - RNA, 1562 nt, synthetic construct
  misc_feature 1..1562: note = mRNA a-1 (A100) (opt4) from Homo sapiens__NP_000448.3__HNF4A(39-474)(E285Q)
  source 1..1562: mol_type = other RNA
aggagagtcccgcagtcggcgtccagcggctctgcttgttcgtgtgtgtgtcgttgcaggccttattcaagcttaccatggacaccagccccagcgagggcaccaacctgaacgcccccaacagcctgggcgtgagcgccctgtgcgccatctgcggcgacagagccaccggcaagcactacggcgccagcagctgcgacggctgcaagggcttcttcagaagaagcgtgagaaagaaccacatgtacagctgcagattcagcagacagtgcgtggtggacaaggacaagagaaaccagtgcagatactgcagactgaagaagtgcttcagagccggcatgaagaaggaggccgtgcagaacgagagagacagaatcagcaccagaagaagcagctacgaggacagcagcctgcccagcatcaacgccctgctgcaggccgaggtgctgagcagacagatcaccagccccgtgagcggcatcaacggcgacatcagagccaagaagatcgccagcatcgccgacgtgtgcgagagcatgaaggagcagctgctggtgctggtggagtgggccaagtacatccccgccttctgcgagctgcccctggacgaccaggtggccctgctgagagcccacgccggcgagcacctgctgctgggcgccaccaagagaagcatggtgttcaaggacgtgctgctgctgggcaacgactacatcgtgcccagacactgccccgagctggccgagatgagcagagtgagcatcagaatcctggacgagctggtgctgcccttccaggagctgcagatcgacgacaaccagtacgcctacctgaaggccatcatcttcttcgaccccgacgccaagggcctgagcgaccccggcaagatcaagagactgagaagccaggtgcaggtgagcctggaggactacatcaacgacagacagtacgacagcagaggcagattcggcgagctgctgctgctgctgcccaccctgcagagcatcacctggcagatgatcgagcagatccagttcatcaagctgttcggcatggccaagatcgacaacctgctgcaggagatgctgctgggcggcagccccagcgacgccccccacgcccaccaccccctgcacccccacctgatgcaggagcacatgggcaccaacgtgatcgtggccaacaccatgcccacccacctgagcaacggccagatgtgcgagtggcccagacccagaggccaggccgccacccccgagaccccccagcccagcccccccggcggcagcggcagcgagccctacaagctgctgcccggcgccgtggccaccatcgtgaagcccctgagcgccatcccccagcccaccatcaccaagcaggaggtgatctgaggactagtccctgttcccagagcccacttttttttctttttttgaaataaaatagcctgtctttcagatctaaaaaaaaaaaaaaaaaaaaaaaaaaaaaaaaaaaaaaaaaaaaaaaaaaaaaaaaaaaaaaaaaaaaaaaaaaaaaaaaaaaaaaaaaaaaaaaaaaaa

SEQ ID NO: 5341 - RNA, 1562 nt, synthetic construct
  misc_feature 1..1562: note = mRNA a-1 (A100) (opt4) from Homo sapiens__NP_000448.3__HNF4A(39-474)(T166E)
  source 1..1562: mol_type = other RNA
aggagagtcccgcagtcggcgtccagcggctctgcttgttcgtgtgtgtgtcgttgcaggccttattcaagcttaccatggacaccagccccagcgagggcaccaacctgaacgcccccaacagcctgggcgtgagcgccctgtgcgccatctgcggcgacagagccaccggcaagcactacggcgccagcagctgcgacggctgcaagggcttcttcagaagaagcgtgagaaagaaccacatgtacagctgcagattcagcagacagtgcgtggtggacaaggacaagagaaaccagtgcagatactgcagactgaagaagtgcttcagagccggcatgaagaaggaggccgtgcagaacgagagagacagaatcagcaccagaagaagcagctacgaggacagcagcctgcccagcatcaacgccctgctgcaggccgaggtgctgagcagacagatcgagagccccgtgagcggcatcaacggcgacatcagagccaagaagatcgccagcatcgccgacgtgtgcgagagcatgaaggagcagctgctggtgctggtggagtgggccaagtacatccccgccttctgcgagctgcccctggacgaccaggtggccctgctgagagcccacgccggcgagcacctgctgctgggcgccaccaagagaagcatggtgttcaaggacgtgctgctgctgggcaacgactacatcgtgcccagacactgccccgagctggccgagatgagcagagtgagcatcagaatcctggacgagctggtgctgcccttccaggagctgcagatcgacgacaacgagtacgcctacctgaaggccatcatcttcttcgaccccgacgccaagggcctgagcgaccccggcaagatcaagagactgagaagccaggtgcaggtgagcctggaggactacatcaacgacagacagtacgacagcagaggcagattcggcgagctgctgctgctgctgcccaccctgcagagcatcacctggcagatgatcgagcagatccagttcatcaagctgttcggcatggccaagatcgacaacctgctgcaggagatgctgctgggcggcagccccagcgacgccccccacgcccaccaccccctgcacccccacctgatgcaggagcacatgggcaccaacgtgatcgtggccaacaccatgcccacccacctgagcaacggccagatgtgcgagtggcccagacccagaggccaggccgccacccccgagaccccccagcccagcccccccggcggcagcggcagcgagccctacaagctgctgcccggcgccgtggccaccatcgtgaagcccctgagcgccatcccccagcccaccatcaccaagcaggaggtgatctgaggactagtccctgttcccagagcccacttttttttctttttttgaaataaaatagcctgtctttcagatctaaaaaaaaaaaaaaaaaaaaaaaaaaaaaaaaaaaaaaaaaaaaaaaaaaaaaaaaaaaaaaaaaaaaaaaaaaaaaaaaaaaaaaaaaaaaaaaaaaaa

SEQ ID NO: 5342 - RNA, 1562 nt, synthetic construct
  misc_feature 1..1562: note = mRNA a-1 (A100) (opt4) from Homo sapiens__NP_000448.3__HNF4A(39-474)(S148A)
  source 1..1562: mol_type = other RNA
aggagagtcccgcagtcggcgtccagcggctctgcttgttcgtgtgtgtgtcgttgcaggccttattcaagcttaccatggacaccagccccagcgagggcaccaacctgaacgcccccaacagcctgggcgtgagcgccctgtgcgccatctgcggcgacagagccaccggcaagcactacggcgccagcagctgcgacggctgcaagggcttcttcagaagaagcgtgagaaagaaccacatgtacagctgcagattcagcagacagtgcgtggtggacaaggacaagagaaaccagtgcagatactgcagactgaagaagtgcttcagagccggcatgaagaaggaggccgtgcagaacgagagagacagaatcagcaccagaagaagcagctacgaggacagcgccctgcccagcatcaacgccctgctgcaggccgaggtgctgagcagacagatcaccagccccgtgagcggcatcaacggcgacatcagagccaagaagatcgccagcatcgccgacgtgtgcgagagcatgaaggagcagctgctggtgctggtggagtgggccaagtacatccccgccttctgcgagctgcccctggacgaccaggtggccctgctgagagcccacgccggcgagcacctgctgctgggcgccaccaagagaagcatggtgttcaaggacgtgctgctgctgggcaacgactacatcgtgcccagacactgccccgagctggccgagatgagcagagtgagcatcagaatcctggacgagctggtgctgcccttccaggagctgcagatcgacgacaacgagtacgcctacctgaaggccatcatcttcttcgaccccgacgccaagggcctgagcgaccccggcaagatcaagagactgagaagccaggtgcaggtgagcctggaggactacatcaacgacagacagtacgacagcagaggcagattcggcgagctgctgctgctgctgcccaccctgcagagcatcacctggcagatgatcgagcagatccagttcatcaagctgttcggcatggccaagatcgacaacctgctgcaggagatgctgctgggcggcagccccagcgacgccccccacgcccaccaccccctgcacccccacctgatgcaggagcacatgggcaccaacgtgatcgtggccaacaccatgcccacccacctgagcaacggccagatgtgcgagtggcccagacccagaggccaggccgccacccccgagaccccccagcccagcccccccggcggcagcggcagcgagccctacaagctgctgcccggcgccgtggccaccatcgtgaagcccctgagcgccatcccccagcccaccatcaccaagcaggaggtgatctgaggactagtccctgttcccagagcccacttttttttctttttttgaaataaaatagcctgtctttcagatctaaaaaaaaaaaaaaaaaaaaaaaaaaaaaaaaaaaaaaaaaaaaaaaaaaaaaaaaaaaaaaaaaaaaaaaaaaaaaaaaaaaaaaaaaaaaaaaaaaaa

SEQ ID NO: 5343 - RNA, 1562 nt, synthetic construct
  misc_feature 1..1562: note = mRNA a-1 (A100) (opt4) from Homo sapiens__NP_000448.3__HNF4A(39-474)(S148E)
  source 1..1562: mol_type = other RNA
aggagagtcccgcagtcggcgtccagcggctctgcttgttcgtgtgtgtgtcgttgcaggccttattcaagcttaccatggacaccagccccagcgagggcaccaacctgaacgcccccaacagcctgggcgtgagcgccctgtgcgccatctgcggcgacagagccaccggcaagcactacggcgccagcagctgcgacggctgcaagggcttcttcagaagaagcgtgagaaagaaccacatgtacagctgcagattcagcagacagtgcgtggtggacaaggacaagagaaaccagtgcagatactgcagactgaagaagtgcttcagagccggcatgaagaaggaggccgtgcagaacgagagagacagaatcagcaccagaagaagcagctacgaggacagcgagctgcccagcatcaacgccctgctgcaggccgaggtgctgagcagacagatcaccagccccgtgagcggcatcaacggcgacatcagagccaagaagatcgccagcatcgccgacgtgtgcgagagcatgaaggagcagctgctggtgctggtggagtgggccaagtacatccccgccttctgcgagctgcccctggacgaccaggtggccctgctgagagcccacgccggcgagcacctgctgctgggcgccaccaagagaagcatggtgttcaaggacgtgctgctgctgggcaacgactacatcgtgcccagacactgccccgagctggccgagatgagcagagtgagcatcagaatcctggacgagctggtgctgcccttccaggagctgcagatcgacgacaacgagtacgcctacctgaaggccatcatcttcttcgaccccgacgccaagggcctgagcgaccccggcaagatcaagagactgagaagccaggtgcaggtgagcctggaggactacatcaacgacagacagtacgacagcagaggcagattcggcgagctgctgctgctgctgcccaccctgcagagcatcacctggcagatgatcgagcagatccagttcatcaagctgttcggcatggccaagatcgacaacctgctgcaggagatgctgctgggcggcagccccagcgacgccccccacgcccaccaccccctgcacccccacctgatgcaggagcacatgggcaccaacgtgatcgtggccaacaccatgcccacccacctgagcaacggccagatgtgcgagtggcccagacccagaggccaggccgccacccccgagaccccccagcccagcccccccggcggcagcggcagcgagccctacaagctgctgcccggcgccgtggccaccatcgtgaagcccctgagcgccatcccccagcccaccatcaccaagcaggaggtgatctgaggactagtccctgttcccagagcccacttttttttctttttttgaaataaaatagcctgtctttcagatctaaaaaaaaaaaaaaaaaaaaaaaaaaaaaaaaaaaaaaaaaaaaaaaaaaaaaaaaaaaaaaaaaaaaaaaaaaaaaaaaaaaaaaaaaaaaaaaaaaaa

SEQ ID NO: 5344 - RNA, 1562 nt, synthetic construct
  misc_feature 1..1562: note = mRNA a-1 (A100) (opt4) from Homo sapiens__NP_000448.3__HNF4A(39-474)(S183A)
  source 1..1562: mol_type = other RNA
aggagagtcccgcagtcggcgtccagcggctctgcttgttcgtgtgtgtgtcgttgcaggccttattcaagcttaccatggacaccagccccagcgagggcaccaacctgaacgcccccaacagcctgggcgtgagcgccctgtgcgccatctgcggcgacagagccaccggcaagcactacggcgccagcagctgcgacggctgcaagggcttcttcagaagaagcgtgagaaagaaccacatgtacagctgcagattcagcagacagtgcgtggtggacaaggacaagagaaaccagtgcagatactgcagactgaagaagtgcttcagagccggcatgaagaaggaggccgtgcagaacgagagagacagaatcagcaccagaagaagcagctacgaggacagcagcctgcccagcatcaacgccctgctgcaggccgaggtgctgagcagacagatcaccagccccgtgagcggcatcaacggcgacatcagagccaagaagatcgccgccatcgccgacgtgtgcgagagcatgaaggagcagctgctggtgctggtggagtgggccaagtacatccccgccttctgcgagctgcccctggacgaccaggtggccctgctgagagcccacgccggcgagcacctgctgctgggcgccaccaagagaagcatggtgttcaaggacgtgctgctgctgggcaacgactacatcgtgcccagacactgccccgagctggccgagatgagcagagtgagcatcagaatcctggacgagctggtgctgcccttccaggagctgcagatcgacgacaacgagtacgcctacctgaaggccatcatcttcttcgaccccgacgccaagggcctgagcgaccccggcaagatcaagagactgagaagccaggtgcaggtgagcctggaggactacatcaacgacagacagtacgacagcagaggcagattcggcgagctgctgctgctgctgcccaccctgcagagcatcacctggcagatgatcgagcagatccagttcatcaagctgttcggcatggccaagatcgacaacctgctgcaggagatgctgctgggcggcagccccagcgacgccccccacgcccaccaccccctgcacccccacctgatgcaggagcacatgggcaccaacgtgatcgtggccaacaccatgcccacccacctgagcaacggccagatgtgcgagtggcccagacccagaggccaggccgccacccccgagaccccccagcccagcccccccggcggcagcggcagcgagccctacaagctgctgcccggcgccgtggccaccatcgtgaagcccctgagcgccatcccccagcccaccatcaccaagcaggaggtgatctgaggactagtccctgttcccagagcccacttttttttctttttttgaaataaaatagcctgtctttcagatctaaaaaaaaaaaaaaaaaaaaaaaaaaaaaaaaaaaaaaaaaaaaaaaaaaaaaaaaaaaaaaaaaaaaaaaaaaaaaaaaaaaaaaaaaaaaaaaaaaaa

SEQ ID NO: 5345 - RNA, 1562 nt, synthetic construct
  misc_feature 1..1562: note = mRNA a-1 (A100) (opt4) from Homo sapiens__NP_000448.3__HNF4A(39-474)(S183E)
  source 1..1562: mol_type = other RNA
aggagagtcccgcagtcggcgtccagcggctctgcttgttcgtgtgtgtgtcgttgcaggccttattcaagcttaccatggacaccagccccagcgagggcaccaacctgaacgcccccaacagcctgggcgtgagcgccctgtgcgccatctgcggcgacagagccaccggcaagcactacggcgccagcagctgcgacggctgcaagggcttcttcagaagaagcgtgagaaagaaccacatgtacagctgcagattcagcagacagtgcgtggtggacaaggacaagagaaaccagtgcagatactgcagactgaagaagtgcttcagagccggcatgaagaaggaggccgtgcagaacgagagagacagaatcagcaccagaagaagcagctacgaggacagcagcctgcccagcatcaacgccctgctgcaggccgaggtgctgagcagacagatcaccagccccgtgagcggcatcaacggcgacatcagagccaagaagatcgccgagatcgccgacgtgtgcgagagcatgaaggagcagctgctggtgctggtggagtgggccaagtacatccccgccttctgcgagctgcccctggacgaccaggtggccctgctgagagcccacgccggcgagcacctgctgctgggcgccaccaagagaagcatggtgttcaaggacgtgctgctgctgggcaacgactacatcgtgcccagacactgccccgagctggccgagatgagcagagtgagcatcagaatcctggacgagctggtgctgcccttccaggagctgcagatcgacgacaacgagtacgcctacctgaaggccatcatcttcttcgaccccgacgccaagggcctgagcgaccccggcaagatcaagagactgagaagccaggtgcaggtgagcctggaggactacatcaacgacagacagtacgacagcagaggcagattcggcgagctgctgctgctgctgcccaccctgcagagcatcacctggcagatgatcgagcagatccagttcatcaagctgttcggcatggccaagatcgacaacctgctgcaggagatgctgctgggcggcagccccagcgacgccccccacgcccaccaccccctgcacccccacctgatgcaggagcacatgggcaccaacgtgatcgtggccaacaccatgcccacccacctgagcaacggccagatgtgcgagtggcccagacccagaggccaggccgccacccccgagaccccccagcccagcccccccggcggcagcggcagcgagccctacaagctgctgcccggcgccgtggccaccatcgtgaagcccctgagcgccatcccccagcccaccatcaccaagcaggaggtgatctgaggactagtccctgttcccagagcccacttttttttctttttttgaaataaaatagcctgtctttcagatctaaaaaaaaaaaaaaaaaaaaaaaaaaaaaaaaaaaaaaaaaaaaaaaaaaaaaaaaaaaaaaaaaaaaaaaaaaaaaaaaaaaaaaaaaaaaaaaaaaaa

SEQ ID NO: 5346 - RNA, 1562 nt, synthetic construct
  misc_feature 1..1562: note = mRNA a-1 (A100) (opt4) from Homo sapiens__NP_000448.3__HNF4A(39-474)(S461A)
  source 1..1562: mol_type = other RNA
aggagagtcccgcagtcggcgtccagcggctctgcttgttcgtgtgtgtgtcgttgcaggccttattcaagcttaccatggacaccagccccagcgagggcaccaacctgaacgcccccaacagcctgggcgtgagcgccctgtgcgccatctgcggcgacagagccaccggcaagcactacggcgccagcagctgcgacggctgcaagggcttcttcagaagaagcgtgagaaagaaccacatgtacagctgcagattcagcagacagtgcgtggtggacaaggacaagagaaaccagtgcagatactgcagactgaagaagtgcttcagagccggcatgaagaaggaggccgtgcagaacgagagagacagaatcagcaccagaagaagcagctacgaggacagcagcctgcccagcatcaacgccctgctgcaggccgaggtgctgagcagacagatcaccagccccgtgagcggcatcaacggcgacatcagagccaagaagatcgccagcatcgccgacgtgtgcgagagcatgaaggagcagctgctggtgctggtggagtgggccaagtacatccccgccttctgcgagctgcccctggacgaccaggtggccctgctgagagcccacgccggcgagcacctgctgctgggcgccaccaagagaagcatggtgttcaaggacgtgctgctgctgggcaacgactacatcgtgcccagacactgccccgagctggccgagatgagcagagtgagcatcagaatcctggacgagctggtgctgcccttccaggagctgcagatcgacgacaacgagtacgcctacctgaaggccatcatcttcttcgaccccgacgccaagggcctgagcgaccccggcaagatcaagagactgagaagccaggtgcaggtgagcctggaggactacatcaacgacagacagtacgacagcagaggcagattcggcgagctgctgctgctgctgcccaccctgcagagcatcacctggcagatgatcgagcagatccagttcatcaagctgttcggcatggccaagatcgacaacctgctgcaggagatgctgctgggcggcagccccagcgacgccccccacgcccaccaccccctgcacccccacctgatgcaggagcacatgggcaccaacgtgatcgtggccaacaccatgcccacccacctgagcaacggccagatgtgcgagtggcccagacccagaggccaggccgccacccccgagaccccccagcccagcccccccggcggcagcggcagcgagccctacaagctgctgcccggcgccgtggccaccatcgtgaagcccctggccgccatcccccagcccaccatcaccaagcaggaggtgatctgaggactagtccctgttcccagagcccacttttttttctttttttgaaataaaatagcctgtctttcagatctaaaaaaaaaaaaaaaaaaaaaaaaaaaaaaaaaaaaaaaaaaaaaaaaaaaaaaaaaaaaaaaaaaaaaaaaaaaaaaaaaaaaaaaaaaaaaaaaaaaa

SEQ ID NO: 5347 - RNA, 1562 nt, synthetic construct
  misc_feature 1..1562: note = mRNA a-1 (A100) (opt4) from Homo sapiens__NP_000448.3__HNF4A(39-474)(S461E)
  source 1..1562: mol_type = other RNA
aggagagtcccgcagtcggcgtccagcggctctgcttgttcgtgtgtgtgtcgttgcaggccttattcaagcttaccatggacaccagccccagcgagggcaccaacctgaacgcccccaacagcctgggcgtgagcgccctgtgcgccatctgcggcgacagagccaccggcaagcactacggcgccagcagctgcgacggctgcaagggcttcttcagaagaagcgtgagaaagaaccacatgtacagctgcagattcagcagacagtgcgtggtggacaaggacaagagaaaccagtgcagatactgcagactgaagaagtgcttcagagccggcatgaagaaggaggccgtgcagaacgagagagacagaatcagcaccagaagaagcagctacgaggacagcagcctgcccagcatcaacgccctgctgcaggccgaggtgctgagcagacagatcaccagccccgtgagcggcatcaacggcgacatcagagccaagaagatcgccagcatcgccgacgtgtgcgagagcatgaaggagcagctgctggtgctggtggagtgggccaagtacatccccgccttctgcgagctgcccctggacgaccaggtggccctgctgagagcccacgccggcgagcacctgctgctgggcgccaccaagagaagcatggtgttcaaggacgtgctgctgctgggcaacgactacatcgtgcccagacactgccccgagctggccgagatgagcagagtgagcatcagaatcctggacgagctggtgctgcccttccaggagctgcagatcgacgacaacgagtacgcctacctgaaggccatcatcttcttcgaccccgacgccaagggcctgagcgaccccggcaagatcaagagactgagaagccaggtgcaggtgagcctggaggactacatcaacgacagacagtacgacagcagaggcagattcggcgagctgctgctgctgctgcccaccctgcagagcatcacctggcagatgatcgagcagatccagttcatcaagctgttcggcatggccaagatcgacaacctgctgcaggagatgctgctgggcggcagccccagcgacgccccccacgcccaccaccccctgcacccccacctgatgcaggagcacatgggcaccaacgtgatcgtggccaacaccatgcccacccacctgagcaacggccagatgtgcgagtggcccagacccagaggccaggccgccacccccgagaccccccagcccagcccccccggcggcagcggcagcgagccctacaagctgctgcccggcgccgtggccaccatcgtgaagcccctggaggccatcccccagcccaccatcaccaagcaggaggtgatctgaggactagtccctgttcccagagcccacttttttttctttttttgaaataaaatagcctgtctttcagatctaaaaaaaaaaaaaaaaaaaaaaaaaaaaaaaaaaaaaaaaaaaaaaaaaaaaaaaaaaaaaaaaaaaaaaaaaaaaaaaaaaaaaaaaaaaaaaaaaaaa

SEQ ID NO: 5348 - RNA, 1562 nt, synthetic construct
  misc_feature 1..1562: note = mRNA a-1 (A100) (opt4) from Homo sapiens__NP_000448.3__HNF4A(39-474)(S142A_S143A_S313A)
  source 1..1562: mol_type = other RNA
aggagagtcccgcagtcggcgtccagcggctctgcttgttcgtgtgtgtgtcgttgcaggccttattcaagcttaccatggacaccagccccagcgagggcaccaacctgaacgcccccaacagcctgggcgtgagcgccctgtgcgccatctgcggcgacagagccaccggcaagcactacggcgccagcagctgcgacggctgcaagggcttcttcagaagaagcgtgagaaagaaccacatgtacagctgcagattcagcagacagtgcgtggtggacaaggacaagagaaaccagtgcagatactgcagactgaagaagtgcttcagagccggcatgaagaaggaggccgtgcagaacgagagagacagaatcagcaccagaagagccgcctacgaggacagcagcctgcccagcatcaacgccctgctgcaggccgaggtgctgagcagacagatcaccagccccgtgagcggcatcaacggcgacatcagagccaagaagatcgccagcatcgccgacgtgtgcgagagcatgaaggagcagctgctggtgctggtggagtgggccaagtacatccccgccttctgcgagctgcccctggacgaccaggtggccctgctgagagcccacgccggcgagcacctgctgctgggcgccaccaagagaagcatggtgttcaaggacgtgctgctgctgggcaacgactacatcgtgcccagacactgccccgagctggccgagatgagcagagtgagcatcagaatcctggacgagctggtgctgcccttccaggagctgcagatcgacgacaacgagtacgcctacctgaaggccatcatcttcttcgaccccgacgccaagggcctgagcgaccccggcaagatcaagagactgagagcccaggtgcaggtgagcctggaggactacatcaacgacagacagtacgacagcagaggcagattcggcgagctgctgctgctgctgcccaccctgcagagcatcacctggcagatgatcgagcagatccagttcatcaagctgttcggcatggccaagatcgacaacctgctgcaggagatgctgctgggcggcagccccagcgacgccccccacgcccaccaccccctgcacccccacctgatgcaggagcacatgggcaccaacgtgatcgtggccaacaccatgcccacccacctgagcaacggccagatgtgcgagtggcccagacccagaggccaggccgccacccccgagaccccccagcccagcccccccggcggcagcggcagcgagccctacaagctgctgcccggcgccgtggccaccatcgtgaagcccctgagcgccatcccccagcccaccatcaccaagcaggaggtgatctgaggactagtccctgttcccagagcccacttttttttctttttttgaaataaaatagcctgtctttcagatctaaaaaaaaaaaaaaaaaaaaaaaaaaaaaaaaaaaaaaaaaaaaaaaaaaaaaaaaaaaaaaaaaaaaaaaaaaaaaaaaaaaaaaaaaaaaaaaaaaaa

SEQ ID NO: 5349 - RNA, 1562 nt, synthetic construct
  misc_feature 1..1562: note = mRNA a-1 (A100) (opt4) from Homo sapiens__NP_000448.3__HNF4A(39-474)(S142A_S143A_S313A_K458R )
  source 1..1562: mol_type = other RNA
aggagagtcccgcagtcggcgtccagcggctctgcttgttcgtgtgtgtgtcgttgcaggccttattcaagcttaccatggacaccagccccagcgagggcaccaacctgaacgcccccaacagcctgggcgtgagcgccctgtgcgccatctgcggcgacagagccaccggcaagcactacggcgccagcagctgcgacggctgcaagggcttcttcagaagaagcgtgagaaagaaccacatgtacagctgcagattcagcagacagtgcgtggtggacaaggacaagagaaaccagtgcagatactgcagactgaagaagtgcttcagagccggcatgaagaaggaggccgtgcagaacgagagagacagaatcagcaccagaagagccgcctacgaggacagcagcctgcccagcatcaacgccctgctgcaggccgaggtgctgagcagacagatcaccagccccgtgagcggcatcaacggcgacatcagagccaagaagatcgccagcatcgccgacgtgtgcgagagcatgaaggagcagctgctggtgctggtggagtgggccaagtacatccccgccttctgcgagctgcccctggacgaccaggtggccctgctgagagcccacgccggcgagcacctgctgctgggcgccaccaagagaagcatggtgttcaaggacgtgctgctgctgggcaacgactacatcgtgcccagacactgccccgagctggccgagatgagcagagtgagcatcagaatcctggacgagctggtgctgcccttccaggagctgcagatcgacgacaacgagtacgcctacctgaaggccatcatcttcttcgaccccgacgccaagggcctgagcgaccccggcaagatcaagagactgagagcccaggtgcaggtgagcctggaggactacatcaacgacagacagtacgacagcagaggcagattcggcgagctgctgctgctgctgcccaccctgcagagcatcacctggcagatgatcgagcagatccagttcatcaagctgttcggcatggccaagatcgacaacctgctgcaggagatgctgctgggcggcagccccagcgacgccccccacgcccaccaccccctgcacccccacctgatgcaggagcacatgggcaccaacgtgatcgtggccaacaccatgcccacccacctgagcaacggccagatgtgcgagtggcccagacccagaggccaggccgccacccccgagaccccccagcccagcccccccggcggcagcggcagcgagccctacaagctgctgcccggcgccgtggccaccatcgtgagacccctgagcgccatcccccagcccaccatcaccaagcaggaggtgatctgaggactagtccctgttcccagagcccacttttttttctttttttgaaataaaatagcctgtctttcagatctaaaaaaaaaaaaaaaaaaaaaaaaaaaaaaaaaaaaaaaaaaaaaaaaaaaaaaaaaaaaaaaaaaaaaaaaaaaaaaaaaaaaaaaaaaaaaaaaaaaa

SEQ ID NO: 5350 - RNA, 1562 nt, synthetic construct
  misc_feature 1..1562: note = mRNA a-1 (A100) (opt4) from Homo sapiens__NP_000448.3__HNF4A(39-474)(S142A_S143A_S167A_S313A _S378A_T429A_T432A_S436A_K458R)
  source 1..1562: mol_type = other RNA
aggagagtcccgcagtcggcgtccagcggctctgcttgttcgtgtgtgtgtcgttgcaggccttattcaagcttaccatggacaccagccccagcgagggcaccaacctgaacgcccccaacagcctgggcgtgagcgccctgtgcgccatctgcggcgacagagccaccggcaagcactacggcgccagcagctgcgacggctgcaagggcttcttcagaagaagcgtgagaaagaaccacatgtacagctgcagattcagcagacagtgcgtggtggacaaggacaagagaaaccagtgcagatactgcagactgaagaagtgcttcagagccggcatgaagaaggaggccgtgcagaacgagagagacagaatcagcaccagaagagccgcctacgaggacagcagcctgcccagcatcaacgccctgctgcaggccgaggtgctgagcagacagatcaccgcccccgtgagcggcatcaacggcgacatcagagccaagaagatcgccagcatcgccgacgtgtgcgagagcatgaaggagcagctgctggtgctggtggagtgggccaagtacatccccgccttctgcgagctgcccctggacgaccaggtggccctgctgagagcccacgccggcgagcacctgctgctgggcgccaccaagagaagcatggtgttcaaggacgtgctgctgctgggcaacgactacatcgtgcccagacactgccccgagctggccgagatgagcagagtgagcatcagaatcctggacgagctggtgctgcccttccaggagctgcagatcgacgacaacgagtacgcctacctgaaggccatcatcttcttcgaccccgacgccaagggcctgagcgaccccggcaagatcaagagactgagagcccaggtgcaggtgagcctggaggactacatcaacgacagacagtacgacagcagaggcagattcggcgagctgctgctgctgctgcccaccctgcagagcatcacctggcagatgatcgagcagatccagttcatcaagctgttcggcatggccaagatcgacaacctgctgcaggagatgctgctgggcggcgcccccagcgacgccccccacgcccaccaccccctgcacccccacctgatgcaggagcacatgggcaccaacgtgatcgtggccaacaccatgcccacccacctgagcaacggccagatgtgcgagtggcccagacccagaggccaggccgccgcccccgaggccccccagcccgccccccccggcggcagcggcagcgagccctacaagctgctgcccggcgccgtggccaccatcgtgagacccctgagcgccatcccccagcccaccatcaccaagcaggaggtgatctgaggactagtccctgttcccagagcccacttttttttctttttttgaaataaaatagcctgtctttcagatctaaaaaaaaaaaaaaaaaaaaaaaaaaaaaaaaaaaaaaaaaaaaaaaaaaaaaaaaaaaaaaaaaaaaaaaaaaaaaaaaaaaaaaaaaaaaaaaaaaaa

SEQ ID NO: 5351 - RNA, 1562 nt, synthetic construct
  misc_feature 1..1562: note = mRNA a-1 (A100) (opt4) from Homo sapiens__NP_000448.3__HNF4A(39-474)(S142A_S143A_S148A_S167A _S313A_S378A_T429A_T432A_S436A_K458R)
  source 1..1562: mol_type = other RNA
aggagagtcccgcagtcggcgtccagcggctctgcttgttcgtgtgtgtgtcgttgcaggccttattcaagcttaccatggacaccagccccagcgagggcaccaacctgaacgcccccaacagcctgggcgtgagcgccctgtgcgccatctgcggcgacagagccaccggcaagcactacggcgccagcagctgcgacggctgcaagggcttcttcagaagaagcgtgagaaagaaccacatgtacagctgcagattcagcagacagtgcgtggtggacaaggacaagagaaaccagtgcagatactgcagactgaagaagtgcttcagagccggcatgaagaaggaggccgtgcagaacgagagagacagaatcagcaccagaagagccgcctacgaggacagcgccctgcccagcatcaacgccctgctgcaggccgaggtgctgagcagacagatcaccgcccccgtgagcggcatcaacggcgacatcagagccaagaagatcgccagcatcgccgacgtgtgcgagagcatgaaggagcagctgctggtgctggtggagtgggccaagtacatccccgccttctgcgagctgcccctggacgaccaggtggccctgctgagagcccacgccggcgagcacctgctgctgggcgccaccaagagaagcatggtgttcaaggacgtgctgctgctgggcaacgactacatcgtgcccagacactgccccgagctggccgagatgagcagagtgagcatcagaatcctggacgagctggtgctgcccttccaggagctgcagatcgacgacaacgagtacgcctacctgaaggccatcatcttcttcgaccccgacgccaagggcctgagcgaccccggcaagatcaagagactgagagcccaggtgcaggtgagcctggaggactacatcaacgacagacagtacgacagcagaggcagattcggcgagctgctgctgctgctgcccaccctgcagagcatcacctggcagatgatcgagcagatccagttcatcaagctgttcggcatggccaagatcgacaacctgctgcaggagatgctgctgggcggcgcccccagcgacgccccccacgcccaccaccccctgcacccccacctgatgcaggagcacatgggcaccaacgtgatcgtggccaacaccatgcccacccacctgagcaacggccagatgtgcgagtggcccagacccagaggccaggccgccgcccccgaggccccccagcccgccccccccggcggcagcggcagcgagccctacaagctgctgcccggcgccgtggccaccatcgtgagacccctgagcgccatcccccagcccaccatcaccaagcaggaggtgatctgaggactagtccctgttcccagagcccacttttttttctttttttgaaataaaatagcctgtctttcagatctaaaaaaaaaaaaaaaaaaaaaaaaaaaaaaaaaaaaaaaaaaaaaaaaaaaaaaaaaaaaaaaaaaaaaaaaaaaaaaaaaaaaaaaaaaaaaaaaaaaa

SEQ ID NO: 5352 - RNA, 1562 nt, synthetic construct
  misc_feature 1..1562: note = mRNA a-1 (A100) (opt4) from Homo sapiens__NP_000448.3__HNF4A(39-474)(K106R_K108R_K126R_K127R _S142A_S143A_S148A_S167A_S313A_S378A_T429A_T432A_S436A_K458 R)
  source 1..1562: mol_type = other RNA
aggagagtcccgcagtcggcgtccagcggctctgcttgttcgtgtgtgtgtcgttgcaggccttattcaagcttaccatggacaccagccccagcgagggcaccaacctgaacgcccccaacagcctgggcgtgagcgccctgtgcgccatctgcggcgacagagccaccggcaagcactacggcgccagcagctgcgacggctgcaagggcttcttcagaagaagcgtgagaaagaaccacatgtacagctgcagattcagcagacagtgcgtggtggacagagacagaagaaaccagtgcagatactgcagactgaagaagtgcttcagagccggcatgagaagagaggccgtgcagaacgagagagacagaatcagcaccagaagagccgcctacgaggacagcgccctgcccagcatcaacgccctgctgcaggccgaggtgctgagcagacagatcaccgcccccgtgagcggcatcaacggcgacatcagagccaagaagatcgccagcatcgccgacgtgtgcgagagcatgaaggagcagctgctggtgctggtggagtgggccaagtacatccccgccttctgcgagctgcccctggacgaccaggtggccctgctgagagcccacgccggcgagcacctgctgctgggcgccaccaagagaagcatggtgttcaaggacgtgctgctgctgggcaacgactacatcgtgcccagacactgccccgagctggccgagatgagcagagtgagcatcagaatcctggacgagctggtgctgcccttccaggagctgcagatcgacgacaacgagtacgcctacctgaaggccatcatcttcttcgaccccgacgccaagggcctgagcgaccccggcaagatcaagagactgagagcccaggtgcaggtgagcctggaggactacatcaacgacagacagtacgacagcagaggcagattcggcgagctgctgctgctgctgcccaccctgcagagcatcacctggcagatgatcgagcagatccagttcatcaagctgttcggcatggccaagatcgacaacctgctgcaggagatgctgctgggcggcgcccccagcgacgccccccacgcccaccaccccctgcacccccacctgatgcaggagcacatgggcaccaacgtgatcgtggccaacaccatgcccacccacctgagcaacggccagatgtgcgagtggcccagacccagaggccaggccgccgcccccgaggccccccagcccgccccccccggcggcagcggcagcgagccctacaagctgctgcccggcgccgtggccaccatcgtgagacccctgagcgccatcccccagcccaccatcaccaagcaggaggtgatctgaggactagtccctgttcccagagcccacttttttttctttttttgaaataaaatagcctgtctttcagatctaaaaaaaaaaaaaaaaaaaaaaaaaaaaaaaaaaaaaaaaaaaaaaaaaaaaaaaaaaaaaaaaaaaaaaaaaaaaaaaaaaaaaaaaaaaaaaaaaaaa

SEQ ID NO: 5353 - RNA, 1562 nt, synthetic construct
  misc_feature 1..1562: note = mRNA a-1 (A100) (opt4) from Homo sapiens__NP_000448.3__HNF4A(39-474)(S142A_S143A_S148A_T166A _S167A_S313A_S378A_T429A_T432A_S436A_K458R)
  source 1..1562: mol_type = other RNA
aggagagtcccgcagtcggcgtccagcggctctgcttgttcgtgtgtgtgtcgttgcaggccttattcaagcttaccatggacaccagccccagcgagggcaccaacctgaacgcccccaacagcctgggcgtgagcgccctgtgcgccatctgcggcgacagagccaccggcaagcactacggcgccagcagctgcgacggctgcaagggcttcttcagaagaagcgtgagaaagaaccacatgtacagctgcagattcagcagacagtgcgtggtggacaaggacaagagaaaccagtgcagatactgcagactgaagaagtgcttcagagccggcatgaagaaggaggccgtgcagaacgagagagacagaatcagcaccagaagagccgcctacgaggacagcgccctgcccagcatcaacgccctgctgcaggccgaggtgctgagcagacagatcgccgcccccgtgagcggcatcaacggcgacatcagagccaagaagatcgccagcatcgccgacgtgtgcgagagcatgaaggagcagctgctggtgctggtggagtgggccaagtacatccccgccttctgcgagctgcccctggacgaccaggtggccctgctgagagcccacgccggcgagcacctgctgctgggcgccaccaagagaagcatggtgttcaaggacgtgctgctgctgggcaacgactacatcgtgcccagacactgccccgagctggccgagatgagcagagtgagcatcagaatcctggacgagctggtgctgcccttccaggagctgcagatcgacgacaacgagtacgcctacctgaaggccatcatcttcttcgaccccgacgccaagggcctgagcgaccccggcaagatcaagagactgagagcccaggtgcaggtgagcctggaggactacatcaacgacagacagtacgacagcagaggcagattcggcgagctgctgctgctgctgcccaccctgcagagcatcacctggcagatgatcgagcagatccagttcatcaagctgttcggcatggccaagatcgacaacctgctgcaggagatgctgctgggcggcgcccccagcgacgccccccacgcccaccaccccctgcacccccacctgatgcaggagcacatgggcaccaacgtgatcgtggccaacaccatgcccacccacctgagcaacggccagatgtgcgagtggcccagacccagaggccaggccgccgcccccgaggccccccagcccgccccccccggcggcagcggcagcgagccctacaagctgctgcccggcgccgtggccaccatcgtgagacccctgagcgccatcccccagcccaccatcaccaagcaggaggtgatctgaggactagtccctgttcccagagcccacttttttttctttttttgaaataaaatagcctgtctttcagatctaaaaaaaaaaaaaaaaaaaaaaaaaaaaaaaaaaaaaaaaaaaaaaaaaaaaaaaaaaaaaaaaaaaaaaaaaaaaaaaaaaaaaaaaaaaaaaaaaaaa

SEQ ID NO: 5354 - RNA, 1562 nt, synthetic construct
  misc_feature 1..1562: note = mRNA a-1 (A100) (opt4) from Homo sapiens__NP_000448.3__HNF4A(39-474)(S87A_S142A_S143A_S148A_ T166A_S167A_S313A_S378A_T429A_T432A_S436A_K458R)
  source 1..1562: mol_type = other RNA
aggagagtcccgcagtcggcgtccagcggctctgcttgttcgtgtgtgtgtcgttgcaggccttattcaagcttaccatggacaccagccccagcgagggcaccaacctgaacgcccccaacagcctgggcgtgagcgccctgtgcgccatctgcggcgacagagccaccggcaagcactacggcgccagcagctgcgacggctgcaagggcttcttcagaagagccgtgagaaagaaccacatgtacagctgcagattcagcagacagtgcgtggtggacaaggacaagagaaaccagtgcagatactgcagactgaagaagtgcttcagagccggcatgaagaaggaggccgtgcagaacgagagagacagaatcagcaccagaagagccgcctacgaggacagcgccctgcccagcatcaacgccctgctgcaggccgaggtgctgagcagacagatcgccgcccccgtgagcggcatcaacggcgacatcagagccaagaagatcgccagcatcgccgacgtgtgcgagagcatgaaggagcagctgctggtgctggtggagtgggccaagtacatccccgccttctgcgagctgcccctggacgaccaggtggccctgctgagagcccacgccggcgagcacctgctgctgggcgccaccaagagaagcatggtgttcaaggacgtgctgctgctgggcaacgactacatcgtgcccagacactgccccgagctggccgagatgagcagagtgagcatcagaatcctggacgagctggtgctgcccttccaggagctgcagatcgacgacaacgagtacgcctacctgaaggccatcatcttcttcgaccccgacgccaagggcctgagcgaccccggcaagatcaagagactgagagcccaggtgcaggtgagcctggaggactacatcaacgacagacagtacgacagcagaggcagattcggcgagctgctgctgctgctgcccaccctgcagagcatcacctggcagatgatcgagcagatccagttcatcaagctgttcggcatggccaagatcgacaacctgctgcaggagatgctgctgggcggcgcccccagcgacgccccccacgcccaccaccccctgcacccccacctgatgcaggagcacatgggcaccaacgtgatcgtggccaacaccatgcccacccacctgagcaacggccagatgtgcgagtggcccagacccagaggccaggccgccgcccccgaggccccccagcccgccccccccggcggcagcggcagcgagccctacaagctgctgcccggcgccgtggccaccatcgtgagacccctgagcgccatcccccagcccaccatcaccaagcaggaggtgatctgaggactagtccctgttcccagagcccacttttttttctttttttgaaataaaatagcctgtctttcagatctaaaaaaaaaaaaaaaaaaaaaaaaaaaaaaaaaaaaaaaaaaaaaaaaaaaaaaaaaaaaaaaaaaaaaaaaaaaaaaaaaaaaaaaaaaaaaaaaaaaa

SEQ ID NO: 5355 - RNA, 1562 nt, synthetic construct
  misc_feature 1..1562: note = mRNA a-1 (A100) (opt4) from Homo sapiens__NP_000448.3__HNF4A(39-474)(S87A_K106R_K108R_K126R_ K127R_S142A_S143A_S148A_T166A_S167A_S313A_S378A_T429A_T432A _S436A_K458R)
  source 1..1562: mol_type = other RNA
aggagagtcccgcagtcggcgtccagcggctctgcttgttcgtgtgtgtgtcgttgcaggccttattcaagcttaccatggacaccagccccagcgagggcaccaacctgaacgcccccaacagcctgggcgtgagcgccctgtgcgccatctgcggcgacagagccaccggcaagcactacggcgccagcagctgcgacggctgcaagggcttcttcagaagagccgtgagaaagaaccacatgtacagctgcagattcagcagacagtgcgtggtggacagagacagaagaaaccagtgcagatactgcagactgaagaagtgcttcagagccggcatgagaagagaggccgtgcagaacgagagagacagaatcagcaccagaagagccgcctacgaggacagcgccctgcccagcatcaacgccctgctgcaggccgaggtgctgagcagacagatcgccgcccccgtgagcggcatcaacggcgacatcagagccaagaagatcgccagcatcgccgacgtgtgcgagagcatgaaggagcagctgctggtgctggtggagtgggccaagtacatccccgccttctgcgagctgcccctggacgaccaggtggccctgctgagagcccacgccggcgagcacctgctgctgggcgccaccaagagaagcatggtgttcaaggacgtgctgctgctgggcaacgactacatcgtgcccagacactgccccgagctggccgagatgagcagagtgagcatcagaatcctggacgagctggtgctgcccttccaggagctgcagatcgacgacaacgagtacgcctacctgaaggccatcatcttcttcgaccccgacgccaagggcctgagcgaccccggcaagatcaagagactgagagcccaggtgcaggtgagcctggaggactacatcaacgacagacagtacgacagcagaggcagattcggcgagctgctgctgctgctgcccaccctgcagagcatcacctggcagatgatcgagcagatccagttcatcaagctgttcggcatggccaagatcgacaacctgctgcaggagatgctgctgggcggcgcccccagcgacgccccccacgcccaccaccccctgcacccccacctgatgcaggagcacatgggcaccaacgtgatcgtggccaacaccatgcccacccacctgagcaacggccagatgtgcgagtggcccagacccagaggccaggccgccgcccccgaggccccccagcccgccccccccggcggcagcggcagcgagccctacaagctgctgcccggcgccgtggccaccatcgtgagacccctgagcgccatcccccagcccaccatcaccaagcaggaggtgatctgaggactagtccctgttcccagagcccacttttttttctttttttgaaataaaatagcctgtctttcagatctaaaaaaaaaaaaaaaaaaaaaaaaaaaaaaaaaaaaaaaaaaaaaaaaaaaaaaaaaaaaaaaaaaaaaaaaaaaaaaaaaaaaaaaaaaaaaaaaaaaa

SEQ ID NO: 5356 - RNA, 1562 nt, synthetic construct
  misc_feature 1..1562: note = mRNA a-1 (A100) (opt4) from Homo sapiens__NP_000448.3__HNF4A(39-474)(S87A_K106R_K108R_K126R_ K127R)
  source 1..1562: mol_type = other RNA
aggagagtcccgcagtcggcgtccagcggctctgcttgttcgtgtgtgtgtcgttgcaggccttattcaagcttaccatggacaccagccccagcgagggcaccaacctgaacgcccccaacagcctgggcgtgagcgccctgtgcgccatctgcggcgacagagccaccggcaagcactacggcgccagcagctgcgacggctgcaagggcttcttcagaagagccgtgagaaagaaccacatgtacagctgcagattcagcagacagtgcgtggtggacagagacagaagaaaccagtgcagatactgcagactgaagaagtgcttcagagccggcatgagaagagaggccgtgcagaacgagagagacagaatcagcaccagaagaagcagctacgaggacagcagcctgcccagcatcaacgccctgctgcaggccgaggtgctgagcagacagatcaccagccccgtgagcggcatcaacggcgacatcagagccaagaagatcgccagcatcgccgacgtgtgcgagagcatgaaggagcagctgctggtgctggtggagtgggccaagtacatccccgccttctgcgagctgcccctggacgaccaggtggccctgctgagagcccacgccggcgagcacctgctgctgggcgccaccaagagaagcatggtgttcaaggacgtgctgctgctgggcaacgactacatcgtgcccagacactgccccgagctggccgagatgagcagagtgagcatcagaatcctggacgagctggtgctgcccttccaggagctgcagatcgacgacaacgagtacgcctacctgaaggccatcatcttcttcgaccccgacgccaagggcctgagcgaccccggcaagatcaagagactgagaagccaggtgcaggtgagcctggaggactacatcaacgacagacagtacgacagcagaggcagattcggcgagctgctgctgctgctgcccaccctgcagagcatcacctggcagatgatcgagcagatccagttcatcaagctgttcggcatggccaagatcgacaacctgctgcaggagatgctgctgggcggcagccccagcgacgccccccacgcccaccaccccctgcacccccacctgatgcaggagcacatgggcaccaacgtgatcgtggccaacaccatgcccacccacctgagcaacggccagatgtgcgagtggcccagacccagaggccaggccgccacccccgagaccccccagcccagcccccccggcggcagcggcagcgagccctacaagctgctgcccggcgccgtggccaccatcgtgaagcccctgagcgccatcccccagcccaccatcaccaagcaggaggtgatctgaggactagtccctgttcccagagcccacttttttttctttttttgaaataaaatagcctgtctttcagatctaaaaaaaaaaaaaaaaaaaaaaaaaaaaaaaaaaaaaaaaaaaaaaaaaaaaaaaaaaaaaaaaaaaaaaaaaaaaaaaaaaaaaaaaaaaaaaaaaaaa

SEQ ID NO: 5357 - RNA, 1562 nt, synthetic construct
  misc_feature 1..1562: note = mRNA a-1 (A100) (opt4) from Homo sapiens__NP_000448.3__HNF4A(39-474)(S87A_K106R_K108R_K126R_ K127R_S142A_S143A_S148A_T166A_S167A_S313A_S378A_T429A_T432A _S436A_K458R_S461A)
  source 1..1562: mol_type = other RNA
aggagagtcccgcagtcggcgtccagcggctctgcttgttcgtgtgtgtgtcgttgcaggccttattcaagcttaccatggacaccagccccagcgagggcaccaacctgaacgcccccaacagcctgggcgtgagcgccctgtgcgccatctgcggcgacagagccaccggcaagcactacggcgccagcagctgcgacggctgcaagggcttcttcagaagagccgtgagaaagaaccacatgtacagctgcagattcagcagacagtgcgtggtggacagagacagaagaaaccagtgcagatactgcagactgaagaagtgcttcagagccggcatgagaagagaggccgtgcagaacgagagagacagaatcagcaccagaagagccgcctacgaggacagcgccctgcccagcatcaacgccctgctgcaggccgaggtgctgagcagacagatcgccgcccccgtgagcggcatcaacggcgacatcagagccaagaagatcgccagcatcgccgacgtgtgcgagagcatgaaggagcagctgctggtgctggtggagtgggccaagtacatccccgccttctgcgagctgcccctggacgaccaggtggccctgctgagagcccacgccggcgagcacctgctgctgggcgccaccaagagaagcatggtgttcaaggacgtgctgctgctgggcaacgactacatcgtgcccagacactgccccgagctggccgagatgagcagagtgagcatcagaatcctggacgagctggtgctgcccttccaggagctgcagatcgacgacaacgagtacgcctacctgaaggccatcatcttcttcgaccccgacgccaagggcctgagcgaccccggcaagatcaagagactgagagcccaggtgcaggtgagcctggaggactacatcaacgacagacagtacgacagcagaggcagattcggcgagctgctgctgctgctgcccaccctgcagagcatcacctggcagatgatcgagcagatccagttcatcaagctgttcggcatggccaagatcgacaacctgctgcaggagatgctgctgggcggcgcccccagcgacgccccccacgcccaccaccccctgcacccccacctgatgcaggagcacatgggcaccaacgtgatcgtggccaacaccatgcccacccacctgagcaacggccagatgtgcgagtggcccagacccagaggccaggccgccgcccccgaggccccccagcccgccccccccggcggcagcggcagcgagccctacaagctgctgcccggcgccgtggccaccatcgtgagacccctggccgccatcccccagcccaccatcaccaagcaggaggtgatctgaggactagtccctgttcccagagcccacttttttttctttttttgaaataaaatagcctgtctttcagatctaaaaaaaaaaaaaaaaaaaaaaaaaaaaaaaaaaaaaaaaaaaaaaaaaaaaaaaaaaaaaaaaaaaaaaaaaaaaaaaaaaaaaaaaaaaaaaaaaaaa

SEQ ID NO: 5358 - RNA, 1562 nt, synthetic construct
  misc_feature 1..1562: note = mRNA a-1 (A100) (opt4) from Homo sapiens__NP_000448.3__HNF4A(39-474)(S87A_K106R_K108R_K126R_ K127R_S142A_S143A_S148A_T166A_S167A_S313A_S378A_T429A_T432A _S436A_K458R_S461E)
  source 1..1562: mol_type = other RNA
aggagagtcccgcagtcggcgtccagcggctctgcttgttcgtgtgtgtgtcgttgcaggccttattcaagcttaccatggacaccagccccagcgagggcaccaacctgaacgcccccaacagcctgggcgtgagcgccctgtgcgccatctgcggcgacagagccaccggcaagcactacggcgccagcagctgcgacggctgcaagggcttcttcagaagagccgtgagaaagaaccacatgtacagctgcagattcagcagacagtgcgtggtggacagagacagaagaaaccagtgcagatactgcagactgaagaagtgcttcagagccggcatgagaagagaggccgtgcagaacgagagagacagaatcagcaccagaagagccgcctacgaggacagcgccctgcccagcatcaacgccctgctgcaggccgaggtgctgagcagacagatcgccgcccccgtgagcggcatcaacggcgacatcagagccaagaagatcgccagcatcgccgacgtgtgcgagagcatgaaggagcagctgctggtgctggtggagtgggccaagtacatccccgccttctgcgagctgcccctggacgaccaggtggccctgctgagagcccacgccggcgagcacctgctgctgggcgccaccaagagaagcatggtgttcaaggacgtgctgctgctgggcaacgactacatcgtgcccagacactgccccgagctggccgagatgagcagagtgagcatcagaatcctggacgagctggtgctgcccttccaggagctgcagatcgacgacaacgagtacgcctacctgaaggccatcatcttcttcgaccccgacgccaagggcctgagcgaccccggcaagatcaagagactgagagcccaggtgcaggtgagcctggaggactacatcaacgacagacagtacgacagcagaggcagattcggcgagctgctgctgctgctgcccaccctgcagagcatcacctggcagatgatcgagcagatccagttcatcaagctgttcggcatggccaagatcgacaacctgctgcaggagatgctgctgggcggcgcccccagcgacgccccccacgcccaccaccccctgcacccccacctgatgcaggagcacatgggcaccaacgtgatcgtggccaacaccatgcccacccacctgagcaacggccagatgtgcgagtggcccagacccagaggccaggccgccgcccccgaggccccccagcccgccccccccggcggcagcggcagcgagccctacaagctgctgcccggcgccgtggccaccatcgtgagacccctggaggccatcccccagcccaccatcaccaagcaggaggtgatctgaggactagtccctgttcccagagcccacttttttttctttttttgaaataaaatagcctgtctttcagatctaaaaaaaaaaaaaaaaaaaaaaaaaaaaaaaaaaaaaaaaaaaaaaaaaaaaaaaaaaaaaaaaaaaaaaaaaaaaaaaaaaaaaaaaaaaaaaaaaaaa

SEQ ID NO: 5359 - RNA, 1562 nt, synthetic construct
  misc_feature 1..1562: note = mRNA a-1 (A100) (opt4) from Homo sapiens__NP_000448.3__HNF4A(39-474)(S87A_K106R_K108R_K126R_ K127R_S142A_S143A_S148E_T166A_S167E_S313A_S378E_T429E_T432E _S436E_K458R_S461E)
  source 1..1562: mol_type = other RNA
aggagagtcccgcagtcggcgtccagcggctctgcttgttcgtgtgtgtgtcgttgcaggccttattcaagcttaccatggacaccagccccagcgagggcaccaacctgaacgcccccaacagcctgggcgtgagcgccctgtgcgccatctgcggcgacagagccaccggcaagcactacggcgccagcagctgcgacggctgcaagggcttcttcagaagagccgtgagaaagaaccacatgtacagctgcagattcagcagacagtgcgtggtggacagagacagaagaaaccagtgcagatactgcagactgaagaagtgcttcagagccggcatgagaagagaggccgtgcagaacgagagagacagaatcagcaccagaagagccgcctacgaggacagcgagctgcccagcatcaacgccctgctgcaggccgaggtgctgagcagacagatcgccgagcccgtgagcggcatcaacggcgacatcagagccaagaagatcgccagcatcgccgacgtgtgcgagagcatgaaggagcagctgctggtgctggtggagtgggccaagtacatccccgccttctgcgagctgcccctggacgaccaggtggccctgctgagagcccacgccggcgagcacctgctgctgggcgccaccaagagaagcatggtgttcaaggacgtgctgctgctgggcaacgactacatcgtgcccagacactgccccgagctggccgagatgagcagagtgagcatcagaatcctggacgagctggtgctgcccttccaggagctgcagatcgacgacaacgagtacgcctacctgaaggccatcatcttcttcgaccccgacgccaagggcctgagcgaccccggcaagatcaagagactgagagcccaggtgcaggtgagcctggaggactacatcaacgacagacagtacgacagcagaggcagattcggcgagctgctgctgctgctgcccaccctgcagagcatcacctggcagatgatcgagcagatccagttcatcaagctgttcggcatggccaagatcgacaacctgctgcaggagatgctgctgggcggcgagcccagcgacgccccccacgcccaccaccccctgcacccccacctgatgcaggagcacatgggcaccaacgtgatcgtggccaacaccatgcccacccacctgagcaacggccagatgtgcgagtggcccagacccagaggccaggccgccgagcccgaggagccccagcccgagccccccggcggcagcggcagcgagccctacaagctgctgcccggcgccgtggccaccatcgtgagacccctggaggccatcccccagcccaccatcaccaagcaggaggtgatctgaggactagtccctgttcccagagcccacttttttttctttttttgaaataaaatagcctgtctttcagatctaaaaaaaaaaaaaaaaaaaaaaaaaaaaaaaaaaaaaaaaaaaaaaaaaaaaaaaaaaaaaaaaaaaaaaaaaaaaaaaaaaaaaaaaaaaaaaaaaaaa

SEQ ID NO: 5360 - RNA, 1562 nt, synthetic construct
  misc_feature 1..1562: note = mRNA a-1 (A100) (opt4) from Homo sapiens__NP_000448.3__HNF4A(39-474)(S87A_K106R_K108R_K126R_ K127R_S142A_S143A_S148A_T166A_S167A_K179R_K180R_S313A_S378A _T429A_T432A_S436A_K458R_S461E)
  source 1..1562: mol_type = other RNA
aggagagtcccgcagtcggcgtccagcggctctgcttgttcgtgtgtgtgtcgttgcaggccttattcaagcttaccatggacaccagccccagcgagggcaccaacctgaacgcccccaacagcctgggcgtgagcgccctgtgcgccatctgcggcgacagagccaccggcaagcactacggcgccagcagctgcgacggctgcaagggcttcttcagaagagccgtgagaaagaaccacatgtacagctgcagattcagcagacagtgcgtggtggacagagacagaagaaaccagtgcagatactgcagactgaagaagtgcttcagagccggcatgagaagagaggccgtgcagaacgagagagacagaatcagcaccagaagagccgcctacgaggacagcgccctgcccagcatcaacgccctgctgcaggccgaggtgctgagcagacagatcgccgcccccgtgagcggcatcaacggcgacatcagagccagaagaatcgccagcatcgccgacgtgtgcgagagcatgaaggagcagctgctggtgctggtggagtgggccaagtacatccccgccttctgcgagctgcccctggacgaccaggtggccctgctgagagcccacgccggcgagcacctgctgctgggcgccaccaagagaagcatggtgttcaaggacgtgctgctgctgggcaacgactacatcgtgcccagacactgccccgagctggccgagatgagcagagtgagcatcagaatcctggacgagctggtgctgcccttccaggagctgcagatcgacgacaacgagtacgcctacctgaaggccatcatcttcttcgaccccgacgccaagggcctgagcgaccccggcaagatcaagagactgagagcccaggtgcaggtgagcctggaggactacatcaacgacagacagtacgacagcagaggcagattcggcgagctgctgctgctgctgcccaccctgcagagcatcacctggcagatgatcgagcagatccagttcatcaagctgttcggcatggccaagatcgacaacctgctgcaggagatgctgctgggcggcgcccccagcgacgccccccacgcccaccaccccctgcacccccacctgatgcaggagcacatgggcaccaacgtgatcgtggccaacaccatgcccacccacctgagcaacggccagatgtgcgagtggcccagacccagaggccaggccgccgcccccgaggccccccagcccgccccccccggcggcagcggcagcgagccctacaagctgctgcccggcgccgtggccaccatcgtgagacccctggaggccatcccccagcccaccatcaccaagcaggaggtgatctgaggactagtccctgttcccagagcccacttttttttctttttttgaaataaaatagcctgtctttcagatctaaaaaaaaaaaaaaaaaaaaaaaaaaaaaaaaaaaaaaaaaaaaaaaaaaaaaaaaaaaaaaaaaaaaaaaaaaaaaaaaaaaaaaaaaaaaaaaaaaaa

SEQ ID NO: 5361 - RNA, 1562 nt, synthetic construct
  misc_feature 1..1562: note = mRNA a-1 (A100) (opt4) from Homo sapiens__NP_000448.3__HNF4A(39-474)(S87A_K106R_K108R_K126R_ K127R_S142A_S143A_S148A_T166A_S167A_K300R_K307R_K309R_S313A _S378A_T429A_T432A_S436A_K458R_S461E)
  source 1..1562: mol_type = other RNA
aggagagtcccgcagtcggcgtccagcggctctgcttgttcgtgtgtgtgtcgttgcaggccttattcaagcttaccatggacaccagccccagcgagggcaccaacctgaacgcccccaacagcctgggcgtgagcgccctgtgcgccatctgcggcgacagagccaccggcaagcactacggcgccagcagctgcgacggctgcaagggcttcttcagaagagccgtgagaaagaaccacatgtacagctgcagattcagcagacagtgcgtggtggacagagacagaagaaaccagtgcagatactgcagactgaagaagtgcttcagagccggcatgagaagagaggccgtgcagaacgagagagacagaatcagcaccagaagagccgcctacgaggacagcgccctgcccagcatcaacgccctgctgcaggccgaggtgctgagcagacagatcgccgcccccgtgagcggcatcaacggcgacatcagagccaagaagatcgccagcatcgccgacgtgtgcgagagcatgaaggagcagctgctggtgctggtggagtgggccaagtacatccccgccttctgcgagctgcccctggacgaccaggtggccctgctgagagcccacgccggcgagcacctgctgctgggcgccaccaagagaagcatggtgttcaaggacgtgctgctgctgggcaacgactacatcgtgcccagacactgccccgagctggccgagatgagcagagtgagcatcagaatcctggacgagctggtgctgcccttccaggagctgcagatcgacgacaacgagtacgcctacctgaaggccatcatcttcttcgaccccgacgccagaggcctgagcgaccccggcagaatcagaagactgagagcccaggtgcaggtgagcctggaggactacatcaacgacagacagtacgacagcagaggcagattcggcgagctgctgctgctgctgcccaccctgcagagcatcacctggcagatgatcgagcagatccagttcatcaagctgttcggcatggccaagatcgacaacctgctgcaggagatgctgctgggcggcgcccccagcgacgccccccacgcccaccaccccctgcacccccacctgatgcaggagcacatgggcaccaacgtgatcgtggccaacaccatgcccacccacctgagcaacggccagatgtgcgagtggcccagacccagaggccaggccgccgcccccgaggccccccagcccgccccccccggcggcagcggcagcgagccctacaagctgctgcccggcgccgtggccaccatcgtgagacccctggaggccatcccccagcccaccatcaccaagcaggaggtgatctgaggactagtccctgttcccagagcccacttttttttctttttttgaaataaaatagcctgtctttcagatctaaaaaaaaaaaaaaaaaaaaaaaaaaaaaaaaaaaaaaaaaaaaaaaaaaaaaaaaaaaaaaaaaaaaaaaaaaaaaaaaaaaaaaaaaaaaaaaaaaaa

SEQ ID NO: 5362 - RNA, 1562 nt, synthetic construct
  misc_feature 1..1562: note = mRNA a-1 (A100) (opt4) from Homo sapiens__NP_000448.3__HNF4A(39-474)(S87A_K106R_K108R_K126R_ K127R_S142A_S143A_S148A_T166A_S167A_S313A_S378A_T429A_T432A _S436A_K447R_K458R_S461E_K470R)
  source 1..1562: mol_type = other RNA
aggagagtcccgcagtcggcgtccagcggctctgcttgttcgtgtgtgtgtcgttgcaggccttattcaagcttaccatggacaccagccccagcgagggcaccaacctgaacgcccccaacagcctgggcgtgagcgccctgtgcgccatctgcggcgacagagccaccggcaagcactacggcgccagcagctgcgacggctgcaagggcttcttcagaagagccgtgagaaagaaccacatgtacagctgcagattcagcagacagtgcgtggtggacagagacagaagaaaccagtgcagatactgcagactgaagaagtgcttcagagccggcatgagaagagaggccgtgcagaacgagagagacagaatcagcaccagaagagccgcctacgaggacagcgccctgcccagcatcaacgccctgctgcaggccgaggtgctgagcagacagatcgccgcccccgtgagcggcatcaacggcgacatcagagccaagaagatcgccagcatcgccgacgtgtgcgagagcatgaaggagcagctgctggtgctggtggagtgggccaagtacatccccgccttctgcgagctgcccctggacgaccaggtggccctgctgagagcccacgccggcgagcacctgctgctgggcgccaccaagagaagcatggtgttcaaggacgtgctgctgctgggcaacgactacatcgtgcccagacactgccccgagctggccgagatgagcagagtgagcatcagaatcctggacgagctggtgctgcccttccaggagctgcagatcgacgacaacgagtacgcctacctgaaggccatcatcttcttcgaccccgacgccaagggcctgagcgaccccggcaagatcaagagactgagagcccaggtgcaggtgagcctggaggactacatcaacgacagacagtacgacagcagaggcagattcggcgagctgctgctgctgctgcccaccctgcagagcatcacctggcagatgatcgagcagatccagttcatcaagctgttcggcatggccaagatcgacaacctgctgcaggagatgctgctgggcggcgcccccagcgacgccccccacgcccaccaccccctgcacccccacctgatgcaggagcacatgggcaccaacgtgatcgtggccaacaccatgcccacccacctgagcaacggccagatgtgcgagtggcccagacccagaggccaggccgccgcccccgaggccccccagcccgccccccccggcggcagcggcagcgagccctacagactgctgcccggcgccgtggccaccatcgtgagacccctggaggccatcccccagcccaccatcaccagacaggaggtgatctgaggactagtccctgttcccagagcccacttttttttctttttttgaaataaaatagcctgtctttcagatctaaaaaaaaaaaaaaaaaaaaaaaaaaaaaaaaaaaaaaaaaaaaaaaaaaaaaaaaaaaaaaaaaaaaaaaaaaaaaaaaaaaaaaaaaaaaaaaaaaaa

SEQ ID NO: 5363 - RNA, 1562 nt, synthetic construct
  misc_feature 1..1562: note = mRNA a-1 (A100) (opt4) from Homo sapiens__NP_000448.3__HNF4A(39-474)(S87A_K106R_K108R_K126R_ K127R_S142A_S143A_S148A_T166A_S167A_K179R_K180R_K234R_K300R _K307R_K309R_S313A_S378A_T429A_T432A_S436A_K447R_K458R_S461 E_K470R)
  source 1..1562: mol_type = other RNA
aggagagtcccgcagtcggcgtccagcggctctgcttgttcgtgtgtgtgtcgttgcaggccttattcaagcttaccatggacaccagccccagcgagggcaccaacctgaacgcccccaacagcctgggcgtgagcgccctgtgcgccatctgcggcgacagagccaccggcaagcactacggcgccagcagctgcgacggctgcaagggcttcttcagaagagccgtgagaaagaaccacatgtacagctgcagattcagcagacagtgcgtggtggacagagacagaagaaaccagtgcagatactgcagactgaagaagtgcttcagagccggcatgagaagagaggccgtgcagaacgagagagacagaatcagcaccagaagagccgcctacgaggacagcgccctgcccagcatcaacgccctgctgcaggccgaggtgctgagcagacagatcgccgcccccgtgagcggcatcaacggcgacatcagagccagaagaatcgccagcatcgccgacgtgtgcgagagcatgaaggagcagctgctggtgctggtggagtgggccaagtacatccccgccttctgcgagctgcccctggacgaccaggtggccctgctgagagcccacgccggcgagcacctgctgctgggcgccaccagaagaagcatggtgttcaaggacgtgctgctgctgggcaacgactacatcgtgcccagacactgccccgagctggccgagatgagcagagtgagcatcagaatcctggacgagctggtgctgcccttccaggagctgcagatcgacgacaacgagtacgcctacctgaaggccatcatcttcttcgaccccgacgccagaggcctgagcgaccccggcagaatcagaagactgagagcccaggtgcaggtgagcctggaggactacatcaacgacagacagtacgacagcagaggcagattcggcgagctgctgctgctgctgcccaccctgcagagcatcacctggcagatgatcgagcagatccagttcatcaagctgttcggcatggccaagatcgacaacctgctgcaggagatgctgctgggcggcgcccccagcgacgccccccacgcccaccaccccctgcacccccacctgatgcaggagcacatgggcaccaacgtgatcgtggccaacaccatgcccacccacctgagcaacggccagatgtgcgagtggcccagacccagaggccaggccgccgcccccgaggccccccagcccgccccccccggcggcagcggcagcgagccctacagactgctgcccggcgccgtggccaccatcgtgagacccctggaggccatcccccagcccaccatcaccagacaggaggtgatctgaggactagtccctgttcccagagcccacttttttttctttttttgaaataaaatagcctgtctttcagatctaaaaaaaaaaaaaaaaaaaaaaaaaaaaaaaaaaaaaaaaaaaaaaaaaaaaaaaaaaaaaaaaaaaaaaaaaaaaaaaaaaaaaaaaaaaaaaaaaaaa

SEQ ID NO: 5364 - RNA, 1562 nt, synthetic construct
  misc_feature 1..1562: note = mRNA a-1 (A100) (opt4) from Homo sapiens__NP_000448.3__HNF4A(39-474)(S87A_S95A_S99A_K106R_K1 08R_K126R_K127R_S142A_S143A_S148A_T166A_S167A_S313A_S378A_T 429A_T432A_S436A_K458R_S461E)
  source 1..1562: mol_type = other RNA
aggagagtcccgcagtcggcgtccagcggctctgcttgttcgtgtgtgtgtcgttgcaggccttattcaagcttaccatggacaccagccccagcgagggcaccaacctgaacgcccccaacagcctgggcgtgagcgccctgtgcgccatctgcggcgacagagccaccggcaagcactacggcgccagcagctgcgacggctgcaagggcttcttcagaagagccgtgagaaagaaccacatgtacgcctgcagattcgccagacagtgcgtggtggacagagacagaagaaaccagtgcagatactgcagactgaagaagtgcttcagagccggcatgagaagagaggccgtgcagaacgagagagacagaatcagcaccagaagagccgcctacgaggacagcgccctgcccagcatcaacgccctgctgcaggccgaggtgctgagcagacagatcgccgcccccgtgagcggcatcaacggcgacatcagagccaagaagatcgccagcatcgccgacgtgtgcgagagcatgaaggagcagctgctggtgctggtggagtgggccaagtacatccccgccttctgcgagctgcccctggacgaccaggtggccctgctgagagcccacgccggcgagcacctgctgctgggcgccaccaagagaagcatggtgttcaaggacgtgctgctgctgggcaacgactacatcgtgcccagacactgccccgagctggccgagatgagcagagtgagcatcagaatcctggacgagctggtgctgcccttccaggagctgcagatcgacgacaacgagtacgcctacctgaaggccatcatcttcttcgaccccgacgccaagggcctgagcgaccccggcaagatcaagagactgagagcccaggtgcaggtgagcctggaggactacatcaacgacagacagtacgacagcagaggcagattcggcgagctgctgctgctgctgcccaccctgcagagcatcacctggcagatgatcgagcagatccagttcatcaagctgttcggcatggccaagatcgacaacctgctgcaggagatgctgctgggcggcgcccccagcgacgccccccacgcccaccaccccctgcacccccacctgatgcaggagcacatgggcaccaacgtgatcgtggccaacaccatgcccacccacctgagcaacggccagatgtgcgagtggcccagacccagaggccaggccgccgcccccgaggccccccagcccgccccccccggcggcagcggcagcgagccctacaagctgctgcccggcgccgtggccaccatcgtgagacccctggaggccatcccccagcccaccatcaccaagcaggaggtgatctgaggactagtccctgttcccagagcccacttttttttctttttttgaaataaaatagcctgtctttcagatctaaaaaaaaaaaaaaaaaaaaaaaaaaaaaaaaaaaaaaaaaaaaaaaaaaaaaaaaaaaaaaaaaaaaaaaaaaaaaaaaaaaaaaaaaaaaaaaaaaaa

SEQ ID NO: 5365 - RNA, 1562 nt, synthetic construct
  misc_feature 1..1562: note = mRNA a-1 (A100) (opt4) from Homo sapiens__NP_000448.3__HNF4A(39-474)(S87A_K106R_K108R_K126R_ K127R_S138A_T139A_S142A_S143A_S148A_T166A_S167A_S313A_S378A _T429A_T432A_S436A_K458R_S461E)
  source 1..1562: mol_type = other RNA
aggagagtcccgcagtcggcgtccagcggctctgcttgttcgtgtgtgtgtcgttgcaggccttattcaagcttaccatggacaccagccccagcgagggcaccaacctgaacgcccccaacagcctgggcgtgagcgccctgtgcgccatctgcggcgacagagccaccggcaagcactacggcgccagcagctgcgacggctgcaagggcttcttcagaagagccgtgagaaagaaccacatgtacagctgcagattcagcagacagtgcgtggtggacagagacagaagaaaccagtgcagatactgcagactgaagaagtgcttcagagccggcatgagaagagaggccgtgcagaacgagagagacagaatcgccgccagaagagccgcctacgaggacagcgccctgcccagcatcaacgccctgctgcaggccgaggtgctgagcagacagatcgccgcccccgtgagcggcatcaacggcgacatcagagccaagaagatcgccagcatcgccgacgtgtgcgagagcatgaaggagcagctgctggtgctggtggagtgggccaagtacatccccgccttctgcgagctgcccctggacgaccaggtggccctgctgagagcccacgccggcgagcacctgctgctgggcgccaccaagagaagcatggtgttcaaggacgtgctgctgctgggcaacgactacatcgtgcccagacactgccccgagctggccgagatgagcagagtgagcatcagaatcctggacgagctggtgctgcccttccaggagctgcagatcgacgacaacgagtacgcctacctgaaggccatcatcttcttcgaccccgacgccaagggcctgagcgaccccggcaagatcaagagactgagagcccaggtgcaggtgagcctggaggactacatcaacgacagacagtacgacagcagaggcagattcggcgagctgctgctgctgctgcccaccctgcagagcatcacctggcagatgatcgagcagatccagttcatcaagctgttcggcatggccaagatcgacaacctgctgcaggagatgctgctgggcggcgcccccagcgacgccccccacgcccaccaccccctgcacccccacctgatgcaggagcacatgggcaccaacgtgatcgtggccaacaccatgcccacccacctgagcaacggccagatgtgcgagtggcccagacccagaggccaggccgccgcccccgaggccccccagcccgccccccccggcggcagcggcagcgagccctacaagctgctgcccggcgccgtggccaccatcgtgagacccctggaggccatcccccagcccaccatcaccaagcaggaggtgatctgaggactagtccctgttcccagagcccacttttttttctttttttgaaataaaatagcctgtctttcagatctaaaaaaaaaaaaaaaaaaaaaaaaaaaaaaaaaaaaaaaaaaaaaaaaaaaaaaaaaaaaaaaaaaaaaaaaaaaaaaaaaaaaaaaaaaaaaaaaaaaa

SEQ ID NO: 5366 - RNA, 1562 nt, synthetic construct
  misc_feature 1..1562: note = mRNA a-1 (A100) (opt4) from Homo sapiens__NP_000448.3__HNF4A(39-474)(S87A_S95A_S99A_K106R_K1 08R_K126R_K127R_S138A_T139A_S142A_S143A_S148A_T166A_S167A_S 313A_S378A_T429A_T432A_S436A_K458R_S461E)
  source 1..1562: mol_type = other RNA
aggagagtcccgcagtcggcgtccagcggctctgcttgttcgtgtgtgtgtcgttgcaggccttattcaagcttaccatggacaccagccccagcgagggcaccaacctgaacgcccccaacagcctgggcgtgagcgccctgtgcgccatctgcggcgacagagccaccggcaagcactacggcgccagcagctgcgacggctgcaagggcttcttcagaagagccgtgagaaagaaccacatgtacgcctgcagattcgccagacagtgcgtggtggacagagacagaagaaaccagtgcagatactgcagactgaagaagtgcttcagagccggcatgagaagagaggccgtgcagaacgagagagacagaatcgccgccagaagagccgcctacgaggacagcgccctgcccagcatcaacgccctgctgcaggccgaggtgctgagcagacagatcgccgcccccgtgagcggcatcaacggcgacatcagagccaagaagatcgccagcatcgccgacgtgtgcgagagcatgaaggagcagctgctggtgctggtggagtgggccaagtacatccccgccttctgcgagctgcccctggacgaccaggtggccctgctgagagcccacgccggcgagcacctgctgctgggcgccaccaagagaagcatggtgttcaaggacgtgctgctgctgggcaacgactacatcgtgcccagacactgccccgagctggccgagatgagcagagtgagcatcagaatcctggacgagctggtgctgcccttccaggagctgcagatcgacgacaacgagtacgcctacctgaaggccatcatcttcttcgaccccgacgccaagggcctgagcgaccccggcaagatcaagagactgagagcccaggtgcaggtgagcctggaggactacatcaacgacagacagtacgacagcagaggcagattcggcgagctgctgctgctgctgcccaccctgcagagcatcacctggcagatgatcgagcagatccagttcatcaagctgttcggcatggccaagatcgacaacctgctgcaggagatgctgctgggcggcgcccccagcgacgccccccacgcccaccaccccctgcacccccacctgatgcaggagcacatgggcaccaacgtgatcgtggccaacaccatgcccacccacctgagcaacggccagatgtgcgagtggcccagacccagaggccaggccgccgcccccgaggccccccagcccgccccccccggcggcagcggcagcgagccctacaagctgctgcccggcgccgtggccaccatcgtgagacccctggaggccatcccccagcccaccatcaccaagcaggaggtgatctgaggactagtccctgttcccagagcccacttttttttctttttttgaaataaaatagcctgtctttcagatctaaaaaaaaaaaaaaaaaaaaaaaaaaaaaaaaaaaaaaaaaaaaaaaaaaaaaaaaaaaaaaaaaaaaaaaaaaaaaaaaaaaaaaaaaaaaaaaaaaaa

SEQ ID NO: 5367 - RNA, 1562 nt, synthetic construct
  misc_feature 1..1562: note = mRNA a-1 (A100) (opt5) from Homo sapiens__NP_000448.3__HNF4A(39-474)
  source 1..1562: mol_type = other RNA
aggagagtcccgcagtcggcgtccagcggctctgcttgttcgtgtgtgtgtcgttgcaggccttattcaagcttaccatggacacatctcctagcgaggggaccaacctcaatgctccgaactccctgggagtgtctgccctttgcgccatctgtggcgatcgggctacagggaaacactacggagccagctcctgcgacggctgtaaggggtttttccgcagatctgtgcggaaaaatcatatgtatagctgccgcttttccagacaatgtgtcgtggataaggacaaacggaaccagtgccgctactgtagactgaagaagtgcttccgggctggaatgaaaaaggaagccgttcagaatgagcgcgatagaattagcacccggcgcagctcctatgaagacagctctctcccctccatcaacgcgctgctgcaggccgaggtgctcagcagacaaattacatctcctgtctccggcatcaatggcgatattcgggctaaaaagatcgccagcatcgctgacgtgtgtgagtccatgaaagaacagctgcttgttctggtggagtgggccaagtacattcccgcgttttgcgaactccctctggatgaccaggtcgcccttctgcgcgctcacgccggggagcatctcctgctgggagctaccaagagatctatggtgttcaaagacgtgctcctgcttggcaacgattatatcgtcccccggcactgtcctgagctggccgaaatgagcagagtttccattcgcatcctcgacgagctggtgcttccgtttcaggaactgcaaattgatgacaatgagtacgcctacctcaaggctatcattttctttgatcccgacgcgaaagggctgagcgatcctggaaagatcaaacggctgagatctcaggtgcaggtctccctcgaagactatatcaacgatcgccagtacgacagccggggcagattcggggagctgcttctgctcctgcccacgcttcaatctattacctggcagatgatcgagcagattcaatttatcaagctgttcggaatggccaaaattgataatctcctgcaggaaatgctgctcggcggcagcccttccgacgctccccatgcccaccacccgctgcatcctcaccttatgcaggagcatatggggacaaacgtgatcgttgccaataccatgcccacacacctgtctaacggacagatgtgcgaatggcctcgcccccggggccaagctgccacccccgagacgcctcagccgtctccccctgggggatccggcagcgaaccctataagctcctgcctggggcggtggctacaatcgtcaagcccctgtctgccattccgcagcctaccatcacaaaacaggaggtgatttgaggactagtccctgttcccagagcccacttttttttctttttttgaaataaaatagcctgtctttcagatctaaaaaaaaaaaaaaaaaaaaaaaaaaaaaaaaaaaaaaaaaaaaaaaaaaaaaaaaaaaaaaaaaaaaaaaaaaaaaaaaaaaaaaaaaaaaaaaaaaaa

SEQ ID NO: 5368 - RNA, 1562 nt, synthetic construct
  misc_feature 1..1562: note = mRNA a-1 (A100) (opt5) from Homo sapiens__NP_000448.3__HNF4A(39-474)(S313A)
  source 1..1562: mol_type = other RNA
aggagagtcccgcagtcggcgtccagcggctctgcttgttcgtgtgtgtgtcgttgcaggccttattcaagcttaccatggacacatctcctagcgaggggaccaacctcaatgctccgaactccctgggagtgtctgccctttgcgccatctgtggcgatcgggctacagggaaacactacggagccagctcctgcgacggctgtaaggggtttttccgcagatctgtgcggaaaaatcatatgtatagctgccgcttttccagacaatgtgtcgtggataaggacaaacggaaccagtgccgctactgtagactgaagaagtgcttccgggctggaatgaaaaaggaagccgttcagaatgagcgcgatagaattagcacccggagatcttcctatgaagacagctctctcccctccatcaacgcgctgctgcaggccgaggtgctcagccgccaaattacatctcctgtctccggcatcaatggcgatattcgggctaaaaagatcgccagcatcgctgacgtgtgtgagtccatgaaagaacagctgcttgttctggtggagtgggccaagtacattcccgcgttttgcgaactccctctggatgaccaggtcgcccttctgcgcgctcacgccggggagcatctcctgctgggagctaccaagagatctatggtgttcaaagacgtgctcctgcttggcaacgattatatcgtcccccggcactgtcctgagctggccgaaatgagcagagtttccattcgcatcctcgacgagctggtgcttccgtttcaggaactgcaaattgatgacaatgagtacgcctacctcaaggctatcattttctttgatcccgacgcgaaagggctgagcgatcctggaaagatcaaacggctgagagcccaggtgcaggtctctctcgaagactatatcaacgatcgccagtacgactcccggggcagattcggggagctgcttctgctcctgcccacgcttcaaagcattacctggcagatgatcgagcagattcaatttatcaagctgttcggaatggctaaaattgataatctcctgcaggaaatgctgctcggcggctctcctagcgacgctccccatgcccaccacccgctgcatcctcaccttatgcaggagcatatggggacaaacgtgatcgttgccaataccatgcccacacacctgtccaacggacagatgtgcgaatggcctcgcccccggggccaagccgcgacccccgagacgcctcagccgtctccccctgggggaagcggctccgaaccctataagctcctgcctggggctgtggccacaatcgtcaagcccctgagcgccattccgcagcctaccatcacaaaacaggaggtgatttgaggactagtccctgttcccagagcccacttttttttctttttttgaaataaaatagcctgtctttcagatctaaaaaaaaaaaaaaaaaaaaaaaaaaaaaaaaaaaaaaaaaaaaaaaaaaaaaaaaaaaaaaaaaaaaaaaaaaaaaaaaaaaaaaaaaaaaaaaaaaaa

SEQ ID NO: 5369 - RNA, 1562 nt, synthetic construct
  misc_feature 1..1562: note = mRNA a-1 (A100) (opt5) from Homo sapiens__NP_000448.3__HNF4A(39-474)(S313E)
  source 1..1562: mol_type = other RNA
aggagagtcccgcagtcggcgtccagcggctctgcttgttcgtgtgtgtgtcgttgcaggccttattcaagcttaccatggacacatctcctagcgaggggaccaacctcaatgctccgaactccctgggagtgtctgccctttgcgccatctgtggcgatcgggctacagggaaacactacggagccagctcctgcgacggctgtaaggggtttttccgcagatctgtgcggaaaaatcatatgtatagctgccgcttttccagacaatgtgtcgtggataaggacaaacggaaccagtgccgctactgtagactgaagaagtgcttccgggctggaatgaaaaaggaagccgttcagaatgagcgcgatagaattagcacccggagatcttcctatgaagacagctctctcccctccatcaacgcgctgctgcaggccgaggtgctcagccgccaaattacatctcctgtctccggcatcaatggcgatattcgggctaaaaagatcgccagcatcgctgacgtgtgtgagtccatgaaagaacagctgcttgttctggtggagtgggccaagtacattcccgcgttttgcgaactccctctggatgaccaggtcgcccttctgcgcgctcacgccggggagcatctcctgctgggagctaccaagagatctatggtgttcaaagacgtgctcctgcttggcaacgattatatcgtcccccggcactgtcctgagctggccgaaatgagcagagtttccattcgcatcctcgacgagctggtgcttccgtttcaggaactgcaaattgatgacaatgagtacgcctacctcaaggctatcattttctttgatcccgacgcgaaagggctgagcgatcctggaaagatcaaacggctgagagaacaggtgcaggtctctctcgaggactatatcaacgatcgccagtacgactcccggggcagattcggggagctgcttctgctcctgcccacgcttcaaagcattacctggcagatgatcgaacagattcaatttatcaagctgttcggaatggccaaaattgataatctcctgcaggagatgctgctcggcggctctcctagcgacgctccccatgcccaccacccgctgcatcctcaccttatgcaggaacatatggggacaaacgtgatcgttgccaataccatgcccacacacctgtccaacggacagatgtgcgagtggcctcgcccccggggccaagctgccacccccgaaacgcctcagccgtctccccctgggggaagcggctccgagccctataagctcctgcctggggcggtggctacaatcgtcaagcccctgagcgccattccgcagcctaccatcacaaaacaggaggtgatttgaggactagtccctgttcccagagcccacttttttttctttttttgaaataaaatagcctgtctttcagatctaaaaaaaaaaaaaaaaaaaaaaaaaaaaaaaaaaaaaaaaaaaaaaaaaaaaaaaaaaaaaaaaaaaaaaaaaaaaaaaaaaaaaaaaaaaaaaaaaaaa

SEQ ID NO: 5370 - RNA, 1562 nt, synthetic construct
  misc_feature 1..1562: note = mRNA a-1 (A100) (opt5) from Homo sapiens__NP_000448.3__HNF4A(39-474)(S142A_S143A)
  source 1..1562: mol_type = other RNA
aggagagtcccgcagtcggcgtccagcggctctgcttgttcgtgtgtgtgtcgttgcaggccttattcaagcttaccatggacacatctcctagcgaggggaccaacctcaatgctccgaactccctgggagtgtctgccctttgcgccatctgtggcgatcgggctacagggaaacactacggagccagctcctgcgacggctgtaaggggtttttccgcagatctgtgcggaaaaatcatatgtatagctgccgcttttccagacaatgtgtcgtggataaggacaaacggaaccagtgccgctactgtagactgaagaagtgcttccgggctggaatgaaaaaggaagccgttcagaatgagcgcgatagaattagcacccggcgcgcggcctatgaagactcttccctccccagcatcaacgctctgctgcaggccgaggtgctctctagacaaattacatcccctgtcagcggcatcaatggcgatattcgggctaaaaagatcgcctctatcgcggacgtgtgtgagtccatgaaagaacagctgcttgttctggtggagtgggccaagtacattcccgctttttgcgaactccctctggatgaccaggtcgcccttctgcgcgctcacgccggggagcatctcctgctgggagccaccaagagaagcatggtgttcaaagacgtgctcctgcttggcaacgattatatcgtcccccggcactgtcctgagctggctgaaatgtccagagtttctattcgcatcctcgacgagctggtgcttccgtttcaggaactgcaaattgatgacaatgagtacgcgtacctcaaggccatcattttctttgatcccgacgctaaagggctgagcgatcctggaaagatcaaacggctgagatcccaggtgcaggtcagcctcgaagactatatcaacgatcgccagtacgactctcggggcagattcggggagctgcttctgctcctgcccacgcttcaatccattacctggcagatgatcgagcagattcaatttatcaagctgttcggaatggccaaaattgataatctcctgcaggaaatgctgctcggcggcagcccttctgacgctccccatgcccaccacccgctgcatcctcaccttatgcaggagcatatggggacaaacgtgatcgttgccaataccatgcccacacacctgagcaacggacagatgtgcgaatggcctcgcccccggggccaagcggctacccccgagacgcctcagccgtctccccctgggggatccggcagcgaaccctataagctcctgcctggggccgtggccacaatcgtcaagcccctgtccgctattccgcagcctaccatcacaaaacaggaggtgatttgaggactagtccctgttcccagagcccacttttttttctttttttgaaataaaatagcctgtctttcagatctaaaaaaaaaaaaaaaaaaaaaaaaaaaaaaaaaaaaaaaaaaaaaaaaaaaaaaaaaaaaaaaaaaaaaaaaaaaaaaaaaaaaaaaaaaaaaaaaaaaa

SEQ ID NO: 5371 - RNA, 1562 nt, synthetic construct
  misc_feature 1..1562: note = mRNA a-1 (A100) (opt5) from Homo sapiens__NP_000448.3__HNF4A(39-474)(S142E_S143E)
  source 1..1562: mol_type = other RNA
aggagagtcccgcagtcggcgtccagcggctctgcttgttcgtgtgtgtgtcgttgcaggccttattcaagcttaccatggacacatctcctagcgaggggaccaacctcaatgctccgaactccctgggagtgtctgccctttgcgccatctgtggcgatcgggctacagggaaacactacggagccagctcctgcgacggctgtaaggggtttttccgcagatctgtgcggaaaaatcatatgtatagctgccgcttttccagacaatgtgtcgtggataaggacaaacggaaccagtgccgctactgtagactgaagaagtgcttccgggctggaatgaaaaaggaagccgttcagaatgagcgcgatagaattagcacccggcgcgaagagtatgaggactcttccctccccagcatcaacgcgctgctgcaggccgaagtgctctctagacaaattacatcccctgtcagcggcatcaatggcgatattcgggctaaaaagatcgcctctatcgctgacgtgtgtgagtccatgaaagaacagctgcttgttctggtggagtgggccaagtacattcccgcgttttgcgagctccctctggatgaccaggtcgcccttctgcgcgctcacgccggggaacatctcctgctgggagctaccaagagaagcatggtgttcaaagacgtgctcctgcttggcaacgattatatcgtcccccggcactgtcctgagctggccgaaatgtccagagtttctattcgcatcctcgacgagctggtgcttccgtttcaggaactgcaaattgatgacaatgagtacgcctacctcaaggctatcattttctttgatcccgacgcgaaagggctgagcgatcctggaaagatcaaacggctgagatcccaggtgcaggtcagcctcgaggactatatcaacgatcgccagtacgactctcggggcagattcggggaactgcttctgctcctgcccacgcttcaatccattacctggcagatgatcgagcagattcaatttatcaagctgttcggaatggccaaaattgataatctcctgcaggaaatgctgctcggcggcagcccttctgacgctccccatgcccaccacccgctgcatcctcaccttatgcaggagcatatggggacaaacgtgatcgttgccaataccatgcccacacacctgagcaacggacagatgtgcgaatggcctcgcccccggggccaagctgccacccccgagacgcctcagccgtctccccctgggggatccggcagcgagccctataagctcctgcctggggcggtggctacaatcgtcaagcccctgtccgccattccgcagcctaccatcacaaaacaggaagtgatttgaggactagtccctgttcccagagcccacttttttttctttttttgaaataaaatagcctgtctttcagatctaaaaaaaaaaaaaaaaaaaaaaaaaaaaaaaaaaaaaaaaaaaaaaaaaaaaaaaaaaaaaaaaaaaaaaaaaaaaaaaaaaaaaaaaaaaaaaaaaaaa

SEQ ID NO: 5372 - RNA, 1562 nt, synthetic construct
  misc_feature 1..1562: note = mRNA a-1 (A100) (opt5) from Homo sapiens__NP_000448.3__HNF4A(39-474)(S143A)
  source 1..1562: mol_type = other RNA
aggagagtcccgcagtcggcgtccagcggctctgcttgttcgtgtgtgtgtcgttgcaggccttattcaagcttaccatggacacatctcctagcgaggggaccaacctcaatgctccgaactccctgggagtgtctgccctttgcgccatctgtggcgatcgggctacagggaaacactacggagccagctcctgcgacggctgtaaggggtttttccgcagatctgtgcggaaaaatcatatgtatagctgccgcttttccagacaatgtgtcgtggataaggacaaacggaaccagtgccgctactgtagactgaagaagtgcttccgggctggaatgaaaaaggaagccgttcagaatgagcgcgatagaattagcacccggcgctctgcgtatgaagactccagcctcccctctatcaacgccctgctgcaggctgaggtgctctccagacaaattacaagccctgtctctggcatcaatggcgatattcgggccaaaaagatcgcttccatcgccgacgtgtgtgagagcatgaaagaacagctgcttgttctggtggagtgggcgaagtacattcccgccttttgcgaactccctctggatgaccaggtcgcccttctgcgcgcccacgctggggagcatctcctgctgggagccaccaagagatccatggtgttcaaagacgtgctcctgcttggcaacgattatatcgtcccccggcactgtcctgagctggccgaaatgtctagagttagcattcgcatcctcgacgagctggtgcttccgtttcaggaactgcaaattgatgacaatgagtacgcttacctcaaggcgatcattttctttgatcccgacgccaaagggctgtccgatcctggaaagatcaaacggctgagaagccaggtgcaggtctctctcgaagactatatcaacgatcgccagtacgactcccggggcagattcggggagctgcttctgctcctgcccacgcttcaaagcattacctggcagatgatcgagcagattcaatttatcaagctgttcggaatggctaaaattgataatctcctgcaggaaatgctgctcggcggctctcctagcgacgctccccatgcccaccacccgctgcatcctcaccttatgcaggagcatatggggacaaacgtgatcgttgctaataccatgcccacacacctgtccaacggacagatgtgcgaatggcctcgcccccggggccaagccgcgacccccgagacgcctcagccgtctccccctgggggaagcggctccgaaccctataagctcctgcctggggctgtggccacaatcgtcaagcccctgagcgccattccgcagcctaccatcacaaaacaggaggtgatttgaggactagtccctgttcccagagcccacttttttttctttttttgaaataaaatagcctgtctttcagatctaaaaaaaaaaaaaaaaaaaaaaaaaaaaaaaaaaaaaaaaaaaaaaaaaaaaaaaaaaaaaaaaaaaaaaaaaaaaaaaaaaaaaaaaaaaaaaaaaaaa

SEQ ID NO: 5373 - RNA, 1562 nt, synthetic construct
  misc_feature 1..1562: note = mRNA a-1 (A100) (opt5) from Homo sapiens__NP_000448.3__HNF4A(39-474)(T166A)
  source 1..1562: mol_type = other RNA
aggagagtcccgcagtcggcgtccagcggctctgcttgttcgtgtgtgtgtcgttgcaggccttattcaagcttaccatggacacatctcctagcgaggggaccaacctcaatgctccgaactccctgggagtgtctgccctttgcgccatctgtggcgatcgggctacagggaaacactacggagccagctcctgcgacggctgtaaggggtttttccgcagatctgtgcggaaaaatcatatgtatagctgccgcttttccagacaatgtgtcgtggataaggacaaacggaaccagtgccgctactgtagactgaagaagtgcttccgggctggaatgaaaaaggaagccgttcagaatgagcgcgatagaattagcacccggcgcagctcctatgaagacagctctctcccctccatcaacgcgctgctgcaggccgaggtgctcagcagacaaattgcttctcctgtctccggcatcaatggcgatattcgggccaaaaagatcgctagcatcgccgacgtgtgtgagtccatgaaagaacagctgcttgttctggtggagtgggcgaagtacattcccgccttttgcgaactccctctggatgaccaggtcgcccttctgcgcgcccacgctggggagcatctcctgctgggagccacaaagagatctatggtgttcaaagacgtgctcctgcttggcaacgattatatcgtcccccggcactgtcctgagctggccgaaatgagcagagtttccattcgcatcctcgacgagctggtgcttccgtttcaggaactgcaaattgatgacaatgagtacgcttacctcaaggcgatcattttctttgatcccgacgccaaagggctgagcgatcctggaaagatcaaacggctgagatctcaggtgcaggtctccctcgaagactatatcaacgatcgccagtacgacagccggggcagattcggggagctgcttctgctcctgcccacccttcaatctattacgtggcagatgatcgagcagattcaatttatcaagctgttcggaatggctaaaattgataatctcctgcaggaaatgctgctcggcggcagcccttccgacgctccccatgcccaccacccgctgcatcctcaccttatgcaggagcatatggggaccaacgtgatcgttgctaatacaatgcccacccacctgtctaacggacagatgtgcgaatggcctcgcccccggggccaagccgcgacacccgagacccctcagccgtctccccctgggggatccggcagcgaaccctataagctcctgcctggggctgtggccacgatcgtcaagcccctgtctgccattccgcagcctacaatcaccaaacaggaggtgatttgaggactagtccctgttcccagagcccacttttttttctttttttgaaataaaatagcctgtctttcagatctaaaaaaaaaaaaaaaaaaaaaaaaaaaaaaaaaaaaaaaaaaaaaaaaaaaaaaaaaaaaaaaaaaaaaaaaaaaaaaaaaaaaaaaaaaaaaaaaaaaa

SEQ ID NO: 5374 - RNA, 1562 nt, synthetic construct
  misc_feature 1..1562: note = mRNA a-1 (A100) (opt5) from Homo sapiens__NP_000448.3__HNF4A(39-474)(S167E)
  source 1..1562: mol_type = other RNA
aggagagtcccgcagtcggcgtccagcggctctgcttgttcgtgtgtgtgtcgttgcaggccttattcaagcttaccatggacacatctcctagcgaggggaccaacctcaatgctccgaactccctgggagtgtctgccctttgcgccatctgtggcgatcgggctacagggaaacactacggagccagctcctgcgacggctgtaaggggtttttccgcagatctgtgcggaaaaatcatatgtatagctgccgcttttccagacaatgtgtcgtggataaggacaaacggaaccagtgccgctactgtagactgaagaagtgcttccgggctggaatgaaaaaggaagccgttcagaatgagcgcgatagaattagcacccggagatcttcctatgaagacagctctctcccctccatcaacgcgctgctgcaggccgaggtgctcagccgccaaattacagagcctgtctctggcatcaatggcgatattcgggctaaaaagatcgcctccatcgctgacgtgtgtgaaagcatgaaagagcagctgcttgttctggtggaatgggccaagtacattcccgcgttttgcgagctccctctggatgaccaggtcgcccttctgcgcgctcacgccggggagcatctcctgctgggagctaccaagagatccatggtgttcaaagacgtgctcctgcttggcaacgattatatcgtcccccggcactgtcctgaactggccgagatgtctagagttagcattcgcatcctcgacgaactggtgcttccgtttcaggagctgcaaattgatgacaatgaatacgcctacctcaaggctatcattttctttgatcccgacgcgaaagggctgtccgatcctggaaagatcaaacggctgagaagccaggtgcaggtctctctcgaggactatatcaacgatcgccagtacgactcccggggcagattcggggagctgcttctgctcctgcccacgcttcaaagcattacctggcagatgatcgaacagattcaatttatcaagctgttcggaatggccaaaattgataatctcctgcaggagatgctgctcggcggctctcctagcgacgctccccatgcccaccacccgctgcatcctcaccttatgcaggaacatatggggacaaacgtgatcgttgccaataccatgcccacacacctgtccaacggacagatgtgcgagtggcctcgcccccggggccaagctgccacccccgaaacgcctcagccgtctccccctgggggaagcggctccgagccctataagctcctgcctggggcggtggctacaatcgtcaagcccctgagcgccattccgcagcctaccatcacaaaacaggaggtgatttgaggactagtccctgttcccagagcccacttttttttctttttttgaaataaaatagcctgtctttcagatctaaaaaaaaaaaaaaaaaaaaaaaaaaaaaaaaaaaaaaaaaaaaaaaaaaaaaaaaaaaaaaaaaaaaaaaaaaaaaaaaaaaaaaaaaaaaaaaaaaaa

SEQ ID NO: 5375 - RNA, 1562 nt, synthetic construct
  misc_feature 1..1562: note = mRNA a-1 (A100) (opt5) from Homo sapiens__NP_000448.3__HNF4A(39-474)(S167A)
  source 1..1562: mol_type = other RNA
aggagagtcccgcagtcggcgtccagcggctctgcttgttcgtgtgtgtgtcgttgcaggccttattcaagcttaccatggacacatctcctagcgaggggaccaacctcaatgctccgaactccctgggagtgtctgccctttgcgccatctgtggcgatcgggctacagggaaacactacggagccagctcctgcgacggctgtaaggggtttttccgcagatctgtgcggaaaaatcatatgtatagctgccgcttttccagacaatgtgtcgtggataaggacaaacggaaccagtgccgctactgtagactgaagaagtgcttccgggctggaatgaaaaaggaagccgttcagaatgagcgcgatagaattagcacccggagatcttcctatgaagacagctctctcccctccatcaacgcgctgctgcaggccgaggtgctcagccgccaaattacagctcctgtctctggcatcaatggcgatattcgggccaaaaagatcgcttccatcgccgacgtgtgtgagagcatgaaagaacagctgcttgttctggtggagtgggcgaagtacattcccgccttttgcgaactccctctggatgaccaggtcgcccttctgcgcgcccacgctggggagcatctcctgctgggagccaccaagagatccatggtgttcaaagacgtgctcctgcttggcaacgattatatcgtcccccggcactgtcctgagctggccgaaatgtctagagttagcattcgcatcctcgacgagctggtgcttccgtttcaggaactgcaaattgatgacaatgagtacgcttacctcaaggcgatcattttctttgatcccgacgccaaagggctgtccgatcctggaaagatcaaacggctgagaagccaggtgcaggtctctctcgaagactatatcaacgatcgccagtacgactcccggggcagattcggggagctgcttctgctcctgcccacgcttcaaagcattacctggcagatgatcgagcagattcaatttatcaagctgttcggaatggctaaaattgataatctcctgcaggaaatgctgctcggcggctctcctagcgacgctccccatgcccaccacccgctgcatcctcaccttatgcaggagcatatggggacaaacgtgatcgttgctaataccatgcccacacacctgtccaacggacagatgtgcgaatggcctcgcccccggggccaagccgcgacccccgagacgcctcagccgtctccccctgggggaagcggctccgaaccctataagctcctgcctggggctgtggccacaatcgtcaagcccctgagcgccattccgcagcctaccatcacaaaacaggaggtgatttgaggactagtccctgttcccagagcccacttttttttctttttttgaaataaaatagcctgtctttcagatctaaaaaaaaaaaaaaaaaaaaaaaaaaaaaaaaaaaaaaaaaaaaaaaaaaaaaaaaaaaaaaaaaaaaaaaaaaaaaaaaaaaaaaaaaaaaaaaaaaaa

SEQ ID NO: 5376 - RNA, 1562 nt, synthetic construct
  misc_feature 1..1562: note = mRNA a-1 (A100) (opt5) from Homo sapiens__NP_000448.3__HNF4A(39-474)(S167A_S378A_T429A_T432A _S436A)
  source 1..1562: mol_type = other RNA
aggagagtcccgcagtcggcgtccagcggctctgcttgttcgtgtgtgtgtcgttgcaggccttattcaagcttaccatggacacatctcctagcgaggggaccaacctcaatgctccgaactccctgggagtgtctgccctttgcgccatctgtggcgatcgggctacagggaaacactacggagccagctcctgcgacggctgtaaggggtttttccgcagatctgtgcggaaaaatcatatgtatagctgccgcttttccagacaatgtgtcgtggataaggacaaacggaaccagtgccgctactgtagactgaagaagtgcttccgggctggaatgaaaaaggaagccgttcagaatgagcgcgatagaattagcacccggagatcttcctatgaagacagctctctcccctccatcaacgcgctgctgcaggccgaggtgctcagccgccaaattacagctcctgtctctggcatcaatggcgatattcgggccaaaaagatcgcttccatcgccgacgtgtgtgagagcatgaaagaacagctgcttgttctggtggagtgggcgaagtacattcccgccttttgcgaactccctctggatgaccaggtcgcccttctgcgcgcccacgctggggagcatctcctgctgggagccaccaagagatccatggtgttcaaagacgtgctcctgcttggcaacgattatatcgtcccccggcactgtcctgagctggccgaaatgtctagagttagcattcgcatcctcgacgagctggtgcttccgtttcaggaactgcaaattgatgacaatgagtacgcttacctcaaggcgatcattttctttgatcccgacgccaaagggctgtccgatcctggaaagatcaaacggctgagaagccaggtgcaggtctctctcgaagactatatcaacgatcgccagtacgactcccggggcagattcggggagctgcttctgctcctgcccacgcttcaaagcattacctggcagatgatcgagcagattcaatttatcaagctgttcggaatggctaaaattgataatctcctgcaggaaatgctgctcggcggcgccccttctgacgctccccatgctcaccacccgctgcatcctcaccttatgcaggagcatatggggacaaacgtgatcgttgccaataccatgcccacacacctgagcaacggacagatgtgcgaatggcctcgcccccggggccaagcggctgcccccgaggcccctcagccggctccccctgggggatccggctctgaaccctataagctcctgcctggggccgtggctaccatcgtcaagcccctgagcgccattccgcagcctacgatcacaaaacaggaggtgatttgaggactagtccctgttcccagagcccacttttttttctttttttgaaataaaatagcctgtctttcagatctaaaaaaaaaaaaaaaaaaaaaaaaaaaaaaaaaaaaaaaaaaaaaaaaaaaaaaaaaaaaaaaaaaaaaaaaaaaaaaaaaaaaaaaaaaaaaaaaaaaa

SEQ ID NO: 5377 - RNA, 1562 nt, synthetic construct
  misc_feature 1..1562: note = mRNA a-1 (A100) (opt5) from Homo sapiens__NP_000448.3__HNF4A(39-474)(S167E_S378E_T429E_T432E _S436E)
  source 1..1562: mol_type = other RNA
aggagagtcccgcagtcggcgtccagcggctctgcttgttcgtgtgtgtgtcgttgcaggccttattcaagcttaccatggacacatctcctagcgaggggaccaacctcaatgctccgaactccctgggagtgtctgccctttgcgccatctgtggcgatcgggctacagggaaacactacggagccagctcctgcgacggctgtaaggggtttttccgcagatctgtgcggaaaaatcatatgtatagctgccgcttttccagacaatgtgtcgtggataaggacaaacggaaccagtgccgctactgtagactgaagaagtgcttccgggctggaatgaaaaaggaagccgttcagaatgagcgcgatagaattagcacccggagatcttcctatgaagacagctctctcccctccatcaacgcgctgctgcaggccgaggtgctcagccgccaaattacagagcctgtctctggcatcaatggcgatattcgggctaaaaagatcgcctccatcgctgacgtgtgtgaaagcatgaaagagcagctgcttgttctggtggaatgggccaagtacattcccgcgttttgcgagctccctctggatgaccaggtcgcccttctgcgcgctcacgccggggagcatctcctgctgggagctaccaagagatccatggtgttcaaagacgtgctcctgcttggcaacgattatatcgtcccccggcactgtcctgaactggccgagatgtctagagttagcattcgcatcctcgacgaactggtgcttccgtttcaggagctgcaaattgatgacaatgaatacgcctacctcaaggctatcattttctttgatcccgacgcgaaagggctgtccgatcctggaaagatcaaacggctgagaagccaggtgcaggtctctctcgaggactatatcaacgatcgccagtacgactcccggggcagattcggggagctgcttctgctcctgcccacgcttcaaagcattacctggcagatgatcgaacagattcaatttatcaagctgttcggaatggccaaaattgataatctcctgcaggagatgctgctcggcggcgaaccttctgacgctccccatgcccaccacccgctgcatcctcaccttatgcaggagcatatggggacaaacgtgatcgttgccaataccatgcccacacacctgagcaacggacagatgtgcgaatggcctcgcccccggggccaagctgccgagcccgaggaacctcagccggagccccctgggggatccggctctgaaccctataagctcctgcctggggcggtggctaccatcgtcaagcccctgagcgccattccgcagcctacgatcacaaaacaggaggtgatttgaggactagtccctgttcccagagcccacttttttttctttttttgaaataaaatagcctgtctttcagatctaaaaaaaaaaaaaaaaaaaaaaaaaaaaaaaaaaaaaaaaaaaaaaaaaaaaaaaaaaaaaaaaaaaaaaaaaaaaaaaaaaaaaaaaaaaaaaaaaaaa

SEQ ID NO: 5378 - RNA, 1562 nt, synthetic construct
  misc_feature 1..1562: note = mRNA a-1 (A100) (opt5) from Homo sapiens__NP_000448.3__HNF4A(39-474)(S87A)
  source 1..1562: mol_type = other RNA
aggagagtcccgcagtcggcgtccagcggctctgcttgttcgtgtgtgtgtcgttgcaggccttattcaagcttaccatggacacatctcctagcgaggggaccaacctcaatgctccgaactccctgggagtgtctgccctttgcgccatctgtggcgatcgggctacagggaaacactacggagccagctcctgcgacggctgtaaggggtttttccgcagagctgtgcggaaaaatcatatgtattcttgccgctttagcagacaatgtgtcgtggataaggacaaacggaaccagtgccgctactgtagactgaagaagtgcttccgggccggaatgaaaaaggaagcggttcagaatgagcgcgatagaatttccacccggcgcagctcttatgaagactccagcctcccctctatcaacgccctgctgcaggctgaggtgctctccagacaaattacaagccctgtctctggcatcaatggcgatattcgggccaaaaagatcgcttccatcgccgacgtgtgtgagagcatgaaagaacagctgcttgttctggtggagtgggcgaagtacattcccgccttttgcgaactccctctggatgaccaggtcgcccttctgcgcgcccacgctggggagcatctcctgctgggagccaccaagagatccatggtgttcaaagacgtgctcctgcttggcaacgattatatcgtcccccggcactgtcctgagctggccgaaatgtctagagttagcattcgcatcctcgacgagctggtgcttccgtttcaggaactgcaaattgatgacaatgagtacgcttacctcaaggcgatcattttctttgatcccgacgccaaagggctgtccgatcctggaaagatcaaacggctgagaagccaggtgcaggtctctctcgaagactatatcaacgatcgccagtacgactcccggggcagattcggggagctgcttctgctcctgcccacgcttcaaagcattacctggcagatgatcgagcagattcaatttatcaagctgttcggaatggctaaaattgataatctcctgcaggaaatgctgctcggcggctctcctagcgacgctccccatgcccaccacccgctgcatcctcaccttatgcaggagcatatggggacaaacgtgatcgttgctaataccatgcccacacacctgtccaacggacagatgtgcgaatggcctcgcccccggggccaagccgcgacccccgagacgcctcagccgtctccccctgggggaagcggctccgaaccctataagctcctgcctggggctgtggccacaatcgtcaagcccctgagcgccattccgcagcctaccatcacaaaacaggaggtgatttgaggactagtccctgttcccagagcccacttttttttctttttttgaaataaaatagcctgtctttcagatctaaaaaaaaaaaaaaaaaaaaaaaaaaaaaaaaaaaaaaaaaaaaaaaaaaaaaaaaaaaaaaaaaaaaaaaaaaaaaaaaaaaaaaaaaaaaaaaaaaaa

SEQ ID NO: 5379 - RNA, 1562 nt, synthetic construct
  misc_feature 1..1562: note = mRNA a-1 (A100) (opt5) from Homo sapiens__NP_000448.3__HNF4A(39-474)(S87E)
  source 1..1562: mol_type = other RNA
aggagagtcccgcagtcggcgtccagcggctctgcttgttcgtgtgtgtgtcgttgcaggccttattcaagcttaccatggacacatctcctagcgaggggaccaacctcaatgctccgaactccctgggagtgtctgccctttgcgccatctgtggcgatcgggctacagggaaacactacggagccagctcctgcgacggctgtaaggggtttttccgcagagaagtgcggaaaaatcatatgtattcttgccgctttagcagacaatgtgtcgtggataaggacaaacggaaccagtgccgctactgtagactgaagaagtgcttccgggctggaatgaaaaaggaggccgttcagaatgaacgcgatagaatttccacccggcgcagctcttatgaggactccagcctcccctctatcaacgcgctgctgcaggccgaggtgctctccagacaaattacaagccctgtctctggcatcaatggcgatattcgggctaaaaagatcgcctccatcgctgacgtgtgtgaaagcatgaaagagcagctgcttgttctggtggaatgggccaagtacattcccgcgttttgcgagctccctctggatgaccaggtcgcccttctgcgcgctcacgccggggagcatctcctgctgggagctaccaagagatccatggtgttcaaagacgtgctcctgcttggcaacgattatatcgtcccccggcactgtcctgaactggccgagatgtctagagttagcattcgcatcctcgacgaactggtgcttccgtttcaggagctgcaaattgatgacaatgaatacgcctacctcaaggctatcattttctttgatcccgacgcgaaagggctgtccgatcctggaaagatcaaacggctgagaagccaggtgcaggtctctctcgaggactatatcaacgatcgccagtacgactcccggggcagattcggggagctgcttctgctcctgcccacgcttcaaagcattacctggcagatgatcgaacagattcaatttatcaagctgttcggaatggccaaaattgataatctcctgcaggagatgctgctcggcggctctcctagcgacgctccccatgcccaccacccgctgcatcctcaccttatgcaggaacatatggggacaaacgtgatcgttgccaataccatgcccacacacctgtccaacggacagatgtgcgagtggcctcgcccccggggccaagctgccacccccgaaacgcctcagccgtctccccctgggggaagcggctccgagccctataagctcctgcctggggcggtggctacaatcgtcaagcccctgagcgccattccgcagcctaccatcacaaaacaggaggtgatttgaggactagtccctgttcccagagcccacttttttttctttttttgaaataaaatagcctgtctttcagatctaaaaaaaaaaaaaaaaaaaaaaaaaaaaaaaaaaaaaaaaaaaaaaaaaaaaaaaaaaaaaaaaaaaaaaaaaaaaaaaaaaaaaaaaaaaaaaaaaaaa

SEQ ID NO: 5380 - RNA, 1562 nt, synthetic construct
  misc_feature 1..1562: note = mRNA a-1 (A100) (opt5) from Homo sapiens__NP_000448.3__HNF4A(39-474)(R2V)
  source 1..1562: mol_type = other RNA
aggagagtcccgcagtcggcgtccagcggctctgcttgttcgtgtgtgtgtcgttgcaggccttattcaagcttaccatggacacatctcctagcgaggggaccaacctcaatgctccgaactccctgggagtgtctgccctttgcgccatctgtggcgatagagctacagggaaacactacggagccagctcctgcgacggctgtaaggggtttttccggcgctctgtccggaaaaatcatatgtatagctgcagattttcccgccaatgtgtggttgataaggacaaaagaaaccagtgccggtactgtcgcctgaagaagtgcttcagagctggaatgaaaaaggaagccgtgcagaatgagcgggatcgcattagcaccagacggtcttcctatgaagacagctctctcccctccatcaacgcgctgctgcaggccgaggtcctcagccgccaaattacatctcctgtgtccggcatcaatggcgatattagagctaaaaagatcgccagcatcgctgacgtttgtgagtccatgaaagaacagctgcttgtgctggtcgagtgggccaagtacattcccgcgttttgcgaactccctctggatgaccaggtggcccttctgcgggctcacgccggggagcatctcctgctgggagctaccaagcgctctatggtgttcaaagacgtcctcctgcttggcaacgattatatcgttcccagacactgtcctgagctggccgaaatgagccgggtgtccattagaatcctcgacgagctggtgcttccgtttcaggaactgcaaattgatgacaatgagtacgcctacctcaaggctatcattttctttgatcccgacgcgaaagggctgagcgatcctggaaagatcaaacgcctgcggtctcaggtccaggtgtccctcgaagactatatcaacgatagacagtacgacagccgcggccggttcggggagctgcttctgctcctgcccacgcttcaatctattacctggcagatgatcgagcagattcaatttatcaagctgttcggaatggccaaaattgataatctcctgcaggaaatgctgctcggcggcagcccttccgacgctccccatgcccaccacccgctgcatcctcaccttatgcaggagcatatggggacaaacgttatcgtggccaataccatgcccacacacctgtctaacggacagatgtgcgaatggcctagaccccgcggccaagctgccacccccgagacgcctcagccgagccctcccgggggatccggcagcgaaccctataagctcctgcctggggcggtcgctacaatcgtgaagcccctgtctgccattccgcagcctaccatcacaaaacaggaggttatttgaggactagtccctgttcccagagcccacttttttttctttttttgaaataaaatagcctgtctttcagatctaaaaaaaaaaaaaaaaaaaaaaaaaaaaaaaaaaaaaaaaaaaaaaaaaaaaaaaaaaaaaaaaaaaaaaaaaaaaaaaaaaaaaaaaaaaaaaaaaaaa

SEQ ID NO: 5381 - RNA, 1562 nt, synthetic construct
  misc_feature 1..1562: note = mRNA a-1 (A100) (opt5) from Homo sapiens__NP_000448.3__HNF4A(39-474)(R2V_K5V)
  source 1..1562: mol_type = other RNA
aggagagtcccgcagtcggcgtccagcggctctgcttgttcgtgtgtgtgtcgttgcaggccttattcaagcttaccatggacacatctcctagcgaggggaccaacctcaatgctccgaactccctgggagtgtctgccctttgcgccatctgtggcgatagagctacagggaagcactacggagccagctcctgcgacggctgtaaagggtttttccggcgctctgtgagaaagaatcatatgtatagctgccggttttcccgccaatgtgttgtggataaagacaagagaaaccagtgccggtactgtcgcctgaaaaagtgcttcagagctggaatgaagaaagaagccgtccagaatgagcgggatcgcattagcaccagacggtcttcctatgaagacagctctctcccctccatcaacgcgctgctgcaggccgaggtgctcagccgccaaattacatctcctgtttccggcatcaatggcgatattagagctaagaaaatcgccagcatcgctgacgtgtgtgagtccatgaaggaacagctgcttgtcctggtggagtgggccaaatacattcccgcgttttgcgaactccctctggatgaccaggtggcccttctgcgggctcacgccggggagcatctcctgctgggagctaccaagcgctctatggtcttcaaggacgttctcctgcttggcaacgattatatcgtgcccagacactgtcctgagctggccgaaatgagccgggtgtccattagaatcctcgacgagctggtccttccgtttcaggaactgcaaattgatgacaatgagtacgcctacctcaaagctatcattttctttgatcccgacgcgaaggggctgagcgatcctggaaaaatcaagcgcctgcggtctcaggtgcaggtttccctcgaagactatatcaacgatagacagtacgacagccgcggccggttcggggagctgcttctgctcctgcccacgcttcaatctattacctggcagatgatcgagcagattcaatttatcaaactgttcggaatggccaagattgataatctcctgcaggaaatgctgctcggcggcagcccttccgacgctccccatgcccaccacccgctgcatcctcaccttatgcaggagcatatggggacaaacgtgatcgtcgccaataccatgcccacacacctgtctaacggacagatgtgcgaatggcctagaccccgcggccaagctgccacccccgagacgcctcagccgagccctcccgggggatccggcagcgaaccctataaactcctgcctggggcggtggctacaatcgttaagcccctgtctgccattccgcagcctaccatcacaaagcaggaggtgatttgaggactagtccctgttcccagagcccacttttttttctttttttgaaataaaatagcctgtctttcagatctaaaaaaaaaaaaaaaaaaaaaaaaaaaaaaaaaaaaaaaaaaaaaaaaaaaaaaaaaaaaaaaaaaaaaaaaaaaaaaaaaaaaaaaaaaaaaaaaaaaa

SEQ ID NO: 5382 - RNA, 1562 nt, synthetic construct
  misc_feature 1..1562: note = mRNA a-1 (A100) (opt5) from Homo sapiens__NP_000448.3__HNF4A(39-474)(K179R_K180R)
  source 1..1562: mol_type = other RNA
aggagagtcccgcagtcggcgtccagcggctctgcttgttcgtgtgtgtgtcgttgcaggccttattcaagcttaccatggacacatctcctagcgaggggaccaacctcaatgctccgaactccctgggagtgtctgccctttgcgccatctgtggcgatcgggctacagggaaacactacggagccagctcctgcgacggctgtaaggggtttttccgcagatctgtgcggaaaaatcatatgtatagctgccgcttttccagacaatgtgtcgtggataaggacaaacggaaccagtgccgctactgtagactgaagaagtgcttccgggctggaatgaaaaaggaagccgttcagaatgagcgcgatagaattagcacccggcgcagctcctatgaagacagctctctcccctccatcaacgcgctgctgcaggccgaggtgctcagcagacaaattacatctcctgtctccggcatcaatggcgatattcgggctcgcagaatcgccagcatcgctgacgtgtgtgagtccatgaaagaacagctgcttgttctggtggagtgggccaagtacattcccgcgttttgcgaactccctctggatgaccaggtcgcccttctgcgggctcacgccggggagcatctcctgctgggagctaccaaaagatctatggtgttcaaggacgtgctcctgcttggcaacgattatatcgtcccccgccactgtcctgagctggccgaaatgagccgggtttccattagaatcctcgacgagctggtgcttccgtttcaggaactgcaaattgatgacaatgagtacgcctacctcaaggctatcattttctttgatcccgacgcgaaagggctgagcgatcctggaaagatcaaacgcctgcggtctcaggtgcaggtctccctcgaagactatatcaacgatagacagtacgacagccgcggccggttcggggagctgcttctgctcctgcccacgcttcaatctattacctggcagatgatcgagcagattcaatttatcaagctgttcggaatggccaaaattgataatctcctgcaggaaatgctgctcggcggcagcccttccgacgctccccatgcccaccacccgctgcatcctcaccttatgcaggagcatatggggacaaacgtgatcgttgccaataccatgcccacacacctgtctaacggacagatgtgcgaatggcctagaccccgcggccaagctgccacccccgagacgcctcagccgtctccccctgggggatccggcagcgaaccctataagctcctgcctggggcggtggctacaatcgtcaaacccctgtctgccattccgcagcctaccatcacaaagcaggaggtgatttgaggactagtccctgttcccagagcccacttttttttctttttttgaaataaaatagcctgtctttcagatctaaaaaaaaaaaaaaaaaaaaaaaaaaaaaaaaaaaaaaaaaaaaaaaaaaaaaaaaaaaaaaaaaaaaaaaaaaaaaaaaaaaaaaaaaaaaaaaaaaaa

SEQ ID NO: 5383 - RNA, 1562 nt, synthetic construct
  misc_feature 1..1562: note = mRNA a-1 (A100) (opt5) from Homo sapiens__NP_000448.3__HNF4A(39-474)(K234R)
  source 1..1562: mol_type = other RNA
aggagagtcccgcagtcggcgtccagcggctctgcttgttcgtgtgtgtgtcgttgcaggccttattcaagcttaccatggacacatctcctagcgaggggaccaacctcaatgctccgaactccctgggagtgtctgccctttgcgccatctgtggcgatcgggctacagggaaacactacggagccagctcctgcgacggctgtaaggggtttttccgcagatctgtgcggaaaaatcatatgtatagctgccgcttttccagacaatgtgtcgtggataaggacaaacggaaccagtgccgctactgtagactgaagaagtgcttccgggctggaatgaaaaaggaagccgttcagaatgagcgcgatagaattagcacccggcgcagctcctatgaagacagctctctcccctccatcaacgcgctgctgcaggccgaggtgctcagcagacaaattacatctcctgtctccggcatcaatggcgatattcgggctaaaaagatcgccagcatcgctgacgtgtgtgagtccatgaaagaacagctgcttgttctggtggagtgggccaagtacattcccgcgttttgcgaactccctctggatgaccaggtcgcccttctgcgcgctcacgccggggagcatctcctgctgggagctaccagacggtctatggtgttcaaggacgtgctcctgcttggcaacgattatatcgtccccagacactgtcctgagctggccgaaatgagccgcgtttccattcggatcctcgacgagctggtgcttccgtttcaggaactgcaaattgatgacaatgagtacgcctacctcaaagctatcattttctttgatcccgacgcgaaggggctgagcgatcctggaaaaatcaagagactgcgctctcaggtgcaggtctccctcgaagactatatcaacgatcggcagtacgacagcagaggccgcttcggggagctgcttctgctcctgcccacgcttcaatctattacctggcagatgatcgagcagattcaatttatcaaactgttcggaatggccaagattgataatctcctgcaggaaatgctgctcggcggcagcccttccgacgctccccatgcccaccacccgctgcatcctcaccttatgcaggagcatatggggacaaacgtgatcgttgccaataccatgcccacacacctgtctaacggacagatgtgcgaatggcctcggcccagaggccaagctgccacccccgagacgcctcagccgtctccccctgggggatccggcagcgaaccctataaactcctgcctggggcggtggctacaatcgtcaagcccctgtctgccattccgcagcctaccatcacaaagcaggaggtgatttgaggactagtccctgttcccagagcccacttttttttctttttttgaaataaaatagcctgtctttcagatctaaaaaaaaaaaaaaaaaaaaaaaaaaaaaaaaaaaaaaaaaaaaaaaaaaaaaaaaaaaaaaaaaaaaaaaaaaaaaaaaaaaaaaaaaaaaaaaaaaaa

SEQ ID NO: 5384 - RNA, 1562 nt, synthetic construct
  misc_feature 1..1562: note = mRNA a-1 (A100) (opt5) from Homo sapiens__NP_000448.3__HNF4A(39-474)(K300R)
  source 1..1562: mol_type = other RNA
aggagagtcccgcagtcggcgtccagcggctctgcttgttcgtgtgtgtgtcgttgcaggccttattcaagcttaccatggacacatctcctagcgaggggaccaacctcaatgctccgaactccctgggagtgtctgccctttgcgccatctgtggcgatcgggctacagggaaacactacggagccagctcctgcgacggctgtaaggggtttttccgcagatctgtgcggaaaaatcatatgtatagctgccgcttttccagacaatgtgtcgtggataaggacaaacggaaccagtgccgctactgtagactgaagaagtgcttccgggctggaatgaaaaaggaagccgttcagaatgagcgcgatagaattagcacccggcgcagctcctatgaagacagctctctcccctccatcaacgcgctgctgcaggccgaggtgctcagcagacaaattacatctcctgtctccggcatcaatggcgatattcgggctaaaaagatcgccagcatcgctgacgtgtgtgagtccatgaaagaacagctgcttgttctggtggagtgggccaagtacattcccgcgttttgcgaactccctctggatgaccaggtcgcccttctgcgcgctcacgccggggagcatctcctgctgggagctaccaagagatctatggtgttcaaagacgtgctcctgcttggcaacgattatatcgtcccccggcactgtcctgagctggccgaaatgagcagagtttccattcgcatcctcgacgagctggtgcttccgtttcaggaactgcaaattgatgacaatgagtacgcctacctcaaggctatcattttctttgatcccgacgcgcgggggctgagcgatcctggaaaaatcaagagactgcgctctcaggtgcaggtctccctcgaagactatatcaacgatcggcagtacgacagcagaggccgcttcggggagctgcttctgctcctgcccacgcttcaatctattacctggcagatgatcgagcagattcaatttatcaaactgttcggaatggccaagattgataatctcctgcaggaaatgctgctcggcggcagcccttccgacgctccccatgcccaccacccgctgcatcctcaccttatgcaggagcatatggggacaaacgtgatcgttgccaataccatgcccacacacctgtctaacggacagatgtgcgaatggcctcggcccagaggccaagctgccacccccgagacgcctcagccgtctccccctgggggatccggcagcgaaccctataaactcctgcctggggcggtggctacaatcgtcaagcccctgtctgccattccgcagcctaccatcacaaagcaggaggtgatttgaggactagtccctgttcccagagcccacttttttttctttttttgaaataaaatagcctgtctttcagatctaaaaaaaaaaaaaaaaaaaaaaaaaaaaaaaaaaaaaaaaaaaaaaaaaaaaaaaaaaaaaaaaaaaaaaaaaaaaaaaaaaaaaaaaaaaaaaaaaaaa

SEQ ID NO: 5385 - RNA, 1562 nt, synthetic construct
  misc_feature 1..1562: note = mRNA a-1 (A100) (opt5) from Homo sapiens__NP_000448.3__HNF4A(39-474)(K300R_K307R_K309R)
  source 1..1562: mol_type = other RNA
aggagagtcccgcagtcggcgtccagcggctctgcttgttcgtgtgtgtgtcgttgcaggccttattcaagcttaccatggacacatctcctagcgaggggaccaacctcaatgctccgaactccctgggagtgtctgccctttgcgccatctgtggcgatcgggctacagggaaacactacggagccagctcctgcgacggctgtaaggggtttttccgcagatctgtgcggaaaaatcatatgtatagctgccgcttttccagacaatgtgtcgtggataaggacaaacggaaccagtgccgctactgtagactgaagaagtgcttccgggctggaatgaaaaaggaagccgttcagaatgagcgcgatagaattagcacccggcgcagctcctatgaagacagctctctcccctccatcaacgcgctgctgcaggccgaggtgctcagcagacaaattacatctcctgtctccggcatcaatggcgatattcgggctaaaaagatcgccagcatcgctgacgtgtgtgagtccatgaaagaacagctgcttgttctggtggagtgggccaagtacattcccgcgttttgcgaactccctctggatgaccaggtcgcccttctgcgcgctcacgccggggagcatctcctgctgggagctaccaagagatctatggtgttcaaagacgtgctcctgcttggcaacgattatatcgtcccccggcactgtcctgagctggccgaaatgagcagagtttccattcgcatcctcgacgagctggtgcttccgtttcaggaactgcaaattgatgacaatgagtacgcctacctcaaggctatcattttctttgatcccgacgcgcgggggctgagcgatcctggaagaatccgccggctgagatctcaggtgcaggtctccctcgaagactatatcaacgatcgccagtacgacagccggggcagattcggggagctgcttctgctcctgcccacgcttcaatctattacctggcagatgatcgagcagattcaatttatcaaactgttcggaatggccaagattgataatctcctgcaggaaatgctgctcggcggcagcccttccgacgctccccatgcccaccacccgctgcatcctcaccttatgcaggagcatatggggacaaacgtgatcgttgccaataccatgcccacacacctgtctaacggacagatgtgcgaatggcctcgcccccggggccaagctgccacccccgagacgcctcagccgtctccccctgggggatccggcagcgaaccctataaactcctgcctggggcggtggctacaatcgtcaagcccctgtctgccattccgcagcctaccatcacaaaacaggaggtgatttgaggactagtccctgttcccagagcccacttttttttctttttttgaaataaaatagcctgtctttcagatctaaaaaaaaaaaaaaaaaaaaaaaaaaaaaaaaaaaaaaaaaaaaaaaaaaaaaaaaaaaaaaaaaaaaaaaaaaaaaaaaaaaaaaaaaaaaaaaaaaaa

SEQ ID NO: 5386 - RNA, 1562 nt, synthetic construct
  misc_feature 1..1562: note = mRNA a-1 (A100) (opt5) from Homo sapiens__NP_000448.3__HNF4A(39-474)(K447R_K470R)
  source 1..1562: mol_type = other RNA
aggagagtcccgcagtcggcgtccagcggctctgcttgttcgtgtgtgtgtcgttgcaggccttattcaagcttaccatggacacatctcctagcgaggggaccaacctcaatgctccgaactccctgggagtgtctgccctttgcgccatctgtggcgatcgggctacagggaaacactacggagccagctcctgcgacggctgtaaggggtttttccgcagatctgtgcggaaaaatcatatgtatagctgccgcttttccagacaatgtgtcgtggataaggacaaacggaaccagtgccgctactgtagactgaagaagtgcttccgggctggaatgaaaaaggaagccgttcagaatgagcgcgatagaattagcacccggcgcagctcctatgaagacagctctctcccctccatcaacgcgctgctgcaggccgaggtgctcagcagacaaattacatctcctgtctccggcatcaatggcgatattcgggctaaaaagatcgccagcatcgctgacgtgtgtgagtccatgaaagaacagctgcttgttctggtggagtgggccaagtacattcccgcgttttgcgaactccctctggatgaccaggtcgcccttctgcgcgctcacgccggggagcatctcctgctgggagctaccaagagatctatggtgttcaaagacgtgctcctgcttggcaacgattatatcgtcccccggcactgtcctgagctggccgaaatgagcagagtttccattcgcatcctcgacgagctggtgcttccgtttcaggaactgcaaattgatgacaatgagtacgcctacctcaaggctatcattttctttgatcccgacgcgaaagggctgagcgatcctggaaagatcaaacggctgagatctcaggtgcaggtctccctcgaagactatatcaacgatcgccagtacgacagccggggcagattcggggagctgcttctgctcctgcccacgcttcaatctattacctggcagatgatcgagcagattcaatttatcaagctgttcggaatggccaaaattgataatctcctgcaggaaatgctgctcggcggcagcccttccgacgctccccatgcccaccacccgctgcatcctcaccttatgcaggagcatatggggacaaacgtgatcgttgccaataccatgcccacacacctgtctaacggacagatgtgcgaatggcctcgcccccggggccaagctgccacccccgagacgcctcagccgtctccccctgggggatccggcagcgaaccctatagactcctgcctggggcggtggctacaatcgtcaagcccctgtctgccattccgcagcctaccatcacacgccaggaggtgatttgaggactagtccctgttcccagagcccacttttttttctttttttgaaataaaatagcctgtctttcagatctaaaaaaaaaaaaaaaaaaaaaaaaaaaaaaaaaaaaaaaaaaaaaaaaaaaaaaaaaaaaaaaaaaaaaaaaaaaaaaaaaaaaaaaaaaaaaaaaaaaa

SEQ ID NO: 5387 - RNA, 1562 nt, synthetic construct
  misc_feature 1..1562: note = mRNA a-1 (A100) (opt5) from Homo sapiens__NP_000448.3__HNF4A(39-474)(K458R)
  source 1..1562: mol_type = other RNA
aggagagtcccgcagtcggcgtccagcggctctgcttgttcgtgtgtgtgtcgttgcaggccttattcaagcttaccatggacacatctcctagcgaggggaccaacctcaatgctccgaactccctgggagtgtctgccctttgcgccatctgtggcgatcgggctacagggaaacactacggagccagctcctgcgacggctgtaaggggtttttccgcagatctgtgcggaaaaatcatatgtatagctgccgcttttccagacaatgtgtcgtggataaggacaaacggaaccagtgccgctactgtagactgaagaagtgcttccgggctggaatgaaaaaggaagccgttcagaatgagcgcgatagaattagcacccggcgcagctcctatgaagacagctctctcccctccatcaacgcgctgctgcaggccgaggtgctcagcagacaaattacatctcctgtctccggcatcaatggcgatattcgggctaaaaagatcgccagcatcgctgacgtgtgtgagtccatgaaagaacagctgcttgttctggtggagtgggccaagtacattcccgcgttttgcgaactccctctggatgaccaggtcgcccttctgcgcgctcacgccggggagcatctcctgctgggagctaccaagagatctatggtgttcaaagacgtgctcctgcttggcaacgattatatcgtcccccggcactgtcctgagctggccgaaatgagcagagtttccattcgcatcctcgacgagctggtgcttccgtttcaggaactgcaaattgatgacaatgagtacgcctacctcaaggctatcattttctttgatcccgacgcgaaagggctgagcgatcctggaaagatcaaacggctgagatctcaggtgcaggtctccctcgaagactatatcaacgatcgccagtacgacagccggggcagattcggggagctgcttctgctcctgcccacgcttcaatctattacctggcagatgatcgagcagattcaatttatcaagctgttcggaatggccaaaattgataatctcctgcaggaaatgctgctcggcggcagcccttccgacgctccccatgcccaccacccgctgcatcctcaccttatgcaggagcatatggggacaaacgtgatcgttgccaataccatgcccacacacctgtctaacggacagatgtgcgaatggcctcgcccccggggccaagctgccacccccgagacgcctcagccgtctccccctgggggatccggcagcgaaccctataagctcctgcctggggcggtggctacaatcgtcagacccctgtctgccattccgcagcctaccatcacaaagcaggaggtgatttgaggactagtccctgttcccagagcccacttttttttctttttttgaaataaaatagcctgtctttcagatctaaaaaaaaaaaaaaaaaaaaaaaaaaaaaaaaaaaaaaaaaaaaaaaaaaaaaaaaaaaaaaaaaaaaaaaaaaaaaaaaaaaaaaaaaaaaaaaaaaaa

SEQ ID NO: 5388 - RNA, 1562 nt, synthetic construct
  misc_feature 1..1562: note = mRNA a-1 (A100) (opt5) from Homo sapiens__NP_000448.3__HNF4A(39-474)(K106R_K108R_K126R_K127R )
  source 1..1562: mol_type = other RNA
aggagagtcccgcagtcggcgtccagcggctctgcttgttcgtgtgtgtgtcgttgcaggccttattcaagcttaccatggacacatctcctagcgaggggaccaacctcaatgctccgaactccctgggagtgtctgccctttgcgccatctgtggcgatcgggctacagggaaacactacggagccagctcctgcgacggctgtaaggggtttttccgcagatctgtgcggaaaaatcatatgtatagctgccgcttttccagacaatgtgtcgtggatcgggaccgcagaaaccagtgccggtactgtcgcctgaagaaatgcttcagagctggaatgcggcgcgaagccgttcagaatgagagagatcggattagcacccgcagatcttcctatgaagacagctctctcccctccatcaacgcgctgctgcaggccgaggtgctcagccggcaaattacatctcctgtctccggcatcaatggcgatattagagctaagaagatcgccagcatcgctgacgtgtgtgagtccatgaaagaacagctgcttgttctggtggagtgggccaagtacattcccgcgttttgcgaactccctctggatgaccaggtcgcccttctgcgcgctcacgccggggagcatctcctgctgggagctaccaaacggtctatggtgttcaaggacgtgctcctgcttggcaacgattatatcgtccccagacactgtcctgagctggccgaaatgagccgcgtttccattcggatcctcgacgagctggtgcttccgtttcaggaactgcaaattgatgacaatgagtacgcctacctcaaagctatcattttctttgatcccgacgcgaaggggctgagcgatcctggaaagatcaaaagactgcgctctcaggtgcaggtctccctcgaagactatatcaacgatcggcagtacgacagcagaggccgcttcggggagctgcttctgctcctgcccacgcttcaatctattacctggcagatgatcgagcagattcaatttatcaagctgttcggaatggccaaaattgataatctcctgcaggaaatgctgctcggcggcagcccttccgacgctccccatgcccaccacccgctgcatcctcaccttatgcaggagcatatggggacaaacgtgatcgttgccaataccatgcccacacacctgtctaacggacagatgtgcgaatggcctcggcccagaggccaagctgccacccccgagacgcctcagccgagccctcccgggggatccggcagcgaaccctataagctcctgcctggggcggtggctacaatcgtcaaacccctgtctgccattccgcagcctaccatcacaaagcaggaggtgatttgaggactagtccctgttcccagagcccacttttttttctttttttgaaataaaatagcctgtctttcagatctaaaaaaaaaaaaaaaaaaaaaaaaaaaaaaaaaaaaaaaaaaaaaaaaaaaaaaaaaaaaaaaaaaaaaaaaaaaaaaaaaaaaaaaaaaaaaaaaaaaa

SEQ ID NO: 5389 - RNA, 1562 nt, synthetic construct
  misc_feature 1..1562: note = mRNA a-1 (A100) (opt5) from Homo sapiens__NP_000448.3__HNF4A(39-474)(E285Q)
  source 1..1562: mol_type = other RNA
aggagagtcccgcagtcggcgtccagcggctctgcttgttcgtgtgtgtgtcgttgcaggccttattcaagcttaccatggacacatctcctagcgaggggaccaacctcaatgctccgaactccctgggagtgtctgccctttgcgccatctgtggcgatcgggctacagggaaacactacggagccagctcctgcgacggctgtaaggggtttttccgcagatctgtgcggaaaaatcatatgtatagctgccgcttttccagacaatgtgtcgtggataaggacaaacggaaccagtgccgctactgtagactgaagaagtgcttccgggctggaatgaaaaaggaagccgttcagaatgagcgcgatagaattagcacccggcgcagctcctatgaagacagctctctcccctccatcaacgcgctgctgcaggccgaggtgctcagcagacaaattacatctcctgtctccggcatcaatggcgatattcgggctaaaaagatcgccagcatcgctgacgtgtgtgagtccatgaaagaacagctgcttgttctggtggagtgggccaagtacattcccgcgttttgcgaactccctctggatgaccaggtcgcccttctgcgcgctcacgccggggagcatctcctgctgggagctaccaagagatctatggtgttcaaagacgtgctcctgcttggcaacgattatatcgtcccccggcactgtcctgagctggccgaaatgagcagagtttccattcgcatcctcgacgagctggtgcttccgtttcaggaactgcaaattgatgacaatcagtacgcctacctcaaggctatcattttctttgatcccgacgcgaaagggctgagcgatcctggaaagatcaaacggctgagatctcaggtgcaggtctccctcgaggactatatcaacgatcgccaatacgacagccggggcagattcggggaactgcttctgctcctgcccacgcttcagtctattacctggcagatgatcgagcaaattcagtttatcaagctgttcggaatggccaaaattgataatctcctgcaggagatgctgctcggcggcagcccttccgacgctccccatgcccaccacccgctgcatcctcaccttatgcaggaacatatggggacaaacgtgatcgttgccaataccatgcccacacacctgtctaacggacaaatgtgcgagtggcctcgcccccggggccaggctgccacccccgaaacgcctcagccgtctccccctgggggatccggcagcgagccctataagctcctgcctggggcggtggctacaatcgtcaagcccctgtctgccattccgcagcctaccatcacaaaacaagaagtgatttgaggactagtccctgttcccagagcccacttttttttctttttttgaaataaaatagcctgtctttcagatctaaaaaaaaaaaaaaaaaaaaaaaaaaaaaaaaaaaaaaaaaaaaaaaaaaaaaaaaaaaaaaaaaaaaaaaaaaaaaaaaaaaaaaaaaaaaaaaaaaaa

SEQ ID NO: 5390 - RNA, 1562 nt, synthetic construct
  misc_feature 1..1562: note = mRNA a-1 (A100) (opt5) from Homo sapiens__NP_000448.3__HNF4A(39-474)(T166E)
  source 1..1562: mol_type = other RNA
aggagagtcccgcagtcggcgtccagcggctctgcttgttcgtgtgtgtgtcgttgcaggccttattcaagcttaccatggacacatctcctagcgaggggaccaacctcaatgctccgaactccctgggagtgtctgccctttgcgccatctgtggcgatcgggctacagggaaacactacggagccagctcctgcgacggctgtaaggggtttttccgcagatctgtgcggaaaaatcatatgtatagctgccgcttttccagacaatgtgtcgtggataaggacaaacggaaccagtgccgctactgtagactgaagaagtgcttccgggctggaatgaaaaaggaagccgttcagaatgagcgcgatagaattagcacccggcgcagctcctatgaagacagctctctcccctccatcaacgcgctgctgcaggccgaggtgctcagcagacaaattgagtctcctgtctccggcatcaatggcgatattcgggctaaaaagatcgccagcatcgctgacgtgtgtgaatccatgaaagagcagctgcttgttctggtggaatgggccaagtacattcccgcgttttgcgagctccctctggatgaccaggtcgcccttctgcgcgctcacgccggggagcatctcctgctgggagctacaaagagatctatggtgttcaaagacgtgctcctgcttggcaacgattatatcgtcccccggcactgtcctgaactggccgagatgagcagagtttccattcgcatcctcgacgaactggtgcttccgtttcaggagctgcaaattgatgacaatgaatacgcctacctcaaggctatcattttctttgatcccgacgcgaaagggctgagcgatcctggaaagatcaaacggctgagatctcaggtgcaggtctccctcgaggactatatcaacgatcgccagtacgacagccggggcagattcggggagctgcttctgctcctgcccacccttcaatctattacgtggcagatgatcgaacagattcaatttatcaagctgttcggaatggccaaaattgataatctcctgcaggagatgctgctcggcggcagcccttccgacgctccccatgcccaccacccgctgcatcctcaccttatgcaggaacatatggggaccaacgtgatcgttgccaatacaatgcccacccacctgtctaacggacagatgtgcgagtggcctcgcccccggggccaagctgccacacccgaaacccctcagccgtctccccctgggggatccggcagcgagccctataagctcctgcctggggcggtggctacgatcgtcaagcccctgtctgccattccgcagcctacaatcaccaaacaggaggtgatttgaggactagtccctgttcccagagcccacttttttttctttttttgaaataaaatagcctgtctttcagatctaaaaaaaaaaaaaaaaaaaaaaaaaaaaaaaaaaaaaaaaaaaaaaaaaaaaaaaaaaaaaaaaaaaaaaaaaaaaaaaaaaaaaaaaaaaaaaaaaaaa

SEQ ID NO: 5391 - RNA, 1562 nt, synthetic construct
  misc_feature 1..1562: note = mRNA a-1 (A100) (opt5) from Homo sapiens__NP_000448.3__HNF4A(39-474)(S148A)
  source 1..1562: mol_type = other RNA
aggagagtcccgcagtcggcgtccagcggctctgcttgttcgtgtgtgtgtcgttgcaggccttattcaagcttaccatggacacatctcctagcgaggggaccaacctcaatgctccgaactccctgggagtgtctgccctttgcgccatctgtggcgatcgggctacagggaaacactacggagccagctcctgcgacggctgtaaggggtttttccgcagatctgtgcggaaaaatcatatgtatagctgccgcttttccagacaatgtgtcgtggataaggacaaacggaaccagtgccgctactgtagactgaagaagtgcttccgggctggaatgaaaaaggaagccgttcagaatgagcgcgatagaattagcacccggagatcttcctatgaagacagcgcgctcccctctatcaacgccctgctgcaggctgaggtgctctcccgccaaattacaagccctgtctctggcatcaatggcgatattcgggccaaaaagatcgcttccatcgccgacgtgtgtgagagcatgaaagaacagctgcttgttctggtggagtgggcgaagtacattcccgccttttgcgaactccctctggatgaccaggtcgcccttctgcgcgcccacgctggggagcatctcctgctgggagccaccaagagatccatggtgttcaaagacgtgctcctgcttggcaacgattatatcgtcccccggcactgtcctgagctggccgaaatgtctagagttagcattcgcatcctcgacgagctggtgcttccgtttcaggaactgcaaattgatgacaatgagtacgcttacctcaaggcgatcattttctttgatcccgacgccaaagggctgtccgatcctggaaagatcaaacggctgagaagccaggtgcaggtctctctcgaagactatatcaacgatcgccagtacgactcccggggcagattcggggagctgcttctgctcctgcccacgcttcaaagcattacctggcagatgatcgagcagattcaatttatcaagctgttcggaatggctaaaattgataatctcctgcaggaaatgctgctcggcggctctcctagcgacgctccccatgcccaccacccgctgcatcctcaccttatgcaggagcatatggggacaaacgtgatcgttgctaataccatgcccacacacctgtccaacggacagatgtgcgaatggcctcgcccccggggccaagccgcgacccccgagacgcctcagccgtctccccctgggggaagcggctccgaaccctataagctcctgcctggggctgtggccacaatcgtcaagcccctgagcgccattccgcagcctaccatcacaaaacaggaggtgatttgaggactagtccctgttcccagagcccacttttttttctttttttgaaataaaatagcctgtctttcagatctaaaaaaaaaaaaaaaaaaaaaaaaaaaaaaaaaaaaaaaaaaaaaaaaaaaaaaaaaaaaaaaaaaaaaaaaaaaaaaaaaaaaaaaaaaaaaaaaaaaa

SEQ ID NO: 5392 - RNA, 1562 nt, synthetic construct
  misc_feature 1..1562: note = mRNA a-1 (A100) (opt5) from Homo sapiens__NP_000448.3__HNF4A(39-474)(S148E)
  source 1..1562: mol_type = other RNA
aggagagtcccgcagtcggcgtccagcggctctgcttgttcgtgtgtgtgtcgttgcaggccttattcaagcttaccatggacacatctcctagcgaggggaccaacctcaatgctccgaactccctgggagtgtctgccctttgcgccatctgtggcgatcgggctacagggaaacactacggagccagctcctgcgacggctgtaaggggtttttccgcagatctgtgcggaaaaatcatatgtatagctgccgcttttccagacaatgtgtcgtggataaggacaaacggaaccagtgccgctactgtagactgaagaagtgcttccgggctggaatgaaaaaggaagccgttcagaatgagcgcgatagaattagcacccggagatcttcctatgaagacagcgagctcccctctatcaacgcgctgctgcaggccgaggtgctctcccgccaaattacaagccctgtctctggcatcaatggcgatattcgggctaaaaagatcgcctccatcgctgacgtgtgtgaaagcatgaaagagcagctgcttgttctggtggaatgggccaagtacattcccgcgttttgcgagctccctctggatgaccaggtcgcccttctgcgcgctcacgccggggagcatctcctgctgggagctaccaagagatccatggtgttcaaagacgtgctcctgcttggcaacgattatatcgtcccccggcactgtcctgaactggccgagatgtctagagttagcattcgcatcctcgacgaactggtgcttccgtttcaggagctgcaaattgatgacaatgaatacgcctacctcaaggctatcattttctttgatcccgacgcgaaagggctgtccgatcctggaaagatcaaacggctgagaagccaggtgcaggtctctctcgaggactatatcaacgatcgccagtacgactcccggggcagattcggggagctgcttctgctcctgcccacgcttcaaagcattacctggcagatgatcgaacagattcaatttatcaagctgttcggaatggccaaaattgataatctcctgcaggagatgctgctcggcggctctcctagcgacgctccccatgcccaccacccgctgcatcctcaccttatgcaggaacatatggggacaaacgtgatcgttgccaataccatgcccacacacctgtccaacggacagatgtgcgagtggcctcgcccccggggccaagctgccacccccgaaacgcctcagccgtctccccctgggggaagcggctccgagccctataagctcctgcctggggcggtggctacaatcgtcaagcccctgagcgccattccgcagcctaccatcacaaaacaggaggtgatttgaggactagtccctgttcccagagcccacttttttttctttttttgaaataaaatagcctgtctttcagatctaaaaaaaaaaaaaaaaaaaaaaaaaaaaaaaaaaaaaaaaaaaaaaaaaaaaaaaaaaaaaaaaaaaaaaaaaaaaaaaaaaaaaaaaaaaaaaaaaaaa

SEQ ID NO: 5393 - RNA, 1562 nt, synthetic construct
  misc_feature 1..1562: note = mRNA a-1 (A100) (opt5) from Homo sapiens__NP_000448.3__HNF4A(39-474)(S183A)
  source 1..1562: mol_type = other RNA
aggagagtcccgcagtcggcgtccagcggctctgcttgttcgtgtgtgtgtcgttgcaggccttattcaagcttaccatggacacatctcctagcgaggggaccaacctcaatgctccgaactccctgggagtgtctgccctttgcgccatctgtggcgatcgggctacagggaaacactacggagccagctcctgcgacggctgtaaggggtttttccgcagatctgtgcggaaaaatcatatgtatagctgccgcttttccagacaatgtgtcgtggataaggacaaacggaaccagtgccgctactgtagactgaagaagtgcttccgggctggaatgaaaaaggaagccgttcagaatgagcgcgatagaattagcacccggagatcttcctatgaagacagctctctcccctccatcaacgcgctgctgcaggccgaggtgctcagccgccaaattacatctcctgtctccggcatcaatggcgatattcgggctaaaaagatcgccgctatcgccgacgtgtgtgagagcatgaaagaacagctgcttgttctggtggagtgggcgaagtacattcccgccttttgcgaactccctctggatgaccaggtcgcccttctgcgcgcccacgctggggagcatctcctgctgggagccaccaagagatccatggtgttcaaagacgtgctcctgcttggcaacgattatatcgtcccccggcactgtcctgagctggccgaaatgtctagagttagcattcgcatcctcgacgagctggtgcttccgtttcaggaactgcaaattgatgacaatgagtacgcttacctcaaggcgatcattttctttgatcccgacgccaaagggctgtccgatcctggaaagatcaaacggctgagaagccaggtgcaggtctctctcgaagactatatcaacgatcgccagtacgactcccggggcagattcggggagctgcttctgctcctgcccacgcttcaaagcattacctggcagatgatcgagcagattcaatttatcaagctgttcggaatggctaaaattgataatctcctgcaggaaatgctgctcggcggctctcctagcgacgctccccatgcccaccacccgctgcatcctcaccttatgcaggagcatatggggacaaacgtgatcgttgctaataccatgcccacacacctgtccaacggacagatgtgcgaatggcctcgcccccggggccaagccgcgacccccgagacgcctcagccgtctccccctgggggaagcggctccgaaccctataagctcctgcctggggctgtggccacaatcgtcaagcccctgagcgccattccgcagcctaccatcacaaaacaggaggtgatttgaggactagtccctgttcccagagcccacttttttttctttttttgaaataaaatagcctgtctttcagatctaaaaaaaaaaaaaaaaaaaaaaaaaaaaaaaaaaaaaaaaaaaaaaaaaaaaaaaaaaaaaaaaaaaaaaaaaaaaaaaaaaaaaaaaaaaaaaaaaaaa

SEQ ID NO: 5394 - RNA, 1562 nt, synthetic construct
  misc_feature 1..1562: note = mRNA a-1 (A100) (opt5) from Homo sapiens__NP_000448.3__HNF4A(39-474)(S183E)
  source 1..1562: mol_type = other RNA
aggagagtcccgcagtcggcgtccagcggctctgcttgttcgtgtgtgtgtcgttgcaggccttattcaagcttaccatggacacatctcctagcgaggggaccaacctcaatgctccgaactccctgggagtgtctgccctttgcgccatctgtggcgatcgggctacagggaaacactacggagccagctcctgcgacggctgtaaggggtttttccgcagatctgtgcggaaaaatcatatgtatagctgccgcttttccagacaatgtgtcgtggataaggacaaacggaaccagtgccgctactgtagactgaagaagtgcttccgggctggaatgaaaaaggaagccgttcagaatgagcgcgatagaattagcacccggagatcttcctatgaagacagctctctcccctccatcaacgcgctgctgcaggccgaggtgctcagccgccaaattacatctcctgtctccggcatcaatggcgatattcgggctaaaaagatcgccgagatcgctgacgtgtgtgaaagcatgaaagagcagctgcttgttctggtggaatgggccaagtacattcccgcgttttgcgagctccctctggatgaccaggtcgcccttctgcgcgctcacgccggggagcatctcctgctgggagctaccaagagatccatggtgttcaaagacgtgctcctgcttggcaacgattatatcgtcccccggcactgtcctgaactggccgagatgtctagagttagcattcgcatcctcgacgaactggtgcttccgtttcaggagctgcaaattgatgacaatgaatacgcctacctcaaggctatcattttctttgatcccgacgcgaaagggctgtccgatcctggaaagatcaaacggctgagaagccaggtgcaggtctctctcgaggactatatcaacgatcgccagtacgactcccggggcagattcggggagctgcttctgctcctgcccacgcttcaaagcattacctggcagatgatcgaacagattcaatttatcaagctgttcggaatggccaaaattgataatctcctgcaggagatgctgctcggcggctctcctagcgacgctccccatgcccaccacccgctgcatcctcaccttatgcaggaacatatggggacaaacgtgatcgttgccaataccatgcccacacacctgtccaacggacagatgtgcgagtggcctcgcccccggggccaagctgccacccccgaaacgcctcagccgtctccccctgggggaagcggctccgagccctataagctcctgcctggggcggtggctacaatcgtcaagcccctgagcgccattccgcagcctaccatcacaaaacaggaggtgatttgaggactagtccctgttcccagagcccacttttttttctttttttgaaataaaatagcctgtctttcagatctaaaaaaaaaaaaaaaaaaaaaaaaaaaaaaaaaaaaaaaaaaaaaaaaaaaaaaaaaaaaaaaaaaaaaaaaaaaaaaaaaaaaaaaaaaaaaaaaaaaa

SEQ ID NO: 5395 - RNA, 1562 nt, synthetic construct
  misc_feature 1..1562: note = mRNA a-1 (A100) (opt5) from Homo sapiens__NP_000448.3__HNF4A(39-474)(S461A)
  source 1..1562: mol_type = other RNA
aggagagtcccgcagtcggcgtccagcggctctgcttgttcgtgtgtgtgtcgttgcaggccttattcaagcttaccatggacacatctcctagcgaggggaccaacctcaatgctccgaactccctgggagtgtctgccctttgcgccatctgtggcgatcgggctacagggaaacactacggagccagctcctgcgacggctgtaaggggtttttccgcagatctgtgcggaaaaatcatatgtatagctgccgcttttccagacaatgtgtcgtggataaggacaaacggaaccagtgccgctactgtagactgaagaagtgcttccgggctggaatgaaaaaggaagccgttcagaatgagcgcgatagaattagcacccggcgcagctcctatgaagacagctctctcccctccatcaacgcgctgctgcaggccgaggtgctcagcagacaaattacatctcctgtctccggcatcaatggcgatattcgggctaaaaagatcgccagcatcgctgacgtgtgtgagtccatgaaagaacagctgcttgttctggtggagtgggccaagtacattcccgcgttttgcgaactccctctggatgaccaggtcgcccttctgcgcgctcacgccggggagcatctcctgctgggagctaccaagagatctatggtgttcaaagacgtgctcctgcttggcaacgattatatcgtcccccggcactgtcctgagctggccgaaatgagcagagtttccattcgcatcctcgacgagctggtgcttccgtttcaggaactgcaaattgatgacaatgagtacgcctacctcaaggctatcattttctttgatcccgacgcgaaagggctgagcgatcctggaaagatcaaacggctgagatctcaggtgcaggtctccctcgaagactatatcaacgatcgccagtacgacagccggggcagattcggggagctgcttctgctcctgcccacgcttcaatctattacctggcagatgatcgagcagattcaatttatcaagctgttcggaatggccaaaattgataatctcctgcaggaaatgctgctcggcggcagcccttccgacgctccccatgcccaccacccgctgcatcctcaccttatgcaggagcatatggggacaaacgtgatcgttgccaataccatgcccacacacctgtctaacggacagatgtgcgaatggcctcgcccccggggccaagctgccacccccgagacgcctcagccgtctccccctgggggatccggcagcgaaccctataagctcctgcctggggcggtggctacaatcgtcaagcccctggccgccattccgcagcctaccatcacaaaacaggaggtgatttgaggactagtccctgttcccagagcccacttttttttctttttttgaaataaaatagcctgtctttcagatctaaaaaaaaaaaaaaaaaaaaaaaaaaaaaaaaaaaaaaaaaaaaaaaaaaaaaaaaaaaaaaaaaaaaaaaaaaaaaaaaaaaaaaaaaaaaaaaaaaaa

SEQ ID NO: 5396 - RNA, 1562 nt, synthetic construct
  misc_feature 1..1562: note = mRNA a-1 (A100) (opt5) from Homo sapiens__NP_000448.3__HNF4A(39-474)(S461E)
  source 1..1562: mol_type = other RNA
aggagagtcccgcagtcggcgtccagcggctctgcttgttcgtgtgtgtgtcgttgcaggccttattcaagcttaccatggacacatctcctagcgaggggaccaacctcaatgctccgaactccctgggagtgtctgccctttgcgccatctgtggcgatcgggctacagggaaacactacggagccagctcctgcgacggctgtaaggggtttttccgcagatctgtgcggaaaaatcatatgtatagctgccgcttttccagacaatgtgtcgtggataaggacaaacggaaccagtgccgctactgtagactgaagaagtgcttccgggctggaatgaaaaaggaagccgttcagaatgagcgcgatagaattagcacccggcgcagctcctatgaagacagctctctcccctccatcaacgcgctgctgcaggccgaggtgctcagcagacaaattacatctcctgtctccggcatcaatggcgatattcgggctaaaaagatcgccagcatcgctgacgtgtgtgagtccatgaaagaacagctgcttgttctggtggagtgggccaagtacattcccgcgttttgcgaactccctctggatgaccaggtcgcccttctgcgcgctcacgccggggagcatctcctgctgggagctaccaagagatctatggtgttcaaagacgtgctcctgcttggcaacgattatatcgtcccccggcactgtcctgagctggccgaaatgagcagagtttccattcgcatcctcgacgagctggtgcttccgtttcaggaactgcaaattgatgacaatgagtacgcctacctcaaggctatcattttctttgatcccgacgcgaaagggctgagcgatcctggaaagatcaaacggctgagatctcaggtgcaggtctccctcgaagactatatcaacgatcgccagtacgacagccggggcagattcggggagctgcttctgctcctgcccacgcttcaatctattacctggcagatgatcgagcagattcaatttatcaagctgttcggaatggccaaaattgataatctcctgcaggaaatgctgctcggcggcagcccttccgacgctccccatgcccaccacccgctgcatcctcaccttatgcaggagcatatggggacaaacgtgatcgttgccaataccatgcccacacacctgtctaacggacagatgtgcgaatggcctcgcccccggggccaagctgccacccccgagacgcctcagccgtctccccctgggggatccggcagcgaaccctataagctcctgcctggggcggtggctacaatcgtcaagcccctggaggccattccgcagcctaccatcacaaaacaggaggtgatttgaggactagtccctgttcccagagcccacttttttttctttttttgaaataaaatagcctgtctttcagatctaaaaaaaaaaaaaaaaaaaaaaaaaaaaaaaaaaaaaaaaaaaaaaaaaaaaaaaaaaaaaaaaaaaaaaaaaaaaaaaaaaaaaaaaaaaaaaaaaaaa

SEQ ID NO: 5397 - RNA, 1562 nt, synthetic construct
  misc_feature 1..1562: note = mRNA a-1 (A100) (opt5) from Homo sapiens__NP_000448.3__HNF4A(39-474)(S142A_S143A_S313A)
  source 1..1562: mol_type = other RNA
aggagagtcccgcagtcggcgtccagcggctctgcttgttcgtgtgtgtgtcgttgcaggccttattcaagcttaccatggacacatctcctagcgaggggaccaacctcaatgctccgaactccctgggagtgtctgccctttgcgccatctgtggcgatcgggctacagggaaacactacggagccagctcctgcgacggctgtaaggggtttttccgcagatctgtgcggaaaaatcatatgtatagctgccgcttttccagacaatgtgtcgtggataaggacaaacggaaccagtgccgctactgtagactgaagaagtgcttccgggctggaatgaaaaaggaagccgttcagaatgagcgcgatagaattagcacccggcgcgcggcctatgaagactcttccctccccagcatcaacgctctgctgcaggccgaggtgctctctagacaaattacatcccctgtcagcggcatcaatggcgatattcgggctaaaaagatcgcctctatcgcggacgtgtgtgagtccatgaaagaacagctgcttgttctggtggagtgggccaagtacattcccgctttttgcgaactccctctggatgaccaggtcgcccttctgcgcgctcacgccggggagcatctcctgctgggagccaccaagagaagcatggtgttcaaagacgtgctcctgcttggcaacgattatatcgtcccccggcactgtcctgagctggctgaaatgtccagagtttctattcgcatcctcgacgagctggtgcttccgtttcaggaactgcaaattgatgacaatgagtacgcgtacctcaaggccatcattttctttgatcccgacgctaaagggctgagcgatcctggaaagatcaaacggctgagagcccaggtgcaggtctccctcgaagactatatcaacgatcgccagtacgacagccggggcagattcggggagctgcttctgctcctgcccacgcttcaatctattacctggcagatgatcgagcagattcaatttatcaagctgttcggaatggccaaaattgataatctcctgcaggaaatgctgctcggcggctcccctagcgacgctccccatgcccaccacccgctgcatcctcaccttatgcaggagcatatggggacaaacgtgatcgttgcgaataccatgcccacacacctgtctaacggacagatgtgcgaatggcctcgcccccggggccaagctgccacccccgagacgcctcagccgagccctcccgggggatccggctctgaaccctataagctcctgcctggggccgtggctacaatcgtcaagcccctgagcgccattccgcagcctaccatcacaaaacaggaggtgatttgaggactagtccctgttcccagagcccacttttttttctttttttgaaataaaatagcctgtctttcagatctaaaaaaaaaaaaaaaaaaaaaaaaaaaaaaaaaaaaaaaaaaaaaaaaaaaaaaaaaaaaaaaaaaaaaaaaaaaaaaaaaaaaaaaaaaaaaaaaaaaa

SEQ ID NO: 5398 - RNA, 1562 nt, synthetic construct
  misc_feature 1..1562: note = mRNA a-1 (A100) (opt5) from Homo sapiens__NP_000448.3__HNF4A(39-474)(S142A_S143A_S313A_K458R )
  source 1..1562: mol_type = other RNA
aggagagtcccgcagtcggcgtccagcggctctgcttgttcgtgtgtgtgtcgttgcaggccttattcaagcttaccatggacacatctcctagcgaggggaccaacctcaatgctccgaactccctgggagtgtctgccctttgcgccatctgtggcgatcgggctacagggaaacactacggagccagctcctgcgacggctgtaaggggtttttccgcagatctgtgcggaaaaatcatatgtatagctgccgcttttccagacaatgtgtcgtggataaggacaaacggaaccagtgccgctactgtagactgaagaagtgcttccgggctggaatgaaaaaggaagccgttcagaatgagcgcgatagaattagcacccggcgcgcggcctatgaagactcttccctccccagcatcaacgctctgctgcaggccgaggtgctctctagacaaattacatcccctgtcagcggcatcaatggcgatattcgggctaaaaagatcgcctctatcgcggacgtgtgtgagtccatgaaagaacagctgcttgttctggtggagtgggccaagtacattcccgctttttgcgaactccctctggatgaccaggtcgcccttctgcgcgctcacgccggggagcatctcctgctgggagccaccaagagaagcatggtgttcaaagacgtgctcctgcttggcaacgattatatcgtcccccggcactgtcctgagctggctgaaatgtccagagtttctattcgcatcctcgacgagctggtgcttccgtttcaggaactgcaaattgatgacaatgagtacgcgtacctcaaggccatcattttctttgatcccgacgctaaagggctgagcgatcctggaaagatcaaacggctgagagcccaggtgcaggtctccctcgaagactatatcaacgatcgccagtacgacagccggggcagattcggggagctgcttctgctcctgcccacgcttcaatctattacctggcagatgatcgagcagattcaatttatcaagctgttcggaatggccaaaattgataatctcctgcaggaaatgctgctcggcggctcccctagcgacgctccccatgcccaccacccgctgcatcctcaccttatgcaggagcatatggggacaaacgtgatcgttgcgaataccatgcccacacacctgtctaacggacagatgtgcgaatggcctcgcccccggggccaagctgccacccccgagacgcctcagccgagccctcccgggggatccggctctgaaccctataagctcctgcctggggccgtggctacaatcgtcagacccctgagcgccattccgcagcctaccatcacaaagcaggaggtgatttgaggactagtccctgttcccagagcccacttttttttctttttttgaaataaaatagcctgtctttcagatctaaaaaaaaaaaaaaaaaaaaaaaaaaaaaaaaaaaaaaaaaaaaaaaaaaaaaaaaaaaaaaaaaaaaaaaaaaaaaaaaaaaaaaaaaaaaaaaaaaaa

SEQ ID NO: 5399 - RNA, 1562 nt, synthetic construct
  misc_feature 1..1562: note = mRNA a-1 (A100) (opt5) from Homo sapiens__NP_000448.3__HNF4A(39-474)(S142A_S143A_S167A_S313A _S378A_T429A_T432A_S436A_K458R)
  source 1..1562: mol_type = other RNA
aggagagtcccgcagtcggcgtccagcggctctgcttgttcgtgtgtgtgtcgttgcaggccttattcaagcttaccatggacacatctcctagcgaggggaccaacctcaatgctccgaactccctgggagtgtctgccctttgcgccatctgtggcgatcgggctacagggaaacactacggagccagctcctgcgacggctgtaaggggtttttccgcagatctgtgcggaaaaatcatatgtatagctgccgcttttccagacaatgtgtcgtggataaggacaaacggaaccagtgccgctactgtagactgaagaagtgcttccgggctggaatgaaaaaggaagccgttcagaatgagcgcgatagaattagcacccggcgcgcggcctatgaagactcttccctccccagcatcaacgctctgctgcaggccgaggtgctctctagacaaattacagctcctgtctccggcatcaatggcgatattcgggccaaaaagatcgcgagcatcgccgacgtgtgtgagtctatgaaagaacagctgcttgttctggtggagtgggctaagtacattcccgccttttgcgaactccctctggatgaccaggtcgcccttctgcgcgcccacgccggggagcatctcctgctgggagctaccaagagatccatggtgttcaaagacgtgctcctgcttggcaacgattatatcgtcccccggcactgtcctgagctggcggaaatgagcagagtttccattcgcatcctcgacgagctggtgcttccgtttcaggaactgcaaattgatgacaatgagtacgcctacctcaaggctatcattttctttgatcccgacgccaaagggctgtctgatcctggaaagatcaaacggctgagagcccaggtgcaggtcagcctcgaagactatatcaacgatcgccagtacgactcccggggcagattcggggagctgcttctgctcctgcccacgcttcaaagcattacctggcagatgatcgagcagattcaatttatcaagctgttcggaatggctaaaattgataatctcctgcaggaaatgctgctcggcggcgccccttctgacgcgccccatgctcaccacccgctgcatcctcaccttatgcaggagcatatggggacaaacgtgatcgttgccaataccatgcccacacacctgtccaacggacagatgtgcgaatggcctcgcccccggggccaagccgctgcccccgaggctcctcagccggctccccctgggggaagcggctctgaaccctataagctcctgcctggggcggtggccaccatcgtcagacccctgagcgctattccgcagcctacgatcacaaagcaggaggtgatttgaggactagtccctgttcccagagcccacttttttttctttttttgaaataaaatagcctgtctttcagatctaaaaaaaaaaaaaaaaaaaaaaaaaaaaaaaaaaaaaaaaaaaaaaaaaaaaaaaaaaaaaaaaaaaaaaaaaaaaaaaaaaaaaaaaaaaaaaaaaaaa

SEQ ID NO: 5400 - RNA, 1562 nt, synthetic construct
  misc_feature 1..1562: note = mRNA a-1 (A100) (opt5) from Homo sapiens__NP_000448.3__HNF4A(39-474)(S142A_S143A_S148A_S167A _S313A_S378A_T429A_T432A_S436A_K458R)
  source 1..1562: mol_type = other RNA
aggagagtcccgcagtcggcgtccagcggctctgcttgttcgtgtgtgtgtcgttgcaggccttattcaagcttaccatggacacatctcctagcgaggggaccaacctcaatgctccgaactccctgggagtgtctgccctttgcgccatctgtggcgatcgggctacagggaaacactacggagccagctcctgcgacggctgtaaggggtttttccgcagatctgtgcggaaaaatcatatgtatagctgccgcttttccagacaatgtgtcgtggataaggacaaacggaaccagtgccgctactgtagactgaagaagtgcttccgggctggaatgaaaaaggaagccgttcagaatgagcgcgatagaattagcacccggcgcgcggcctatgaagactctgctctcccctccatcaacgccctgctgcaggctgaggtgctcagcagacaaattacagcccctgtctctggcatcaatggcgatattcgggcgaaaaagatcgcctccatcgctgacgtgtgtgagagcatgaaagaacagctgcttgttctggtggagtgggccaagtacattcccgctttttgcgaactccctctggatgaccaggtcgcccttctgcgcgcccacgctggggagcatctcctgctgggagcgaccaagagatctatggtgttcaaagacgtgctcctgcttggcaacgattatatcgtcccccggcactgtcctgagctggccgaaatgtccagagttagcattcgcatcctcgacgagctggtgcttccgtttcaggaactgcaaattgatgacaatgagtacgcttacctcaaggccatcattttctttgatcccgacgccaaagggctgtccgatcctggaaagatcaaacggctgagagctcaggtgcaggtctctctcgaagactatatcaacgatcgccagtacgacagccggggcagattcggggagctgcttctgctcctgcccacgcttcaatccattacctggcagatgatcgagcagattcaatttatcaagctgttcggaatggccaaaattgataatctcctgcaggaaatgctgctcggcggcgcgcctagcgacgctccccatgcccaccacccgctgcatcctcaccttatgcaggagcatatggggacaaacgtgatcgttgccaataccatgcccacacacctgtctaacggacagatgtgcgaatggcctcgcccccggggccaagctgccgctcccgaggcccctcagccggcgccccctgggggatccggcagcgaaccctataagctcctgcctggggccgtggctaccatcgtcagacccctgtctgccattccgcagcctacgatcacaaagcaggaggtgatttgaggactagtccctgttcccagagcccacttttttttctttttttgaaataaaatagcctgtctttcagatctaaaaaaaaaaaaaaaaaaaaaaaaaaaaaaaaaaaaaaaaaaaaaaaaaaaaaaaaaaaaaaaaaaaaaaaaaaaaaaaaaaaaaaaaaaaaaaaaaaaa

SEQ ID NO: 5401 - RNA, 1562 nt, synthetic construct
  misc_feature 1..1562: note = mRNA a-1 (A100) (opt5) from Homo sapiens__NP_000448.3__HNF4A(39-474)(K106R_K108R_K126R_K127R _S142A_S143A_S148A_S167A_S313A_S378A_T429A_T432A_S436A_K458 R)
  source 1..1562: mol_type = other RNA
aggagagtcccgcagtcggcgtccagcggctctgcttgttcgtgtgtgtgtcgttgcaggccttattcaagcttaccatggacacatctcctagcgaggggaccaacctcaatgctccgaactccctgggagtgtctgccctttgcgccatctgtggcgatcgggctacagggaaacactacggagccagctcctgcgacggctgtaaggggtttttccgcagatctgtgcggaaaaatcatatgtatagctgccgcttttccagacaatgtgtcgtggatcgggaccgcagaaaccagtgccggtactgtcgcctgaagaaatgcttcagagctggaatgcggcgcgaagccgttcagaatgagagagatcggattagcacccgcagagcggcctatgaagactctgctctcccctccatcaacgccctgctgcaggctgaggtgctcagccggcaaattacagcccctgtctctggcatcaatggcgatattagagcgaagaagatcgcctccatcgctgacgtgtgtgagagcatgaaagaacagctgcttgttctggtggagtgggccaagtacattcccgctttttgcgaactccctctggatgaccaggtcgcccttctgcgcgcccacgctggggagcatctcctgctgggagcgaccaaacggtctatggtgttcaaggacgtgctcctgcttggcaacgattatatcgtccccagacactgtcctgagctggccgaaatgtcccgcgttagcattcggatcctcgacgagctggtgcttccgtttcaggaactgcaaattgatgacaatgagtacgcttacctcaaagccatcattttctttgatcccgacgccaaggggctgtccgatcctggaaagatcaaaagactgcgcgctcaggtgcaggtctctctcgaagactatatcaacgatcggcagtacgacagcagaggccgcttcggggagctgcttctgctcctgcccacgcttcaatccattacctggcagatgatcgagcagattcaatttatcaagctgttcggaatggccaaaattgataatctcctgcaggaaatgctgctcggcggcgcgcctagcgacgctccccatgcccaccacccgctgcatcctcaccttatgcaggagcatatggggacaaacgtgatcgttgccaataccatgcccacacacctgtctaacggacagatgtgcgaatggcctcggcccagaggccaagctgccgctcccgaggcccctcagccggcgccccctgggggatccggcagcgaaccctataagctcctgcctggggccgtggctaccatcgtccgccccctgtctgccattccgcagcctacgatcacaaaacaggaggtgatttgaggactagtccctgttcccagagcccacttttttttctttttttgaaataaaatagcctgtctttcagatctaaaaaaaaaaaaaaaaaaaaaaaaaaaaaaaaaaaaaaaaaaaaaaaaaaaaaaaaaaaaaaaaaaaaaaaaaaaaaaaaaaaaaaaaaaaaaaaaaaaa

SEQ ID NO: 5402 - RNA, 1562 nt, synthetic construct
  misc_feature 1..1562: note = mRNA a-1 (A100) (opt5) from Homo sapiens__NP_000448.3__HNF4A(39-474)(S142A_S143A_S148A_T166A _S167A_S313A_S378A_T429A_T432A_S436A_K458R)
  source 1..1562: mol_type = other RNA
aggagagtcccgcagtcggcgtccagcggctctgcttgttcgtgtgtgtgtcgttgcaggccttattcaagcttaccatggacacatctcctagcgaggggaccaacctcaatgctccgaactccctgggagtgtctgccctttgcgccatctgtggcgatcgggctacagggaaacactacggagccagctcctgcgacggctgtaaggggtttttccgcagatctgtgcggaaaaatcatatgtatagctgccgcttttccagacaatgtgtcgtggataaggacaaacggaaccagtgccgctactgtagactgaagaagtgcttccgggctggaatgaaaaaggaagccgttcagaatgagcgcgatagaattagcacccggcgcgcggcctatgaagactctgctctcccctccatcaacgccctgctgcaggctgaggtgctcagcagacaaattgccgcgcctgtctctggcatcaatggcgatattcgggccaaaaagatcgcttccatcgccgacgtgtgtgagagcatgaaagaacagctgcttgttctggtggagtgggctaagtacattcccgccttttgcgaactccctctggatgaccaggtcgcccttctgcgcgctcacgcgggggagcatctcctgctgggagccacaaagagatctatggtgttcaaagacgtgctcctgcttggcaacgattatatcgtcccccggcactgtcctgagctggctgaaatgtccagagttagcattcgcatcctcgacgagctggtgcttccgtttcaggaactgcaaattgatgacaatgagtacgcctacctcaaggccatcattttctttgatcccgacgctaaagggctgtccgatcctggaaagatcaaacggctgagagcccaggtgcaggtctctctcgaagactatatcaacgatcgccagtacgacagccggggcagattcggggagctgcttctgctcctgcccacccttcaatccattacgtggcagatgatcgagcagattcaatttatcaagctgttcggaatggcgaaaattgataatctcctgcaggaaatgctgctcggcggcgctcctagcgacgctccccatgcccaccacccgctgcatcctcaccttatgcaggagcatatggggaccaacgtgatcgttgccaatacaatgcccacccacctgtctaacggacagatgtgcgaatggcctcgcccccggggccaagccgctgcccccgaggcgcctcagccggctccccctgggggatccggcagcgaaccctataagctcctgcctggggccgtggccacaatcgtcagacccctgtctgctattccgcagcctaccatcacgaagcaggaggtgatttgaggactagtccctgttcccagagcccacttttttttctttttttgaaataaaatagcctgtctttcagatctaaaaaaaaaaaaaaaaaaaaaaaaaaaaaaaaaaaaaaaaaaaaaaaaaaaaaaaaaaaaaaaaaaaaaaaaaaaaaaaaaaaaaaaaaaaaaaaaaaaa

SEQ ID NO: 5403 - RNA, 1562 nt, synthetic construct
  misc_feature 1..1562: note = mRNA a-1 (A100) (opt5) from Homo sapiens__NP_000448.3__HNF4A(39-474)(S87A_S142A_S143A_S148A_ T166A_S167A_S313A_S378A_T429A_T432A_S436A_K458R)
  source 1..1562: mol_type = other RNA
aggagagtcccgcagtcggcgtccagcggctctgcttgttcgtgtgtgtgtcgttgcaggccttattcaagcttaccatggacacatctcctagcgaggggaccaacctcaatgctccgaactccctgggagtgtctgccctttgcgccatctgtggcgatcgggctacagggaaacactacggagccagctcctgcgacggctgtaaggggtttttccgcagagctgtgcggaaaaatcatatgtattcttgccgctttagcagacaatgtgtcgtggataaggacaaacggaaccagtgccgctactgtagactgaagaagtgcttccgggccggaatgaaaaaggaagcggttcagaatgagcgcgatagaatttccacccggcgcgccgcttatgaagacagcgccctcccctctatcaacgctctgctgcaggccgaggtgctctccagacaaattgcggcccctgtcagcggcatcaatggcgatattcgggctaaaaagatcgcctctatcgctgacgtgtgtgagtccatgaaagaacagctgcttgttctggtggagtgggccaagtacattcccgccttttgcgaactccctctggatgaccaggtcgcccttctgcgcgcgcacgccggggagcatctcctgctgggagctacaaagagaagcatggtgttcaaagacgtgctcctgcttggcaacgattatatcgtcccccggcactgtcctgagctggccgaaatgtctagagtttccattcgcatcctcgacgagctggtgcttccgtttcaggaactgcaaattgatgacaatgagtacgcctacctcaaggctatcattttctttgatcccgacgccaaagggctgagcgatcctggaaagatcaaacggctgagagctcaggtgcaggtctccctcgaagactatatcaacgatcgccagtacgactctcggggcagattcggggagctgcttctgctcctgcccacccttcaaagcattacgtggcagatgatcgagcagattcaatttatcaagctgttcggaatggcgaaaattgataatctcctgcaggaaatgctgctcggcggcgccccttccgacgctccccatgctcaccacccgctgcatcctcaccttatgcaggagcatatggggaccaacgtgatcgttgccaatacaatgcccacccacctgagcaacggacagatgtgcgaatggcctcgcccccggggccaagctgccgcgcccgaggcccctcagccggctccccctgggggatctggctccgaaccctataagctcctgcctggggccgtggctacaatcgtcagacccctgagcgccattccgcagcctaccatcacgaagcaggaggtgatttgaggactagtccctgttcccagagcccacttttttttctttttttgaaataaaatagcctgtctttcagatctaaaaaaaaaaaaaaaaaaaaaaaaaaaaaaaaaaaaaaaaaaaaaaaaaaaaaaaaaaaaaaaaaaaaaaaaaaaaaaaaaaaaaaaaaaaaaaaaaaaa

SEQ ID NO: 5404 - RNA, 1562 nt, synthetic construct
  misc_feature 1..1562: note = mRNA a-1 (A100) (opt5) from Homo sapiens__NP_000448.3__HNF4A(39-474)(S87A_K106R_K108R_K126R_ K127R_S142A_S143A_S148A_T166A_S167A_S313A_S378A_T429A_T432A _S436A_K458R)
  source 1..1562: mol_type = other RNA
aggagagtcccgcagtcggcgtccagcggctctgcttgttcgtgtgtgtgtcgttgcaggccttattcaagcttaccatggacacatctcctagcgaggggaccaacctcaatgctccgaactccctgggagtgtctgccctttgcgccatctgtggcgatcgggctacagggaaacactacggagccagctcctgcgacggctgtaaggggtttttccgcagagctgtgcggaaaaatcatatgtattcttgccgctttagcagacaatgtgtcgtggatcgggaccgcagaaaccagtgccggtactgtcgcctgaagaaatgcttcagagccggaatgcggcgcgaagcggttcagaatgagagagatcggatttccacccgcagagccgcttatgaagacagcgccctcccctctatcaacgctctgctgcaggccgaggtgctctcccggcaaattgcggcccctgtcagcggcatcaatggcgatattagagctaagaagatcgcctctatcgctgacgtgtgtgagtccatgaaagaacagctgcttgttctggtggagtgggccaagtacattcccgccttttgcgaactccctctggatgaccaggtcgcccttctgcgcgcgcacgccggggagcatctcctgctgggagctacaaaacggagcatggtgttcaaggacgtgctcctgcttggcaacgattatatcgtccccagacactgtcctgagctggccgaaatgtctcgcgtttccattcggatcctcgacgagctggtgcttccgtttcaggaactgcaaattgatgacaatgagtacgcctacctcaaagctatcattttctttgatcccgacgccaaggggctgagcgatcctggaaagatcaaaagactgcgcgctcaggtgcaggtctccctcgaagactatatcaacgatcggcagtacgactctagaggccgcttcggggagctgcttctgctcctgcccacccttcaaagcattacgtggcagatgatcgagcagattcaatttatcaagctgttcggaatggcgaaaattgataatctcctgcaggaaatgctgctcggcggcgccccttccgacgctccccatgctcaccacccgctgcatcctcaccttatgcaggagcatatggggaccaacgtgatcgttgccaatacaatgcccacccacctgagcaacggacagatgtgcgaatggcctcggcccagaggccaagctgccgcgcccgaggcccctcagccggctccccctgggggatctggctccgaaccctataagctcctgcctggggccgtggctacaatcgtccgccccctgagcgccattccgcagcctaccatcacgaaacaggaggtgatttgaggactagtccctgttcccagagcccacttttttttctttttttgaaataaaatagcctgtctttcagatctaaaaaaaaaaaaaaaaaaaaaaaaaaaaaaaaaaaaaaaaaaaaaaaaaaaaaaaaaaaaaaaaaaaaaaaaaaaaaaaaaaaaaaaaaaaaaaaaaaaa

SEQ ID NO: 5405 - RNA, 1562 nt, synthetic construct
  misc_feature 1..1562: note = mRNA a-1 (A100) (opt5) from Homo sapiens__NP_000448.3__HNF4A(39-474)(S87A_K106R_K108R_K126R_ K127R)
  source 1..1562: mol_type = other RNA
aggagagtcccgcagtcggcgtccagcggctctgcttgttcgtgtgtgtgtcgttgcaggccttattcaagcttaccatggacacatctcctagcgaggggaccaacctcaatgctccgaactccctgggagtgtctgccctttgcgccatctgtggcgatcgggctacagggaaacactacggagccagctcctgcgacggctgtaaggggtttttccgcagagctgtgcggaaaaatcatatgtattcttgccgctttagcagacaatgtgtcgtggatcgggaccgcagaaaccagtgccggtactgtcgcctgaagaaatgcttcagagccggaatgcggcgcgaagcggttcagaatgagagagatcggatttccacccgcagaagctcttatgaagactccagcctcccctctatcaacgccctgctgcaggctgaggtgctctcccggcaaattacaagccctgtctctggcatcaatggcgatattagagccaagaagatcgcttccatcgccgacgtgtgtgagagcatgaaagaacagctgcttgttctggtggagtgggcgaagtacattcccgccttttgcgaactccctctggatgaccaggtcgcccttctgcgcgcccacgctggggagcatctcctgctgggagccaccaaacggtccatggtgttcaaggacgtgctcctgcttggcaacgattatatcgtccccagacactgtcctgagctggccgaaatgtctcgcgttagcattcggatcctcgacgagctggtgcttccgtttcaggaactgcaaattgatgacaatgagtacgcttacctcaaagcgatcattttctttgatcccgacgccaaggggctgtccgatcctggaaagatcaaaagactgcgcagccaggtgcaggtctctctcgaagactatatcaacgatcggcagtacgactccagaggccgcttcggggagctgcttctgctcctgcccacgcttcaaagcattacctggcagatgatcgagcagattcaatttatcaagctgttcggaatggctaaaattgataatctcctgcaggaaatgctgctcggcggctctcctagcgacgctccccatgcccaccacccgctgcatcctcaccttatgcaggagcatatggggacaaacgtgatcgttgctaataccatgcccacacacctgtccaacggacagatgtgcgaatggcctcggcccagaggccaagccgcgacccccgagacgcctcagccgtctccccctgggggaagcggctccgaaccctataagctcctgcctggggctgtggccacaatcgtcaaacccctgagcgccattccgcagcctaccatcacaaagcaggaggtgatttgaggactagtccctgttcccagagcccacttttttttctttttttgaaataaaatagcctgtctttcagatctaaaaaaaaaaaaaaaaaaaaaaaaaaaaaaaaaaaaaaaaaaaaaaaaaaaaaaaaaaaaaaaaaaaaaaaaaaaaaaaaaaaaaaaaaaaaaaaaaaaa

SEQ ID NO: 5406 - RNA, 1562 nt, synthetic construct
  misc_feature 1..1562: note = mRNA a-1 (A100) (opt5) from Homo sapiens__NP_000448.3__HNF4A(39-474)(S87A_K106R_K108R_K126R_ K127R_S142A_S143A_S148A_T166A_S167A_S313A_S378A_T429A_T432A _S436A_K458R_S461A)
  source 1..1562: mol_type = other RNA
aggagagtcccgcagtcggcgtccagcggctctgcttgttcgtgtgtgtgtcgttgcaggccttattcaagcttaccatggacacatctcctagcgaggggaccaacctcaatgctccgaactccctgggagtgtctgccctttgcgccatctgtggcgatcgggctacagggaaacactacggagccagctcctgcgacggctgtaaggggtttttccgcagagctgtgcggaaaaatcatatgtattcttgccgctttagcagacaatgtgtcgtggatcgggaccgcagaaaccagtgccggtactgtcgcctgaagaaatgcttcagagccggaatgcggcgcgaagcggttcagaatgagagagatcggatttccacccgcagagccgcttatgaagacagcgccctcccctctatcaacgctctgctgcaggccgaggtgctctcccggcaaattgcggcccctgtcagcggcatcaatggcgatattagagctaagaagatcgcctctatcgctgacgtgtgtgagtccatgaaagaacagctgcttgttctggtggagtgggccaagtacattcccgccttttgcgaactccctctggatgaccaggtcgcccttctgcgcgcgcacgccggggagcatctcctgctgggagctacaaaacggagcatggtgttcaaggacgtgctcctgcttggcaacgattatatcgtccccagacactgtcctgagctggccgaaatgtctcgcgtttccattcggatcctcgacgagctggtgcttccgtttcaggaactgcaaattgatgacaatgagtacgcctacctcaaagctatcattttctttgatcccgacgccaaggggctgagcgatcctggaaagatcaaaagactgcgcgctcaggtgcaggtctccctcgaagactatatcaacgatcggcagtacgactctagaggccgcttcggggagctgcttctgctcctgcccacccttcaaagcattacgtggcagatgatcgagcagattcaatttatcaagctgttcggaatggcgaaaattgataatctcctgcaggaaatgctgctcggcggcgccccttccgacgctccccatgctcaccacccgctgcatcctcaccttatgcaggagcatatggggaccaacgtgatcgttgccaatacaatgcccacccacctgagcaacggacagatgtgcgaatggcctcggcccagaggccaagctgccgcgcccgaggcccctcagccggctccccctgggggatctggctccgaaccctataagctcctgcctggggccgtggctacaatcgtccgccccctggccgcgattccgcagcctaccatcacgaaacaggaggtgatttgaggactagtccctgttcccagagcccacttttttttctttttttgaaataaaatagcctgtctttcagatctaaaaaaaaaaaaaaaaaaaaaaaaaaaaaaaaaaaaaaaaaaaaaaaaaaaaaaaaaaaaaaaaaaaaaaaaaaaaaaaaaaaaaaaaaaaaaaaaaaaa

SEQ ID NO: 5407 - RNA, 1562 nt, synthetic construct
  misc_feature 1..1562: note = mRNA a-1 (A100) (opt5) from Homo sapiens__NP_000448.3__HNF4A(39-474)(S87A_K106R_K108R_K126R_ K127R_S142A_S143A_S148A_T166A_S167A_S313A_S378A_T429A_T432A _S436A_K458R_S461E)
  source 1..1562: mol_type = other RNA
aggagagtcccgcagtcggcgtccagcggctctgcttgttcgtgtgtgtgtcgttgcaggccttattcaagcttaccatggacacatctcctagcgaggggaccaacctcaatgctccgaactccctgggagtgtctgccctttgcgccatctgtggcgatcgggctacagggaaacactacggagccagctcctgcgacggctgtaaggggtttttccgcagagctgtgcggaaaaatcatatgtattcttgccgctttagcagacaatgtgtcgtggatcgggaccgcagaaaccagtgccggtactgtcgcctgaagaaatgcttcagagccggaatgcggcgcgaagcggttcagaatgagagagatcggatttccacccgcagagccgcttatgaagacagcgccctcccctctatcaacgctctgctgcaggccgaggtgctctcccggcaaattgcggcccctgtcagcggcatcaatggcgatattagagctaagaagatcgcctctatcgctgacgtgtgtgagtccatgaaagaacagctgcttgttctggtggagtgggccaagtacattcccgccttttgcgaactccctctggatgaccaggtcgcccttctgcgcgcgcacgccggggagcatctcctgctgggagctacaaaacggagcatggtgttcaaggacgtgctcctgcttggcaacgattatatcgtccccagacactgtcctgagctggccgaaatgtctcgcgtttccattcggatcctcgacgagctggtgcttccgtttcaggaactgcaaattgatgacaatgagtacgcctacctcaaagctatcattttctttgatcccgacgccaaggggctgagcgatcctggaaagatcaaaagactgcgcgctcaggtgcaggtctccctcgaagactatatcaacgatcggcagtacgactctagaggccgcttcggggagctgcttctgctcctgcccacccttcaaagcattacgtggcagatgatcgagcagattcaatttatcaagctgttcggaatggcgaaaattgataatctcctgcaggaaatgctgctcggcggcgccccttccgacgctccccatgctcaccacccgctgcatcctcaccttatgcaggagcatatggggaccaacgtgatcgttgccaatacaatgcccacccacctgagcaacggacagatgtgcgaatggcctcggcccagaggccaagctgccgcgcccgaggcccctcagccggctccccctgggggatctggctccgaaccctataagctcctgcctggggccgtggctacaatcgtccgccccctggaggccattccgcagcctaccatcacgaaacaggaggtgatttgaggactagtccctgttcccagagcccacttttttttctttttttgaaataaaatagcctgtctttcagatctaaaaaaaaaaaaaaaaaaaaaaaaaaaaaaaaaaaaaaaaaaaaaaaaaaaaaaaaaaaaaaaaaaaaaaaaaaaaaaaaaaaaaaaaaaaaaaaaaaaa

SEQ ID NO: 5408 - RNA, 1562 nt, synthetic construct
  misc_feature 1..1562: note = mRNA a-1 (A100) (opt5) from Homo sapiens__NP_000448.3__HNF4A(39-474)(S87A_K106R_K108R_K126R_ K127R_S142A_S143A_S148E_T166A_S167E_S313A_S378E_T429E_T432E _S436E_K458R_S461E)
  source 1..1562: mol_type = other RNA
aggagagtcccgcagtcggcgtccagcggctctgcttgttcgtgtgtgtgtcgttgcaggccttattcaagcttaccatggacacatctcctagcgaggggaccaacctcaatgctccgaactccctgggagtgtctgccctttgcgccatctgtggcgatcgggctacagggaaacactacggagccagctcctgcgacggctgtaaggggtttttccgcagagctgtgcggaaaaatcatatgtattcttgccgctttagcagacaatgtgtcgtggatcgggaccgcagaaaccagtgccggtactgtcgcctgaagaaatgcttcagagccggaatgcggcgcgaagcggttcagaatgagagagatcggatttccacccgcagagccgcttatgaagacagcgagctcccctctatcaacgccctgctgcaggctgaggtgctctcccggcaaattgccgaacctgtcagcggcatcaatggcgatattagagcgaagaagatcgcctctatcgctgacgtgtgtgagtccatgaaagaacagctgcttgttctggtggagtgggccaagtacattcccgctttttgcgagctccctctggatgaccaggtcgcccttctgcgcgcccacgctggggaacatctcctgctgggagcgacaaaacggagcatggtgttcaaggacgtgctcctgcttggcaacgattatatcgtccccagacactgtcctgagctggccgaaatgtctcgcgtttccattcggatcctcgacgagctggtgcttccgtttcaggaactgcaaattgatgacaatgagtacgcttacctcaaagccatcattttctttgatcccgacgccaaggggctgagcgatcctggaaagatcaaaagactgcgcgctcaggtgcaggtctccctcgaggactatatcaacgatcggcagtacgactctagaggccgcttcggggaactgcttctgctcctgcccacccttcaaagcattacgtggcagatgatcgagcagattcaatttatcaagctgttcggaatggccaaaattgataatctcctgcaggaaatgctgctcggcggcgagccttccgacgcgccccatgctcaccacccgctgcatcctcaccttatgcaggaacatatggggaccaacgtgatcgttgccaatacaatgcccacccacctgagcaacggacagatgtgcgagtggcctcggcccagaggccaagccgctgagcccgaggaacctcagccggaaccccctgggggatctggctccgagccctataagctcctgcctggggccgtggctacaatcgtccgccccctggaagccattccgcagcctaccatcacgaaacaggaggtgatttgaggactagtccctgttcccagagcccacttttttttctttttttgaaataaaatagcctgtctttcagatctaaaaaaaaaaaaaaaaaaaaaaaaaaaaaaaaaaaaaaaaaaaaaaaaaaaaaaaaaaaaaaaaaaaaaaaaaaaaaaaaaaaaaaaaaaaaaaaaaaaa

SEQ ID NO: 5409 - RNA, 1562 nt, synthetic construct
  misc_feature 1..1562: note = mRNA a-1 (A100) (opt5) from Homo sapiens__NP_000448.3__HNF4A(39-474)(S87A_K106R_K108R_K126R_ K127R_S142A_S143A_S148A_T166A_S167A_K179R_K180R_S313A_S378A _T429A_T432A_S436A_K458R_S461E)
  source 1..1562: mol_type = other RNA
aggagagtcccgcagtcggcgtccagcggctctgcttgttcgtgtgtgtgtcgttgcaggccttattcaagcttaccatggacacatctcctagcgaggggaccaacctcaatgctccgaactccctgggagtgtctgccctttgcgccatctgtggcgatcgggctacagggaaacactacggagccagctcctgcgacggctgtaaggggtttttccgcagagctgtgcggaaaaatcatatgtattcttgccgctttagcagacaatgtgtcgtggatcgggaccgcagaaaccagtgccggtactgtcgcctgaagaaatgcttcagagccggaatgcggcgcgaagcggttcagaatgagagagatcggatttccacccgcagagccgcttatgaagacagcgccctcccctctatcaacgctctgctgcaggccgaggtgctctcccggcaaattgcggcccctgtcagcggcatcaatggcgatattagagctcgccggatcgcctctatcgctgacgtgtgtgagtccatgaaggaacagctgcttgttctggtggagtgggccaagtacattcccgccttttgcgaactccctctggatgaccaggtcgcccttctgagagcgcacgccggggagcatctcctgctgggagctacaaaacgcagcatggtgttcaaggacgtgctcctgcttggcaacgattatatcgtcccccggcactgtcctgagctggccgaaatgtctagagtttccattcgcatcctcgacgagctggtgcttccgtttcaggaactgcaaattgatgacaatgagtacgcctacctcaaagctatcattttctttgatcccgacgccaaggggctgagcgatcctggaaaaatcaagcggctgagagctcaggtgcaggtctccctcgaagactatatcaacgatcgccagtacgactctcggggcagattcggggagctgcttctgctcctgcccacccttcaaagcattacgtggcagatgatcgagcagattcaatttatcaagctgttcggaatggcgaaaattgataatctcctgcaggaaatgctgctcggcggcgccccttccgacgctccccatgctcaccacccgctgcatcctcaccttatgcaggagcatatggggaccaacgtgatcgttgccaatacaatgcccacccacctgagcaacggacagatgtgcgaatggcctcgcccccggggccaagctgccgcgcccgaggcccctcagccggctccccctgggggatctggctccgaaccctataagctcctgcctggggccgtggctacaatcgtcagacccctggaggccattccgcagcctaccatcacgaaacaggaggtgatttgaggactagtccctgttcccagagcccacttttttttctttttttgaaataaaatagcctgtctttcagatctaaaaaaaaaaaaaaaaaaaaaaaaaaaaaaaaaaaaaaaaaaaaaaaaaaaaaaaaaaaaaaaaaaaaaaaaaaaaaaaaaaaaaaaaaaaaaaaaaaaa

SEQ ID NO: 5410 - RNA, 1562 nt, synthetic construct
  misc_feature 1..1562: note = mRNA a-1 (A100) (opt5) from Homo sapiens__NP_000448.3__HNF4A(39-474)(S87A_K106R_K108R_K126R_ K127R_S142A_S143A_S148A_T166A_S167A_K300R_K307R_K309R_S313A _S378A_T429A_T432A_S436A_K458R_S461E)
  source 1..1562: mol_type = other RNA
aggagagtcccgcagtcggcgtccagcggctctgcttgttcgtgtgtgtgtcgttgcaggccttattcaagcttaccatggacacatctcctagcgaggggaccaacctcaatgctccgaactccctgggagtgtctgccctttgcgccatctgtggcgatcgggctacagggaaacactacggagccagctcctgcgacggctgtaaggggtttttccgcagagctgtgcggaaaaatcatatgtattcttgccgctttagcagacaatgtgtcgtggatcgggaccgcagaaaccagtgccggtactgtcgcctgaagaaatgcttcagagccggaatgcggcgcgaagcggttcagaatgagagagatcggatttccacccgcagagccgcttatgaagacagcgccctcccctctatcaacgctctgctgcaggccgaggtgctctcccggcaaattgcggcccctgtcagcggcatcaatggcgatattagagctaagaagatcgcctctatcgctgacgtgtgtgagtccatgaaagaacagctgcttgttctggtggagtgggccaagtacattcccgccttttgcgaactccctctggatgaccaggtcgcccttctgcgcgcgcacgccggggagcatctcctgctgggagctacaaaacggagcatggtgttcaaggacgtgctcctgcttggcaacgattatatcgtccccagacactgtcctgagctggccgaaatgtctcgcgtttccattcggatcctcgacgagctggtgcttccgtttcaggaactgcaaattgatgacaatgagtacgcctacctcaaagctatcattttctttgatcccgacgccagagggctgagcgatcctggacgcatccggagactgcgcgctcaggtgcaggtctccctcgaagactatatcaacgatcggcagtacgactctagaggccgcttcggggagctgcttctgctcctgcccacccttcaaagcattacgtggcagatgatcgagcagattcaatttatcaagctgttcggaatggcgaagattgataatctcctgcaggaaatgctgctcggcggcgccccttccgacgctccccatgctcaccacccgctgcatcctcaccttatgcaggagcatatggggaccaacgtgatcgttgccaatacaatgcccacccacctgagcaacggacagatgtgcgaatggcctcggcccagaggccaagctgccgcgcccgaggcccctcagccggctccccctgggggatctggctccgaaccctataaactcctgcctggggccgtggctacaatcgtccggcccctggaggccattccgcagcctaccatcacgaagcaggaggtgatttgaggactagtccctgttcccagagcccacttttttttctttttttgaaataaaatagcctgtctttcagatctaaaaaaaaaaaaaaaaaaaaaaaaaaaaaaaaaaaaaaaaaaaaaaaaaaaaaaaaaaaaaaaaaaaaaaaaaaaaaaaaaaaaaaaaaaaaaaaaaaaa

SEQ ID NO: 5411 - RNA, 1562 nt, synthetic construct
  misc_feature 1..1562: note = mRNA a-1 (A100) (opt5) from Homo sapiens__NP_000448.3__HNF4A(39-474)(S87A_K106R_K108R_K126R_ K127R_S142A_S143A_S148A_T166A_S167A_S313A_S378A_T429A_T432A _S436A_K447R_K458R_S461E_K470R)
  source 1..1562: mol_type = other RNA
aggagagtcccgcagtcggcgtccagcggctctgcttgttcgtgtgtgtgtcgttgcaggccttattcaagcttaccatggacacatctcctagcgaggggaccaacctcaatgctccgaactccctgggagtgtctgccctttgcgccatctgtggcgatcgggctacagggaaacactacggagccagctcctgcgacggctgtaaggggtttttccgcagagctgtgcggaaaaatcatatgtattcttgccgctttagcagacaatgtgtcgtggatcgggaccgcagaaaccagtgccggtactgtcgcctgaagaaatgcttcagagccggaatgcggcgcgaagcggttcagaatgagagagatcggatttccacccgcagagccgcttatgaagacagcgccctcccctctatcaacgctctgctgcaggccgaggtgctctcccggcaaattgcggcccctgtcagcggcatcaatggcgatattagagctaagaagatcgcctctatcgctgacgtgtgtgagtccatgaaagaacagctgcttgttctggtggagtgggccaagtacattcccgccttttgcgaactccctctggatgaccaggtcgcccttctgcgcgcgcacgccggggagcatctcctgctgggagctacaaaacggagcatggtgttcaaggacgtgctcctgcttggcaacgattatatcgtccccagacactgtcctgagctggccgaaatgtctcgcgtttccattcggatcctcgacgagctggtgcttccgtttcaggaactgcaaattgatgacaatgagtacgcctacctcaaagctatcattttctttgatcccgacgccaaggggctgagcgatcctggaaagatcaaaagactgcgcgctcaggtgcaggtctccctcgaagactatatcaacgatcggcagtacgactctagaggccgcttcggggagctgcttctgctcctgcccacccttcaaagcattacgtggcagatgatcgagcagattcaatttatcaagctgttcggaatggcgaaaattgataatctcctgcaggaaatgctgctcggcggcgccccttccgacgctccccatgctcaccacccgctgcatcctcaccttatgcaggagcatatggggaccaacgtgatcgttgccaatacaatgcccacccacctgagcaacggacagatgtgcgaatggcctcggcccagaggccaagctgccgcgcccgaggcccctcagccggctccccctgggggatctggctccgaaccctatcgcctcctgcctggggccgtggctacaatcgtccggcccctggaggccattccgcagcctaccatcacgagacaggaggtgatttgaggactagtccctgttcccagagcccacttttttttctttttttgaaataaaatagcctgtctttcagatctaaaaaaaaaaaaaaaaaaaaaaaaaaaaaaaaaaaaaaaaaaaaaaaaaaaaaaaaaaaaaaaaaaaaaaaaaaaaaaaaaaaaaaaaaaaaaaaaaaaa

SEQ ID NO: 5412 - RNA, 1562 nt, synthetic construct
  misc_feature 1..1562: note = mRNA a-1 (A100) (opt5) from Homo sapiens__NP_000448.3__HNF4A(39-474)(S87A_K106R_K108R_K126R_ K127R_S142A_S143A_S148A_T166A_S167A_K179R_K180R_K234R_K300R _K307R_K309R_S313A_S378A_T429A_T432A_S436A_K447R_K458R_S461 E_K470R)
  source 1..1562: mol_type = other RNA
aggagagtcccgcagtcggcgtccagcggctctgcttgttcgtgtgtgtgtcgttgcaggccttattcaagcttaccatggacacatctcctagcgaggggaccaacctcaatgctccgaactccctgggagtgtctgccctttgcgccatctgtggcgatcgggctacagggaaacactacggagccagctcctgcgacggctgtaaggggtttttccgcagagctgtgcggaaaaatcatatgtattcttgccgctttagcagacaatgtgtcgtggatcgggaccgcagaaaccagtgccggtactgtcgcctgaagaaatgcttcagagccggaatgcggcgcgaagcggttcagaatgagagagatcggatttccacccgcagagccgcttatgaagacagcgccctcccctctatcaacgctctgctgcaggccgaggtgctctcccggcaaattgcggcccctgtcagcggcatcaatggcgatattagagctcgccggatcgcctctatcgctgacgtgtgtgagtccatgaaggaacagctgcttgttctggtggagtgggccaagtacattcccgccttttgcgaactccctctggatgaccaggtcgcccttctgagagcgcacgccggggagcatctcctgctgggagctacacgccggagcatggtgttcaaagacgtgctcctgcttggcaacgattatatcgtccccagacactgtcctgagctggccgaaatgtctcgcgtttccattcggatcctcgacgagctggtgcttccgtttcaggaactgcaaattgatgacaatgagtacgcctacctcaaggctatcattttctttgatcccgacgccagagggctgagcgatcctggacgcatccggagactgcgcgctcaggtgcaggtctccctcgaagactatatcaacgatcggcagtacgactctagaggccggttcggggagctgcttctgctcctgcccacccttcaaagcattacgtggcagatgatcgagcagattcaatttatcaaactgttcggaatggcgaagattgataatctcctgcaggaaatgctgctcggcggcgccccttccgacgctccccatgctcaccacccgctgcatcctcaccttatgcaggagcatatggggaccaacgtgatcgttgccaatacaatgcccacccacctgagcaacggacagatgtgcgaatggcctcgccccagaggccaagctgccgcgcccgaggcccctcagccggctccccctgggggatctggctccgaaccctatcggctcctgcctggggccgtggctacaatcgtcagacccctggaggccattccgcagcctaccatcacgcgccaggaggtgatttgaggactagtccctgttcccagagcccacttttttttctttttttgaaataaaatagcctgtctttcagatctaaaaaaaaaaaaaaaaaaaaaaaaaaaaaaaaaaaaaaaaaaaaaaaaaaaaaaaaaaaaaaaaaaaaaaaaaaaaaaaaaaaaaaaaaaaaaaaaaaaa

SEQ ID NO: 5413 - RNA, 1562 nt, synthetic construct
  misc_feature 1..1562: note = mRNA a-1 (A100) (opt5) from Homo sapiens__NP_000448.3__HNF4A(39-474)(S87A_S95A_S99A_K106R_K1 08R_K126R_K127R_S142A_S143A_S148A_T166A_S167A_S313A_S378A_T 429A_T432A_S436A_K458R_S461E)
  source 1..1562: mol_type = other RNA
aggagagtcccgcagtcggcgtccagcggctctgcttgttcgtgtgtgtgtcgttgcaggccttattcaagcttaccatggacacatctcctagcgaggggaccaacctcaatgctccgaactccctgggagtgtctgccctttgcgccatctgtggcgatcgggctacagggaaacactacggagccagctcctgcgacggctgtaaggggtttttccgcagagctgtgcggaaaaatcatatgtatgcctgccgctttgcgagacaatgtgtcgtggatcgggaccgcagaaaccagtgccggtactgtcgcctgaagaaatgcttcagagccggaatgcggcgcgaagctgttcagaatgagagagatcggatttctacccgcagagccgcttatgaagacagcgccctcccctccatcaacgcgctgctgcaggccgaggtgctcagccggcaaattgctgcccctgtctctggcatcaatggcgatattagagctaagaagatcgcctccatcgccgacgtgtgtgagagcatgaaagaacagctgcttgttctggtggagtgggctaagtacattcccgcgttttgcgaactccctctggatgaccaggtcgcccttctgcgcgctcacgccggggagcatctcctgctgggagccacaaaacggtctatggtgttcaaggacgtgctcctgcttggcaacgattatatcgtccccagacactgtcctgagctggctgaaatgtcccgcgttagcattcggatcctcgacgagctggtgcttccgtttcaggaactgcaaattgatgacaatgagtacgcctacctcaaagcgatcattttctttgatcccgacgctaaggggctgtctgatcctggaaagatcaaaagactgcgcgcccaggtgcaggtctccctcgaagactatatcaacgatcggcagtacgacagcagaggccgcttcggggagctgcttctgctcctgcccacccttcaatccattacgtggcagatgatcgagcagattcaatttatcaagctgttcggaatggccaaaattgataatctcctgcaggaaatgctgctcggcggcgctccttctgacgctccccatgcccaccacccgctgcatcctcaccttatgcaggagcatatggggaccaacgtgatcgttgccaatacaatgcccacccacctgagcaacggacagatgtgcgaatggcctcggcccagaggccaagcggccgctcccgaggcccctcagccggctccccctgggggatccggcagcgaaccctataagctcctgcctggggccgtggcgacaatcgtccgccccctggaggccattccgcagcctaccatcacgaaacaggaggtgatttgaggactagtccctgttcccagagcccacttttttttctttttttgaaataaaatagcctgtctttcagatctaaaaaaaaaaaaaaaaaaaaaaaaaaaaaaaaaaaaaaaaaaaaaaaaaaaaaaaaaaaaaaaaaaaaaaaaaaaaaaaaaaaaaaaaaaaaaaaaaaaa

SEQ ID NO: 5414 - RNA, 1562 nt, synthetic construct
  misc_feature 1..1562: note = mRNA a-1 (A100) (opt5) from Homo sapiens__NP_000448.3__HNF4A(39-474)(S87A_K106R_K108R_K126R_ K127R_S138A_T139A_S142A_S143A_S148A_T166A_S167A_S313A_S378A _T429A_T432A_S436A_K458R_S461E)
  source 1..1562: mol_type = other RNA
aggagagtcccgcagtcggcgtccagcggctctgcttgttcgtgtgtgtgtcgttgcaggccttattcaagcttaccatggacacatctcctagcgaggggaccaacctcaatgctccgaactccctgggagtgtctgccctttgcgccatctgtggcgatcgggctacagggaaacactacggagccagctcctgcgacggctgtaaggggtttttccgcagagctgtgcggaaaaatcatatgtattcttgccgctttagcagacaatgtgtcgtggatcgggaccgcagaaaccagtgccggtactgtcgcctgaagaaatgcttcagagccggaatgcggcgcgaagcggttcagaatgagagagatcggattgccgctcgcagagccgcttatgaagactccgccctccccagcatcaacgcgctgctgcaggccgaggtgctctctcggcaaattgctgcccctgtctccggcatcaatggcgatattagagctaagaagatcgccagcatcgccgacgtgtgtgagtctatgaaagaacagctgcttgttctggtggagtgggctaagtacattcccgcgttttgcgaactccctctggatgaccaggtcgcccttctgcgcgctcacgccggggagcatctcctgctgggagccaccaaacggtccatggtgttcaaggacgtgctcctgcttggcaacgattatatcgtccccagacactgtcctgagctggctgaaatgagccgcgtttctattcggatcctcgacgagctggtgcttccgtttcaggaactgcaaattgatgacaatgagtacgcctacctcaaagcgatcattttctttgatcccgacgctaaggggctgtccgatcctggaaagatcaaaagactgcgcgcccaggtgcaggtcagcctcgaagactatatcaacgatcggcagtacgactccagaggccgcttcggggagctgcttctgctcctgcccacacttcaatctattacctggcagatgatcgagcagattcaatttatcaagctgttcggaatggccaaaattgataatctcctgcaggaaatgctgctcggcggcgctcctagcgacgctccccatgcccaccacccgctgcatcctcaccttatgcaggagcatatggggacgaacgtgatcgttgccaataccatgcccacacacctgtccaacggacagatgtgcgaatggcctcggcccagaggccaagcggccgctcccgaggcccctcagccggctccccctgggggaagcggctctgaaccctataagctcctgcctggggccgtggcgaccatcgtccgccccctggaggccattccgcagcctacaatcaccaaacaggaggtgatttgaggactagtccctgttcccagagcccacttttttttctttttttgaaataaaatagcctgtctttcagatctaaaaaaaaaaaaaaaaaaaaaaaaaaaaaaaaaaaaaaaaaaaaaaaaaaaaaaaaaaaaaaaaaaaaaaaaaaaaaaaaaaaaaaaaaaaaaaaaaaaa

SEQ ID NO: 5415 - RNA, 1562 nt, synthetic construct
  misc_feature 1..1562: note = mRNA a-1 (A100) (opt5) from Homo sapiens__NP_000448.3__HNF4A(39-474)(S87A_S95A_S99A_K106R_K1 08R_K126R_K127R_S138A_T139A_S142A_S143A_S148A_T166A_S167A_S 313A_S378A_T429A_T432A_S436A_K458R_S461E)
  source 1..1562: mol_type = other RNA
aggagagtcccgcagtcggcgtccagcggctctgcttgttcgtgtgtgtgtcgttgcaggccttattcaagcttaccatggacacatctcctagcgaggggaccaacctcaatgctccgaactccctgggagtgtctgccctttgcgccatctgtggcgatcgggctacagggaaacactacggagccagctcctgcgacggctgtaaggggtttttccgcagagctgtgcggaaaaatcatatgtatgcctgccgctttgcgagacaatgtgtcgtggatcgggaccgcagaaaccagtgccggtactgtcgcctgaagaaatgcttcagagccggaatgcggcgcgaagctgttcagaatgagagagatcggattgccgctcgcagagccgcgtatgaagactctgccctccccagcatcaacgctctgctgcaggccgaggtgctctcccggcaaattgctgcccctgtcagcggcatcaatggcgatattagagccaagaagatcgcttctatcgcggacgtgtgtgagtccatgaaagaacagctgcttgttctggtggagtgggccaagtacattcccgctttttgcgaactccctctggatgaccaggtcgcccttctgcgcgcccacgctggggagcatctcctgctgggagccaccaaacggagcatggtgttcaaggacgtgctcctgcttggcaacgattatatcgtccccagacactgtcctgagctggcggaaatgtctcgcgtttccattcggatcctcgacgagctggtgcttccgtttcaggaactgcaaattgatgacaatgagtacgcttacctcaaagccatcattttctttgatcccgacgccaaggggctgagcgatcctggaaagatcaaaagactgcgcgctcaggtgcaggtctctctcgaagactatatcaacgatcggcagtacgactccagaggccgcttcggggagctgcttctgctcctgcccacacttcaaagcattacctggcagatgatcgagcagattcaatttatcaagctgttcggaatggccaaaattgataatctcctgcaggaaatgctgctcggcggcgctccttccgacgcgccccatgcccaccacccgctgcatcctcaccttatgcaggagcatatggggacgaacgtgatcgttgccaataccatgcccacacacctgtctaacggacagatgtgcgaatggcctcggcccagaggccaagctgccgctcccgaggcccctcagccggcgccccctgggggaagcggctccgaaccctataagctcctgcctggggccgtggctaccatcgtccgccccctggaggccattccgcagcctacaatcaccaaacaggaggtgatttgaggactagtccctgttcccagagcccacttttttttctttttttgaaataaaatagcctgtctttcagatctaaaaaaaaaaaaaaaaaaaaaaaaaaaaaaaaaaaaaaaaaaaaaaaaaaaaaaaaaaaaaaaaaaaaaaaaaaaaaaaaaaaaaaaaaaaaaaaaaaaa

SEQ ID NO: 5416 - RNA, 1562 nt, synthetic construct
  misc_feature 1..1562: note = mRNA a-1 (A100) (opt11) from Homo sapiens__NP_000448.3__HNF4A(39-474)
  source 1..1562: mol_type = other RNA
aggagagtcccgcagtcggcgtccagcggctctgcttgttcgtgtgtgtgtcgttgcaggccttattcaagcttaccatggacacatcaccctcagaaggtacaaacctcaacgcccccaactcgctaggcgtctccgcactatgcgcaatctgcggcgaccgtgccaccggcaaacactacggagcctcatcctgcgacggttgtaaaggcttcttccgacgcagcgtcagaaaaaaccacatgtactcctgccgcttctcccgtcaatgcgtcgtcgacaaagacaaacgcaaccaatgccggtactgccgcctaaaaaaatgcttccgcgcaggcatgaaaaaagaagcagtccaaaacgaacgcgaccgcatatcaacccgtcgatcatcatacgaagactcctccctccccagcatcaacgccctcctccaagcagaagtactaagccggcaaataacatccccagtcagcggcatcaacggagacatacgagccaaaaaaatagcttcaatcgccgacgtctgcgaatccatgaaagagcaactactggtcctcgtcgaatgggctaaatacatcccggccttctgcgaactccccctcgacgatcaagtcgcccttctaagagcccacgccggcgaacacctcctcttaggcgcaaccaaacgcagcatggtattcaaagacgtactgctcctcggcaacgattacatcgtcccacgacattgccccgagctcgcagaaatgtcccgagtctccatccgcatactcgacgaactcgtactccccttccaagaactccaaatagacgacaatgaatacgcatacctcaaagcaatcatcttcttcgaccccgacgccaaaggactcagcgacccaggcaaaatcaaacgcctacgatcacaagtacaagtttcacttgaagactacatcaacgacagacaatacgactcaagaggtcgtttcggagaactactcctactactaccaaccctccaaagcataacctggcaaatgatagaacaaatacaatttataaaactcttcggcatggccaaaatcgacaatctcctacaagaaatgctcctcggaggaagcccctcagatgccccacacgcccaccacccactacacccccacctcatgcaagagcacatgggtaccaacgtcatagtcgccaacacaatgcccacccacctctcaaacggccaaatgtgcgaatggccgcgcccacgcggacaagccgccacccccgaaaccccacagccaagcccacccggtggctccggcagcgaaccctacaaactcctacccggcgccgttgcaacaatagtcaaacccctatccgccataccccaaccaacgatcaccaaacaagaagtcatctagggactagtccctgttcccagagcccacttttttttctttttttgaaataaaatagcctgtctttcagatctaaaaaaaaaaaaaaaaaaaaaaaaaaaaaaaaaaaaaaaaaaaaaaaaaaaaaaaaaaaaaaaaaaaaaaaaaaaaaaaaaaaaaaaaaaaaaaaaaaaa

SEQ ID NO: 5417 - RNA, 1562 nt, synthetic construct
  misc_feature 1..1562: note = mRNA a-1 (A100) (opt11) from Homo sapiens__NP_000448.3__HNF4A(39-474)(S313A)
  source 1..1562: mol_type = other RNA
aggagagtcccgcagtcggcgtccagcggctctgcttgttcgtgtgtgtgtcgttgcaggccttattcaagcttaccatggatacctccccatctgaaggcaccaacctcaacgcacccaactctctcggagtctccgccctatgcgcaatctgcggcgaccgagccactggaaaacactacggcgcctcctcttgcgacggatgcaaaggcttcttccgaagatcagtccgaaaaaaccacatgtactcatgccgcttctcgcgccaatgcgtcgtcgacaaagacaaacgtaaccaatgcagatactgccgactcaaaaaatgcttccgcgccggcatgaaaaaagaagccgtccagaacgaacgcgaccgcatctcaaccagacgctcgagctacgaagactcctccctaccctccatcaacgccctactccaagcagaagtactatcccgccaaataacctcccccgtcagcggcatcaacggcgacatcagagccaaaaaaatcgcctcaatcgccgacgtatgcgagagcatgaaagaacagctccttgtcctagtagaatgggccaaatacatcccagccttctgcgaactccccctcgacgaccaagtcgccctactcagagcccacgccggcgaacacctcctcctcggcgctaccaagcgatctatggtattcaaggatgtacttctactcggaaacgactacatcgtaccacgccactgcccagaactagccgaaatgtcccgcgtatccatccgaatcctcgatgaactcgtactccccttccaagaactacaaattgacgacaatgaatacgcctacttaaaagccatcatattcttcgaccccgacgccaaaggtctgtccgacccaggcaaaatcaaacgactacgggcccaagtccaagtatcactcgaagactacatcaacgaccgccaatacgactcacgcggccgcttcggcgagctcctcctccttctcccaaccctacaatccataacctggcaaatgatcgaacaaatccaattcataaaactcttcggcatggcaaaaattgacaaccttctccaagaaatgctcctgggcggatccccctccgacgccccacacgcccatcaccccctccacccccacctaatgcaggaacacatgggcacaaatgtcatagtagccaacactatgcccacacatctctcaaacggccagatgtgtgaatggccacgcccacgaggacaagcagccacacccgaaacaccacaaccctcccccccaggcggctccggatccgaaccctacaaactcctacccggcgccgtcgccacaatcgtcaaacccctatccgccatcccccaacccacgatcaccaaacaagaagtcatctaaggactagtccctgttcccagagcccacttttttttctttttttgaaataaaatagcctgtctttcagatctaaaaaaaaaaaaaaaaaaaaaaaaaaaaaaaaaaaaaaaaaaaaaaaaaaaaaaaaaaaaaaaaaaaaaaaaaaaaaaaaaaaaaaaaaaaaaaaaaaaa

SEQ ID NO: 5418 - RNA, 1562 nt, synthetic construct
  misc_feature 1..1562: note = mRNA a-1 (A100) (opt11) from Homo sapiens__NP_000448.3__HNF4A(39-474)(S313E)
  source 1..1562: mol_type = other RNA
aggagagtcccgcagtcggcgtccagcggctctgcttgttcgtgtgtgtgtcgttgcaggccttattcaagcttaccatggacacctccccctcagaaggaaccaacctaaacgctcccaactcccttggcgtctccgccctctgcgcaatatgcggagaccgcgccaccggaaaacactacggcgcctcatcctgcgacggttgcaaaggcttcttccgccgatccgtccgcaaaaaccacatgtattcctgccgcttctcgcgacagtgcgtagtcgacaaagataaacgaaaccaatgccgatactgccgccttaaaaaatgcttccgcgccggaatgaaaaaagaagcagtccaaaacgaacgagaccgcatcagcacccgtaggagctcatacgaggactcgagcctcccctcgatcaacgccttactccaagccgaagtactgtcccgccagatcacctcacccgtctccggcatcaacggagacatcagagccaaaaaaatagcatcgatcgccgacgtatgcgagtccatgaaagaacaactcctagtactagtcgaatgggccaaatacatcccagcattctgcgaactacccctagatgatcaagtagccctactacgagcccacgccggcgaacacctcctcctcggggccaccaaacgatcaatggtcttcaaagacgtcctcctcctcggcaacgactacatcgtaccccgccactgcccagaactcgcagaaatgtcacgcgtctcaatccgcatcctggacgaacttgtactcccattccaagaactacaaatagacgacaacgaatacgcatacctgaaagcaatcatctttttcgaccccgacgccaaaggcctatctgaccccggtaaaataaaacgcctccgcgaacaagtacaagtctctctcgaagactacatcaacgaccgccagtacgacagccggggacgcttcggcgaacttctcctcctcctccccactctacaaagcatcacctggcaaatgatcgaacaaatacaattcatcaaactcttcggaatggcaaaaatcgacaacctcctccaagaaatgctcctcggcggctccccgagcgacgcccctcacgcccaccacccactccacccccacctaatgcaagagcacatgggaaccaacgtcatagtcgcaaacacaatgcccacccacctctccaacggccaaatgtgcgaatggccccgcccacgcggccaagccgccacacccgaaacaccccaaccatcacccccaggcggatcaggatccgagccctacaaactcctcccaggcgccgtcgccacaatcgtcaaacccctcagcgccataccacaaccaacaataacgaaacaagaagtcatataaggactagtccctgttcccagagcccacttttttttctttttttgaaataaaatagcctgtctttcagatctaaaaaaaaaaaaaaaaaaaaaaaaaaaaaaaaaaaaaaaaaaaaaaaaaaaaaaaaaaaaaaaaaaaaaaaaaaaaaaaaaaaaaaaaaaaaaaaaaaaa

SEQ ID NO: 5419 - RNA, 1562 nt, synthetic construct
  misc_feature 1..1562: note = mRNA a-1 (A100) (opt11) from Homo sapiens__NP_000448.3__HNF4A(39-474)(S142A_S143A)
  source 1..1562: mol_type = other RNA
aggagagtcccgcagtcggcgtccagcggctctgcttgttcgtgtgtgtgtcgttgcaggccttattcaagcttaccatggacacctccccctccgaaggcaccaacttaaacgcccccaactcccttggggtctccgctctctgcgcaatctgcggagacagagccaccggtaaacactacggagcctcctcctgcgacggatgcaaaggcttcttccgccgctcagtacgcaaaaaccacatgtatagttgccgcttctctcgccagtgcgtggtcgacaaagacaaacgcaaccaatgccgatactgccgcctcaaaaagtgcttccgcgccggaatgaagaaagaagctgtccaaaacgaacgcgaccgcatctcaacccgcagagcggcatacgaagacagctcgctaccctccataaacgccctccttcaagccgaagtcctatcccgacagatcacctcccccgtctctggaataaacggcgacatccgcgcaaagaaaatcgcctccatcgccgacgtatgcgaatccatgaaagaacaactcctagtgctagtagaatgggccaaatacatacccgccttctgcgagctccccctagacgaccaagtagccctactccgcgcacacgcaggcgaacacctcctcctcggcgccaccaaacgatcaatggtcttcaaagacgtactactcctcggcaatgactacatcgtcccacgacactgccccgaattagcagaaatgtcgcgagtctccatacgcatcctagacgaactcgtactccctttccaagaactacaaatcgatgacaacgaatacgcatacctcaaagccatcatcttcttcgacccagacgccaaaggcctttccgatcccggcaaaatcaaaagactacgctcacaagtacaagtctccctcgaagattacatcaacgaccgccaatacgactcacgcggccgcttcggagaactcctactactcctcccaaccctacaatccatcacctggcaaatgatcgaacaaatccagttcattaaactcttcggaatggccaaaatcgataacctcctacaagaaatgctcctaggcggcagtccatccgacgcgccccacgcacaccatccactccacccccacctcatgcaagaacacatgggcaccaacgtaatcgtcgcaaacaccatgcccacacacctttcaaacggccaaatgtgcgaatggccgcgcccccgcggccaagcagccaccccagaaaccccacaaccatcacccccaggcggcagcggctcagaaccctataaactcctccccggcgccgtagccacaatcgtcaaacctctctccgcaatcccccaacccaccatcaccaaacaagaagtcatctaaggactagtccctgttcccagagcccacttttttttctttttttgaaataaaatagcctgtctttcagatctaaaaaaaaaaaaaaaaaaaaaaaaaaaaaaaaaaaaaaaaaaaaaaaaaaaaaaaaaaaaaaaaaaaaaaaaaaaaaaaaaaaaaaaaaaaaaaaaaaaa

SEQ ID NO: 5420 - RNA, 1562 nt, synthetic construct
  misc_feature 1..1562: note = mRNA a-1 (A100) (opt11) from Homo sapiens__NP_000448.3__HNF4A(39-474)(S142E_S143E)
  source 1..1562: mol_type = other RNA
aggagagtcccgcagtcggcgtccagcggctctgcttgttcgtgtgtgtgtcgttgcaggccttattcaagcttaccatggacaccagcccgtccgaaggcacaaacctcaacgcccccaactcccttggtgtctcagccctctgcgcaatctgcggcgaccgtgccaccggtaaacactatggcgcctcatcctgcgacggctgcaaaggcttcttcagacgatcggtacgcaaaaaccacatgtactcatgtcgcttctcccgacaatgtgtagtggacaaagacaaaagaaaccaatgccgctactgccgcctcaaaaaatgcttccgcgcaggcatgaaaaaagaagccgtccagaatgaacgagaccgcataagcacccgccgagaagaatatgaagactcctcacttccctcaatcaacgccctactccaagccgaagtactatcacggcaaatcacaagccccgtctcaggaataaacggagacatccgcgccaaaaaaattgcctccatcgcggacgtatgcgaaagcatgaaagaacaactactcgtactcgtcgaatgggcaaaatacatccccgcattctgcgaactccccctcgacgaccaagtagccctgctcagagcacacgccggagaacaccttctcctcggcgccaccaaacgctccatggtcttcaaagacgtcctcctcctagggaacgactacatagtaccacgacactgcccagaactagccgaaatgtccagagtatcaatccgaatcctcgacgaactcgtcctccccttccaagaactacaaatcgacgacaacgaatacgcctacctaaaagccatcatattcttcgatcccgacgcaaaaggcctctccgaccccggcaaaatcaagcgactacgatcacaagtacaagtctccctggaagactacatcaacgaccgccaatacgacagccgcggaagattcggcgaactcctgctactactccccaccctacaatccatcacctggcaaatgatagaacaaatacaattcatcaaactcttcggcatggctaaaatcgacaacctcctacaagaaatgctactaggcggcagcccctcagacgccccccacgcccaccaccccctccacccccacctcatgcaggaacacatgggcaccaacgtcatcgtcgccaacacaatgcccacccatctctccaacggccaaatgtgcgaatggcctaggccacgtggtcaagcagcaacccccgaaaccccccaaccctccccaccaggcggttcaggatccgaaccctacaaactactcccaggcgccgtagccaccattgtcaagccgctcagcgctataccccaacccaccataaccaaacaagaagtcatataaggactagtccctgttcccagagcccacttttttttctttttttgaaataaaatagcctgtctttcagatctaaaaaaaaaaaaaaaaaaaaaaaaaaaaaaaaaaaaaaaaaaaaaaaaaaaaaaaaaaaaaaaaaaaaaaaaaaaaaaaaaaaaaaaaaaaaaaaaaaaa

SEQ ID NO: 5421 - RNA, 1562 nt, synthetic construct
  misc_feature 1..1562: note = mRNA a-1 (A100) (opt11) from Homo sapiens__NP_000448.3__HNF4A(39-474)(S143A)
  source 1..1562: mol_type = other RNA
aggagagtcccgcagtcggcgtccagcggctctgcttgttcgtgtgtgtgtcgttgcaggccttattcaagcttaccatggacacctcaccatcagaaggcaccaacctcaacgcccccaactccctcggagtctcagccctctgcgcaatctgcggcgaccgcgccaccggcaaacactacggagcctcgtcctgcgacggatgcaaaggattcttcaggcgctccgtacggaaaaaccacatgtactcttgtcgtttctcccgccaatgcgtagtcgacaaagacaaacgcaaccaatgccgctactgtcgcctcaaaaaatgcttccgcgccggcatgaagaaagaagccgtccaaaacgaacgcgaccgcatctccacccgcaggtccgcctacgaagactccagcctaccctccatcaacgcactactccaagccgaagtcctctcccgccaaatcacgtctcccgtctcaggaatcaacggcgacatccgcgctaagaaaatagcatctatcgccgacgtctgtgaatccatgaaagaacaactactcgtactggtagaatgggccaaatacatccccgccttctgcgaacttcccctcgacgaccaagttgcactcctccgagcccacgccggggaacacctactcctcggagccaccaaacgctcaatggtcttcaaagacgtactcctcctcggcaacgactacatcgtgccacgccactgccccgaactagccgaaatgtcccgggtctccattcgaatcctcgacgaactcgtcctccccttccaagaactccaaatagacgacaacgaatacgcttacctcaaagcaataatcttcttcgacccagatgccaaaggcctcagcgacccgggcaagattaaacgcctccgctctcaagtccaagtctcccttgaagactacatcaacgaccgccaatacgactcccgcggtcgattcggggaactactcctactcctcccaacactacaatccatcacctggcaaatgatcgaacaaatccaattcatcaaactcttcggcatggccaaaatcgacaacctcctacaggaaatgctcctaggaggcagcccctccgacgccccccacgcccaccaccccctccacccccacctaatgcaagaacatatgggaaccaacgtaatcgtcgcaaacacaatgcccacccacctctccaacggccaaatgtgcgaatggccccgcccccgcggtcaagcagccacacccgaaacccctcaaccctccccgcccggaggcagcggctccgaaccatacaaactcctcccaggcgccgtagccaccatcgtaaaacccctatcggccataccccaacccacaatcaccaaacaagaagtaatctaaggactagtccctgttcccagagcccacttttttttctttttttgaaataaaatagcctgtctttcagatctaaaaaaaaaaaaaaaaaaaaaaaaaaaaaaaaaaaaaaaaaaaaaaaaaaaaaaaaaaaaaaaaaaaaaaaaaaaaaaaaaaaaaaaaaaaaaaaaaaaa

SEQ ID NO: 5422 - RNA, 1562 nt, synthetic construct
  misc_feature 1..1562: note = mRNA a-1 (A100) (opt11) from Homo sapiens__NP_000448.3__HNF4A(39-474)(T166A)
  source 1..1562: mol_type = other RNA
aggagagtcccgcagtcggcgtccagcggctctgcttgttcgtgtgtgtgtcgttgcaggccttattcaagcttaccatggacacttccccctcagaaggcacaaacctcaacgcacccaactccctaggagtctccgccctatgcgcgatctgtggcgaccgagcaaccggcaagcattacggcgcatcctcctgcgacggatgcaaaggcttcttccgccgatccgtccgaaagaaccacatgtactcctgccgattctcccgccaatgcgtagttgacaaagacaaacgcaatcaatgccgatactgccgcctcaagaaatgcttccgagcaggaatgaagaaagaagccgtccaaaacgaacgcgatcgcatatccacccgccgctcctcctacgaagactcctccctcccctccatcaacgcactcctccaagcggaagtactctcacgccaaatcgcgtccccagtctccggcataaacggagacatccgcgccaagaaaatagcctcaatcgctgacgtctgcgaatctatgaaagaacagctcctcgtcctagtcgaatgggccaaatacatccccgccttctgcgaactcccactagacgaccaagtggcactcctccgcgcccacgccggcgaacacctactactcggagccaccaaacgctccatggtgttcaaagacgtactactcctcggaaatgactacatcgtcccccgacactgccccgaactcgccgaaatgtccagggtctccatccgcatcctcgacgaactggtcctcccattccaagaactccaaatcgacgacaacgaatacgcctacctaaaagccatcatcttcttcgaccccgacgccaaaggcctatccgacccgggcaaaatcaaacgactccgctcccaagtccaagtctcactcgaagactacatcaacgatagacagtacgactcacgcggtagattcggagaactcctactcctactccccacactccaatccataacctggcaaatgatagaacaaatacaattcatcaaactcttcggcatggccaaaatcgacaacctactccaggaaatgctcttaggcggctccccatccgacgccccacacgcccaccaccccctccacccccacctcatgcaagaacacatgggcaccaatgtcatagtagcaaacaccatgcccacacacctctccaacggacaaatgtgcgaatggccccgcccacgcggtcaggccgccacccccgaaaccccacaaccctccccacccggaggctccggatcagaaccctacaaactcctccccggcgccgtcgcaaccatcgttaaaccactatccgccataccccaacccaccatcaccaaacaagaggtcatataaggactagtccctgttcccagagcccacttttttttctttttttgaaataaaatagcctgtctttcagatctaaaaaaaaaaaaaaaaaaaaaaaaaaaaaaaaaaaaaaaaaaaaaaaaaaaaaaaaaaaaaaaaaaaaaaaaaaaaaaaaaaaaaaaaaaaaaaaaaaaa

SEQ ID NO: 5423 - RNA, 1562 nt, synthetic construct
  misc_feature 1..1562: note = mRNA a-1 (A100) (opt11) from Homo sapiens__NP_000448.3__HNF4A(39-474)(S167E)
  source 1..1562: mol_type = other RNA
aggagagtcccgcagtcggcgtccagcggctctgcttgttcgtgtgtgtgtcgttgcaggccttattcaagcttaccatggacacctccccctctgaaggcaccaacctcaacgcacccaacagccttggcgtcagcgccttatgcgccatttgcggagaccgcgccaccggcaaacactacggagcatcctcatgcgacggctgcaaaggcttcttccgccgatcagtccgaaaaaaccacatgtactcctgccgcttctctcgccagtgcgtagtcgataaagataaaagaaatcaatgccgctactgccgcctcaaaaaatgcttccgcgccggcatgaaaaaagaagcagttcaaaacgaacgcgaccgaatctccacccgccgctcatcctacgaagactcttccctcccctctataaacgccctcctccaagccgaagtactctcacgccaaatcaccgaacctgtctccggcattaacggagacatacgcgccaagaaaatagccagcatcgccgacgtctgcgaatcaatgaaagaacaactcctcgtcctagtcgaatgggccaaatacatccccgcattctgcgaacttcccctcgacgaccaagtcgccctcctccgtgcccatgcaggcgaacacctcctcctcggcgccaccaaacgctccatggtctttaaagacgtcctcctcctgggcaacgactacatcgtcccccgacactgcccagaactcgccgagatgagccgcgtgtccatacgcatactcgacgaactcgtcctccccttccaagaactccagatagacgataacgaatacgcatacctaaaagccataatattcttcgaccccgacgctaaaggtctctcagacccaggaaaaatcaaacgtctcagaagccaagtccaagtctcactcgaagactacatcaacgaccgccaatacgactctcgcggccgcttcggcgaactcctcttattactcccaacactccaatcaatcacctggcaaatgatcgaacaaatacaatttatcaaactcttcggcatggctaaaatcgacaatctcctccaagaaatgctcctcggaggctccccctcagatgccccccacgcccaccacccccttcatccccacttaatgcaagaacatatgggcaccaacgtcatcgtagccaacaccatgcccacacacctatccaacggccaaatgtgcgaatggccccgcccccgaggacaagccgccaccccagaaacaccccaaccctccccccccggaggcagcggctccgaaccatacaaactcctcccaggtgccgtcgccactatcgtcaaacccctctcagccatcccccaaccaaccatcacaaagcaagaagtcatctaaggactagtccctgttcccagagcccacttttttttctttttttgaaataaaatagcctgtctttcagatctaaaaaaaaaaaaaaaaaaaaaaaaaaaaaaaaaaaaaaaaaaaaaaaaaaaaaaaaaaaaaaaaaaaaaaaaaaaaaaaaaaaaaaaaaaaaaaaaaaaa

SEQ ID NO: 5424 - RNA, 1562 nt, synthetic construct
  misc_feature 1..1562: note = mRNA a-1 (A100) (opt11) from Homo sapiens__NP_000448.3__HNF4A(39-474)(S167A)
  source 1..1562: mol_type = other RNA
aggagagtcccgcagtcggcgtccagcggctctgcttgttcgtgtgtgtgtcgttgcaggccttattcaagcttaccatggacacctcaccctccgaaggtaccaacctcaacgcgcccaactccctcggcgtctcagccctctgcgccatctgcggcgaccgcgcgaccggcaaacactacggtgcctcctcatgcgacggatgcaaaggcttcttccgacgctcagtccgcaaaaaccacatgtactcctgccgcttctcacgacaatgcgtcgttgacaaagacaaacgcaaccaatgccgctactgccgcctcaaaaaatgcttccgcgcaggaatgaaaaaagaagcagttcaaaacgaacgcgaccgcatctcaacccgcagatcatcatacgaagactcatccctaccatcaataaacgccctcctacaagccgaagtcctctccagacaaatcaccgcccccgtctcaggcataaacggcgacatccgtgcaaaaaaaatcgcctccatcgctgacgtctgcgaatccatgaaagaacaactccttgtcctcgtcgaatgggccaaatacattcctgccttctgcgaactccccctcgacgaccaagtcgcactactcagagcccacgcaggcgaacacctcctcctcggagcaacaaaacgctccatggtcttcaaagacgtcctcctactcggaaatgactacatcgtccccagacactgccccgaactcgctgaaatgtcaagagtctccatacgaatactagacgaactagtcctacccttccaagaactgcaaatagacgacaacgaatacgcctacctcaaagccatcatattcttcgaccccgacgccaagggactctcagaccccggcaaaatcaaacgcctacgctcccaagtgcaagtcagcctcgaagactacataaacgatcgccagtacgactcacgaggacgattcggagaactcctcctcctcctcccaacactccagtccatcacctggcaaatgatcgaacaaatccaatttatcaaactcttcggcatggccaaaatcgacaacctactacaagaaatgctcctcggaggatccccctcagacgccccccacgcccaccaccctctccacccccacctaatgcaagaacacatggggaccaacgtaatcgtcgccaataccatgccaactcatctatcaaacggtcaaatgtgcgaatggccccgcccccggggacaagccgccacccccgagacaccgcaaccctccccccctggcggatccggctcagaaccctataaactactccccggcgcggtcgccaccatagtcaaaccactctctgccatcccccaaccaaccataaccaaacaagaagtcatctaaggactagtccctgttcccagagcccacttttttttctttttttgaaataaaatagcctgtctttcagatctaaaaaaaaaaaaaaaaaaaaaaaaaaaaaaaaaaaaaaaaaaaaaaaaaaaaaaaaaaaaaaaaaaaaaaaaaaaaaaaaaaaaaaaaaaaaaaaaaaaa

SEQ ID NO: 5425 - RNA, 1562 nt, synthetic construct
  misc_feature 1..1562: note = mRNA a-1 (A100) (opt11) from Homo sapiens__NP_000448.3__HNF4A(39-474)(S167A_S378A_T429A_T432A _S436A)
  source 1..1562: mol_type = other RNA
aggagagtcccgcagtcggcgtccagcggctctgcttgttcgtgtgtgtgtcgttgcaggccttattcaagcttaccatggacacaagcccctccgaaggcacaaatctcaacgcccccaactcactaggcgtctcagccctatgtgctatctgcggcgaccgcgccaccggcaaacactacggcgcatcatcatgtgacggatgcaaaggattcttccgacgctccgtccgaaagaaccacatgtactcctgccgattcagcagacaatgtgttgtcgacaaagacaaacgcaaccaatgtcgctactgccgcctcaaaaaatgctttagagccggaatgaaaaaagaagccgtccaaaacgaacgcgaccgcatctccacacgccgaagctcatacgaagactcatctctcccctccatcaacgcactcctccaagccgaagtcctatctcgccaaatcaccgcacccgtctccggcatcaacggcgacatacgcgccaaaaaaatagcctccatagcagacgtatgcgaatccatgaaagagcaactcctcgtgctagtcgaatgggccaaatacatccccgccttctgcgagctcccactagacgaccaagtcgccctcctccgcgcccacgccggcgaacacctgctcctaggcgccaccaaaagaagcatggtattcaaagacgtcctactcctcggcaacgactatatagtccctcgccactgtccagaactcgcagaaatgtccagagtcagcatccgaatcctcgacgaactcgtcctacccttccaagaactacaaatcgacgacaacgaatacgcctaccttaaagccatcatcttcttcgaccccgacgccaaaggcctatccgaccccggcaaaatcaaacgcttacgatcccaagtccaggtcagcctcgaagactacataaacgaccgccaatacgactcacgcggccgcttcggcgaactactcctcctcctcccaaccctccaaagcatcacctggcaaatgatagaacaaatacaattcatcaaacttttcggcatggccaaaatcgacaaccttttacaagaaatgctactcggtggcgcgcccagcgacgctccgcacgcccaccaccccctccacccacacctcatgcaggaacacatgggcaccaacgtaatagtcgccaacacaatgccaacccacctctcaaacggccagatgtgcgaatggccccgaccccgaggccaagccgcagccccagaagccccccaaccagcccccccaggaggatccggctcagaaccctataaactcttacccggtgccgtcgcgaccattgtcaaacccctctccgccataccccagcccacaatcaccaaacaagaagtcatctaaggactagtccctgttcccagagcccacttttttttctttttttgaaataaaatagcctgtctttcagatctaaaaaaaaaaaaaaaaaaaaaaaaaaaaaaaaaaaaaaaaaaaaaaaaaaaaaaaaaaaaaaaaaaaaaaaaaaaaaaaaaaaaaaaaaaaaaaaaaaaa

SEQ ID NO: 5426 - RNA, 1562 nt, synthetic construct
  misc_feature 1..1562: note = mRNA a-1 (A100) (opt11) from Homo sapiens__NP_000448.3__HNF4A(39-474)(S167E_S378E_T429E_T432E _S436E)
  source 1..1562: mol_type = other RNA
aggagagtcccgcagtcggcgtccagcggctctgcttgttcgtgtgtgtgtcgttgcaggccttattcaagcttaccatggacacctccccctcagaaggcaccaacctcaacgctccaaactccctaggggtctccgcactctgcgcaatctgcggcgaccgtgccaccggcaaacattacggcgcctcatcctgcgacggctgcaaaggattcttccggcgatccgtccgaaagaaccacatgtacagctgcagattcagccgacaatgcgtcgtggacaaagataaacgcaaccaatgccgctactgccgactcaagaaatgcttccgcgcaggcatgaagaaagaagcagtacaaaacgaacgcgaccgcatctcaacaagacgtagctcctacgaagactcaagcctcccatccatcaacgccctcctccaagccgaagtactctcacgtcaaatcaccgaacccgtgtcaggaatcaacggcgacatccgcgccaagaaaatcgcctccatcgcagacgtctgcgaatccatgaaagaacaactcctcgtcctggtcgaatgggctaaatacatccccgcattctgcgaactccccctagatgaccaagtcgccctactgcgcgcccacgcaggcgaacatctattactcggcgccaccaaacgcagcatggtattcaaagacgtcctcctcctcggcaacgactacatagtcccacgccactgcccagaactggccgaaatgagccgagtctctatccgcatactcgacgagctagtcctccccttccaagaactccaaattgacgacaacgaatacgcctacctcaaagccatcatattcttcgaccccgacgcgaaaggcctatccgaccccggtaaaatcaaaagactacgctcacaagtccaagtctcccttgaagactacatcaacgaccgccagtacgacagccgcggccgcttcggcgaactacttctcctcctccccaccctccaatccatcacctggcaaatgatcgaacaaatccaattcataaaactattcggaatggccaaaatcgacaacctcctgcaagaaatgctcctcggaggcgaaccctcagacgcaccccacgcccatcaccccctccatccacacttaatgcaagaacacatgggcaccaacgtaatcgtagccaacactatgcccacccacctatccaatggccaaatgtgcgaatggcccagaccaagaggacaagccgccgaacccgaagaaccacaaccagaacctcccggtggatccggctcagaaccctacaaactactccccggagccgtagctaccatcgtcaagcccctatcagccatcccccaacccacaatcaccaaacaggaagtcatctaaggactagtccctgttcccagagcccacttttttttctttttttgaaataaaatagcctgtctttcagatctaaaaaaaaaaaaaaaaaaaaaaaaaaaaaaaaaaaaaaaaaaaaaaaaaaaaaaaaaaaaaaaaaaaaaaaaaaaaaaaaaaaaaaaaaaaaaaaaaaaa

SEQ ID NO: 5427 - RNA, 1562 nt, synthetic construct
  misc_feature 1..1562: note = mRNA a-1 (A100) (opt11) from Homo sapiens__NP_000448.3__HNF4A(39-474)(S87A)
  source 1..1562: mol_type = other RNA
aggagagtcccgcagtcggcgtccagcggctctgcttgttcgtgtgtgtgtcgttgcaggccttattcaagcttaccatggacacctcaccctcagagggcaccaatctcaacgccccaaactcactcggagtaagtgcactatgcgcgatctgcggcgaccgcgccaccggcaaacactacggcgcatcctcctgcgacggctgcaaaggattcttccgacgcgccgtccgcaaaaaccacatgtactcatgccgcttctcacgccagtgcgtcgtagacaaagacaaacgcaatcaatgccgctactgccgactcaagaaatgcttccgcgccggaatgaagaaagaagcagtacaaaacgaacgcgaccgaatctccacccgccgctcctcctacgaagattcctccctcccctccatcaacgccctactccaagccgaagtactctcccgccaaatcacctctccagtttccggcataaacggcgacatacgagcaaagaaaattgcatctatcgccgacgtctgcgaatcgatgaaagagcaactcctagtactcgtagaatgggccaaatacatccccgcattctgcgaactcccacttgacgaccaagtcgcccttctccgagcacacgccggcgaacatctcctgctcggcgctacaaaaagaagcatggtcttcaaagacgtcctcctactcggcaacgactacatcgtcccccgccactgccccgaactagccgaaatgagccgagtctccatcagaatcctcgacgaactcgtactccccttccaagaactccaaatagacgacaacgaatatgcatacctcaaagcaatcatattcttcgaccccgacgccaaaggactttccgaccccggcaaaataaaacgcctccgatcccaagtacaggtctccctcgaagactacatcaacgacagacaatacgacagccgtggacgattcggagagttactcctactacttcccacccttcagtcaatcacctggcaaatgatagaacaaatccaattcatcaaactgttcggaatggctaaaatcgacaacctgctacaagaaatgctcctcggcggctcccctagcgacgccccacacgcacaccaccccctccacccacacctcatgcaagagcacatgggcacaaacgtaatagtagccaacacaatgcccacccacctctcgaacggccaaatgtgcgaatggccccgcccccgcggacaagccgcaaccccagaaacaccccaaccttcacccccaggcggctccggatccgaaccctacaaactactccccggagccgtagcaaccatagtcaaaccgctcagcgccatcccccaacccacaataaccaaacaagaagtcatctagggactagtccctgttcccagagcccacttttttttctttttttgaaataaaatagcctgtctttcagatctaaaaaaaaaaaaaaaaaaaaaaaaaaaaaaaaaaaaaaaaaaaaaaaaaaaaaaaaaaaaaaaaaaaaaaaaaaaaaaaaaaaaaaaaaaaaaaaaaaaa

SEQ ID NO: 5428 - RNA, 1562 nt, synthetic construct
  misc_feature 1..1562: note = mRNA a-1 (A100) (opt11) from Homo sapiens__NP_000448.3__HNF4A(39-474)(S87E)
  source 1..1562: mol_type = other RNA
aggagagtcccgcagtcggcgtccagcggctctgcttgttcgtgtgtgtgtcgttgcaggccttattcaagcttaccatggacacctccccctccgaaggaaccaacctaaacgcaccaaattccctcggcgtctccgccctttgcgccatatgtggggaccgcgcaacaggaaaacactacggcgcctcctcctgcgacggatgcaaaggattcttccgacgcgaagtcagaaaaaaccacatgtactcatgtcgattctcccgccagtgcgtcgtcgacaaagacaaaagaaaccaatgcagatactgtcgcctaaaaaaatgcttccgcgccggaatgaaaaaggaagcagtacagaacgaacgcgaccgcatctccaccagacgctcctcctacgaagactcatccctgccctcgatcaacgcacttctccaagccgaggtcctatcaagacaaatcacttctccagtatccggcatcaatggcgacatccgcgccaaaaaaatcgcctcaatcgccgacgtctgcgagtccatgaaagaacaactactagtccttgtagaatgggctaaatatattcccgccttctgcgaacttcccctagacgaccaagtagcactcctccgcgctcacgccggcgagcacctactactcggcgcaaccaaaagatcaatggtcttcaaagacgtcctcctcctgggcaacgactacatcgtcccccgacactgccccgaactcgcggaaatgtcccgcgtcagcatccgcatcctcgacgaactcgtactccccttccaagaactacaaatcgacgacaacgaatacgcctacctcaaagcgataatcttcttcgacccagacgccaaaggtctatccgacccaggaaaaatcaaacgtctccgctctcaagtacaagtctctctcgaagactacataaacgaccgccaatacgactccagaggccggttcggcgaactcctcctcctactccccacactccaaagcatcacctggcaaatgatcgaacaaatccaattcataaaactattcggcatggccaaaatagacaacctgctacaagaaatgctcctcggaggttccccctcagacgccccccacgcccaccacccccttcacccacacctaatgcaagaacacatgggcactaacgtaatagtagccaacacaatgcccacccacctctccaacggccaaatgtgtgaatggccaagaccacgcggacaagccgcaacccctgagaccccccagccctccccacccggcggctctggcagcgaaccctacaaactgctacccggggccgtcgccacaatcgtaaaaccactctcggcaatcccccaacccaccatcaccaaacaagaagttatctaaggactagtccctgttcccagagcccacttttttttctttttttgaaataaaatagcctgtctttcagatctaaaaaaaaaaaaaaaaaaaaaaaaaaaaaaaaaaaaaaaaaaaaaaaaaaaaaaaaaaaaaaaaaaaaaaaaaaaaaaaaaaaaaaaaaaaaaaaaaaaa

SEQ ID NO: 5429 - RNA, 1562 nt, synthetic construct
  misc_feature 1..1562: note = mRNA a-1 (A100) (opt11) from Homo sapiens__NP_000448.3__HNF4A(39-474)(R2V)
  source 1..1562: mol_type = other RNA
aggagagtcccgcagtcggcgtccagcggctctgcttgttcgtgtgtgtgtcgttgcaggccttattcaagcttaccatggacacctccccctccgaaggcacaaacctcaacgcccccaactccctcggcgtctccgccctatgcgccatatgcggagaccgagccaccggcaagcactacggcgcttcctcctgcgacggatgcaaaggcttcttccggagaagcgtccggaaaaaccacatgtattcctgccgattctcacgccaatgcgtagtcgacaaagacaaacgcaaccaatgccgctactgccgccttaagaaatgtttcagagccggaatgaagaaagaagccgtccaaaacgaacgcgaccgcataagcacccgccgctcctcatacgaagacagcagcctcccctccatcaacgccctcctccaagcagaagtgctctcccgacaaatcaccagccccgtaagcggaatcaacggcgacatacgcgccaagaaaatcgcctccatcgccgacgtctgcgaatcaatgaaagaacaactactcgtccttgtagaatgggccaaatacatccccgccttctgcgagctcccactcgacgaccaagtcgccctcctccgcgcacacgccggtgaacatctcctactaggagcaaccaaacgatcaatggtattcaaagacgtcctcctcctcggtaacgactacatagtcccaagacactgccccgaactagccgaaatgtcacgcgtctccatccgcatcctagacgaactcgtccttccctttcaagaactacaaatcgacgacaacgaatacgcctacctcaaagccatcatcttcttcgacccagacgcaaaaggactctcagaccccggcaaaatcaaacgcctccgctcccaagtccaagtcagcctcgaagactacatcaacgacagacaatacgactcacgaggccgcttcggagaactactactcttgctccccacactacaatcgataacctggcaaatgatcgaacaaatccaatttatcaaactattcggaatggcaaaaatagacaaccttctgcaagaaatgctccttggcggctctccctctgacgctccccacgcccaccaccccctccacccccaccttatgcaagaacacatgggaaccaacgtcatcgtagccaacacaatgcccacccacctatcaaacggccaaatgtgcgaatggccacggccacgcggccaagccgcaacacccgaaaccccacaaccctcacccccaggcggctccggctcagagccgtacaaactactacccggcgccgtagccaccatcgtgaaacctctctccgccatccctcaacccacaatcaccaaacaagaggtcatctaaggactagtccctgttcccagagcccacttttttttctttttttgaaataaaatagcctgtctttcagatctaaaaaaaaaaaaaaaaaaaaaaaaaaaaaaaaaaaaaaaaaaaaaaaaaaaaaaaaaaaaaaaaaaaaaaaaaaaaaaaaaaaaaaaaaaaaaaaaaaaa
